United States Patent Application Publication US 2026/0193644 A1 - sequence listing, part 6

SEQ ID NO: 12313 - protein, 2146 aa, Homo sapiens
MVNENTRMYIPEENHQGSNYGSPRPAHANMNANAAAGLAPEHIPTPGAALSWQAAIDAARQAKLMGSAGNATISTVSSTQRKRQQYGKPKKQGSTTATRPPRALLCLTLKNPIRRACISIVEWKPFEIIILLTIFANCVALAIYIPFPEDDSNATNSNLERVEYLFLIIFTVEAFLKVIAYGLLFHPNAYLRNGWNLLDFIIVVVGLFSAILEQATKADGANALGGKGAGFDVKALRAFRVLRPLRLVSGVPSLQVVLNSIIKAMVPLLHIALLVLFVIIIYAIIGLELFMGKMHKTCYNQEGIADVPAEDDPSPCALETGHGRQCQNGTVCKPGWDGPKHGITNFDNFAFAMLTVFQCITMEGWTDVLYWVNDAVGRDWPWIYFVTLIIIGSFFVLNLVLGVLSGEFSKEREKAKARGDFQKLREKQQLEEDLKGYLDWITQAEDIDPENEDEGMDEEKPRNMSMPTSETESVNTENVAGGDIEGENCGARLAHRISKSKFSRYWRRWNRFCRRKCRAAVKSNVFYWLVIFLVFLNTLTIASEHYNQPNWLTEVQDTANKALLALFTAEMLLKMYSLGLQAYFVSLFNRFDCFVVCGGILETILVETKIMSPLGISVLRCVRLLRIFKITRYWNSLSNLVASLLNSVRSIASLLLLLFLFIIIFSLLGMQLFGGKFNFDEMQTRRSTFDNFPQSLLTVFQILTGEDWNSVMYDGIMAYGGPSFPGMLVCIYFIILFICGNYILLNVFLAIAVDNLADAESLTSAQKEEEEEKERKKLARTASPEKKQELVEKPAVGESKEEKIELKSITADGESPPATKINMDDLQPNENEDKSPYPNPETTGEEDEEEPEMPVGPRPRPLSELHLKEKAVPMPEASAFFIFSSNNRFRLQCHRIVNDTIFTNLILFFILLSSISLAAEDPVQHTSFRNHILFYFDIVFTTIFTIEIALKMTAYGAFLHKGSFCRNYFNILDLLVVSVSLISFGIQSSAINVVKILRVLRVLRPLRAINRAKGLKHVVQCVFVAIRTIGNIVIVTTLLQFMFACIGVQLFKGKLYTCSDSSKQTEAECKGNYITYKDGEVDHPIIQPRSWENSKFDFDNVLAAMMALFTVSTFEGWPELLYRSIDSHTEDKGPIYNYRVEISIFFIIYIIIIAFFMMNIFVGFVIVTFQEQGEQEYKNCELDKNQRQCVEYALKARPLRRYIPKNQHQYKVWYVVNSTYFEYLMFVLILLNTICLAMQHYGQSCLFKIAMNILNMLFTGLFTVEMILKLIAFKPKHYFCDAWNTFDALIVVGSIVDIAITEVNNAEENSRISITFFRLFRVMRLVKLLSRGEGIRTLLWTFIKSFQALPYVALLIVMLFFIYAVIGMQVFGKIALNDTTEINRNNNFQTFPQAVLLLFRCATGEAWQDIMLACMPGKKCAPESEPSNSTEGETPCGSSFAVFYFISFYMLCAFLIINLFVAVIMDNFDYLTRDWSILGPHHLDEFKRIWAEYDPEAKGRIKHLDVVTLLRRIQPPLGFGKLCPHRVACKRLVSMNMPLNSDGTVMFNATLFALVRTALRIKTEEGPSPSEAHQGAEDPFRPAGNLEQANEELRAIIKKIWKRTSMKLLDQVVPPAGDDEVTVGKFYATFLIQEYFRKFKKRKEQGLVGKPSQRNALSLQAGLRTLHDIGPEIRRAISGDLTAEEELDKAMKEAVSAASEDDIFRRAGGLFGNHVSYYQSDGRSAFPQTFTTQRPLHINKAGSSQGDTESPSHEKLVDSTFTPSSYSSTGSNANINNANNTALGRLPRPAGYPSTVSTVEGHGPPLSPAIRVQEVAWKLSSNRCHSRESQAAMAGQEETSQDETYEVKMNHDTEACSEPSLLSTEMLSYQDDENRQLTLPEEDKRDIRQSPKRGFLRSASLGRRASFHLECLKRQKDRGGDISQKTVLPLHLVHHQALAVAGLSPLLQRSHSPASFPRPFATPPATPGSRGWPPQPVPTLRLEGVESSEKLNSSFPSIHCGSWAETTPGGGGSSAARRVRPVSLMVPSQAGAPGRQFHGSASSLVEAVLISEGLGQFAQDPKFIEVTTQELADACDMTIEEMESAADNILSGGAPQSPNGALLPFVNCRDAGQDRAGGEEDAGCVRARGRPSEEELQDSRVYVSSL

SEQ ID NO: 12314 - protein, 2138 aa, Homo sapiens
MVNENTRMYIPEENHQGSNYGSPRPAHANMNANAAAGLAPEHIPTPGAALSWQAAIDAARQAKLMGSAGNATISTVSSTQRKRQQYGKPKKQGSTTATRPPRALLCLTLKNPIRRACISIVEWKPFEIIILLTIFANCVALAIYIPFPEDDSNATNSNLERVEYLFLIIFTVEAFLKVIAYGLLFHPNAYLRNGWNLLDFIIVVVGLFSAILEQATKADGANALGGKGAGFDVKALRAFRVLRPLRLVSGVPSLQVVLNSIIKAMVPLLHIALLVLFVIIIYAIIGLELFMGKMHKTCYNQEGIADVPAEDDPSPCALETGHGRQCQNGTVCKPGWDGPKHGITNFDNFAFAMLTVFQCITMEGWTDVLYWVNDAVGRDWPWIYFVTLIIIGSFFVLNLVLGVLSGEFSKEREKAKARGDFQKLREKQQLEEDLKGYLDWITQAEDIDPENEDEGMDEEKPRNMSMPTSETESVNTENVAGGDIEGENCGARLAHRISKSKFSRYWRRWNRFCRRKCRAAVKSNVFYWLVIFLVFLNTLTIASEHYNQPNWLTEVQDTANKALLALFTAEMLLKMYSLGLQAYFVSLFNRFDCFVVCGGILETILVETKIMSPLGISVLRCVRLLRIFKITRYWNSLSNLVASLLNSVRSIASLLLLLFLFIIIFSLLGMQLFGGKFNFDEMQTRRSTFDNFPQSLLTVFQILTGEDWNSVMYDGIMAYGGPSFPGMLVCIYFIILFICGNYILLNVFLAIAVDNLADAESLTSAQKEEEEEKERKKLARTASPEKKQELVEKPAVGESKEEKIELKSITADGESPPATKINMDDLQPNENEDKSPYPNPETTGEEDEEEPEMPVGPRPRPLSELHLKEKAVPMPEASAFFIFSSNNRFRLQCHRIVNDTIFTNLILFFILLSSISLAAEDPVQHTSFRNHILFYFDIVFTTIFTIEIALKMTAYGAFLHKGSFCRNYFNILDLLVVSVSLISFGIQSSAINVVKILRVLRVLRPLRAINRAKGLKHVVQCVFVAIRTIGNIVIVTTLLQFMFACIGVQLFKGKLYTCSDSSKQTEAECKGNYITYKDGEVDHPIIQPRSWENSKFDFDNVLAAMMALFTVSTFEGWPELLYRSIDSHTEDKGPIYNYRVEISIFFIIYIIIIAFFMMNIFVGFVIVTFQEQGEQEYKNCELDKNQRQCVEYALKARPLRRYIPKNQHQYKVWYVVNSTYFEYLMFVLILLNTICLAMQHYGQSCLFKIAMNILNMLFTGLFTVEMILKLIAFKPKGYFSDPWNVFDFLIVIGSIIDVILSETNPAEHTQCSPSMNAEENSRISITFFRLFRVMRLVKLLSRGEGIRTLLWTFIKSFQALPYVALLIVMLFFIYAVIGMQVFGKIALNDTTEINRNNNFQTFPQAVLLLFRCATGEAWQDIMLACMPGKKCAPESEPSNSTEGETPCGSSFAVFYFISFYMLCAFLIINLFVAVIMDNFDYLTRDWSILGPHHLDEFKRIWAEYDPEAKGRIKHLDVVTLLRRIQPPLGFGKLCPHRVACKRLVSMNMPLNSDGTVMFNATLFALVRTALRIKTEGNLEQANEELRAIIKKIWKRTSMKLLDQVVPPAGDDEVTVGKFYATFLIQEYFRKFKKRKEQGLVGKPSQRNALSLQAGLRTLHDIGPEIRRAISGDLTAEEELDKAMKEAVSAASEDDIFRRAGGLFGNHVSYYQSDGRSAFPQTFTTQRPLHINKAGSSQGDTESPSHEKLVDSTFTPSSYSSTGSNANINNANNTALGRLPRPAGYPSTVSTVEGHGPPLSPAIRVQEVAWKLSSNRCHSRESQAAMAGQEETSQDETYEVKMNHDTEACSEPSLLSTEMLSYQDDENRQLTLPEEDKRDIRQSPKRGFLRSASLGRRASFHLECLKRQKDRGGDISQKTVLPLHLVHHQALAVAGLSPLLQRSHSPASFPRPFATPPATPGSRGWPPQPVPTLRLEGVESSEKLNSSFPSIHCGSWAETTPGGGGSSAARRVRPVSLMVPSQAGAPGRQFHGSASSLVEAVLISEGLGQFAQDPKFIEVTTQELADACDMTIEEMESAADNILSGGAPQSPNGALLPFVNCRDAGQDRAGGEEDAGCVRARGRPSEEELQDSRVYVSSL

SEQ ID NO: 12315 - protein, 2138 aa, Homo sapiens
MVNENTRMYIPEENHQGSNYGSPRPAHANMNANAAAGLAPEHIPTPGAALSWQAAIDAARQAKLMGSAGNATISTVSSTQRKRQQYGKPKKQGSTTATRPPRALLCLTLKNPIRRACISIVEWKPFEIIILLTIFANCVALAIYIPFPEDDSNATNSNLERVEYLFLIIFTVEAFLKVIAYGLLFHPNAYLRNGWNLLDFIIVVVGLFSAILEQATKADGANALGGKGAGFDVKALRAFRVLRPLRLVSGVPSLQVVLNSIIKAMVPLLHIALLVLFVIIIYAIIGLELFMGKMHKTCYNQEGIADVPAEDDPSPCALETGHGRQCQNGTVCKPGWDGPKHGITNFDNFAFAMLTVFQCITMEGWTDVLYWVNDAVGRDWPWIYFVTLIIIGSFFVLNLVLGVLSGEFSKEREKAKARGDFQKLREKQQLEEDLKGYLDWITQAEDIDPENEDEGMDEEKPRNMSMPTSETESVNTENVAGGDIEGENCGARLAHRISKSKFSRYWRRWNRFCRRKCRAAVKSNVFYWLVIFLVFLNTLTIASEHYNQPNWLTEVQDTANKALLALFTAEMLLKMYSLGLQAYFVSLFNRFDCFVVCGGILETILVETKIMSPLGISVLRCVRLLRIFKITRYWNSLSNLVASLLNSVRSIASLLLLLFLFIIIFSLLGMQLFGGKFNFDEMQTRRSTFDNFPQSLLTVFQILTGEDWNSVMYDGIMAYGGPSFPGMLVCIYFIILFICGNYILLNVFLAIAVDNLADAESLTSAQKEEEEEKERKKLARTASPEKKQELVEKPAVGESKEEKIELKSITADGESPPATKINMDDLQPNENEDKSPYPNPETTGEEDEEEPEMPVGPRPRPLSELHLKEKAVPMPEASAFFIFSSNNRFRLQCHRIVNDTIFTNLILFFILLSSISLAAEDPVQHTSFRNHILGNADYVFTSIFTLEIILKMTAYGAFLHKGSFCRNYFNILDLLVVSVSLISFGIQSSAINVVKILRVLRVLRPLRAINRAKGLKHVVQCVFVAIRTIGNIVIVTTLLQFMFACIGVQLFKGKLYTCSDSSKQTEAECKGNYITYKDGEVDHPIIQPRSWENSKFDFDNVLAAMMALFTVSTFEGWPELLYRSIDSHTEDKGPIYNYRVEISIFFIIYIIIIAFFMMNIFVGFVIVTFQEQGEQEYKNCELDKNQRQCVEYALKARPLRRYIPKNQHQYKVWYVVNSTYFEYLMFVLILLNTICLAMQHYGQSCLFKIAMNILNMLFTGLFTVEMILKLIAFKPKHYFCDAWNTFDALIVVGSIVDIAITEVNPAEHTQCSPSMNAEENSRISITFFRLFRVMRLVKLLSRGEGIRTLLWTFIKSFQALPYVALLIVMLFFIYAVIGMQVFGKIALNDTTEINRNNNFQTFPQAVLLLFRCATGEAWQDIMLACMPGKKCAPESEPSNSTEGETPCGSSFAVFYFISFYMLCAFLIINLFVAVIMDNFDYLTRDWSILGPHHLDEFKRIWAEYDPEAKGRIKHLDVVTLLRRIQPPLGFGKLCPHRVACKRLVSMNMPLNSDGTVMFNATLFALVRTALRIKTEGNLEQANEELRAIIKKIWKRTSMKLLDQVVPPAGDDEVTVGKFYATFLIQEYFRKFKKRKEQGLVGKPSQRNALSLQAGLRTLHDIGPEIRRAISGDLTAEEELDKAMKEAVSAASEDDIFRRAGGLFGNHVSYYQSDGRSAFPQTFTTQRPLHINKAGSSQGDTESPSHEKLVDSTFTPSSYSSTGSNANINNANNTALGRLPRPAGYPSTVSTVEGHGPPLSPAIRVQEVAWKLSSNRCHSRESQAAMAGQEETSQDETYEVKMNHDTEACSEPSLLSTEMLSYQDDENRQLTLPEEDKRDIRQSPKRGFLRSASLGRRASFHLECLKRQKDRGGDISQKTVLPLHLVHHQALAVAGLSPLLQRSHSPASFPRPFATPPATPGSRGWPPQPVPTLRLEGVESSEKLNSSFPSIHCGSWAETTPGGGGSSAARRVRPVSLMVPSQAGAPGRQFHGSASSLVEAVLISEGLGQFAQDPKFIEVTTQELADACDMTIEEMESAADNILSGGAPQSPNGALLPFVNCRDAGQDRAGGEEDAGCVRARGRPSEEELQDSRVYVSSL

SEQ ID NO: 12316 - protein, 629 aa, Homo sapiens
MTLLTFRDVAIEFSLEEWKCLDLAQQNLYRDVMLENYRNLFSVGLTVCKPGLITCLEQRKEPWNVKRQEAADGHPEMGFHHATQACLELLGSSDLPASASQSAGITGVNHRAQPGLNVSVDKFTALCSPGVLQTVKWFLEFRCIFSLAMSSHFTQDLLPEQGIQDAFPKRILRGYGNCGLDNLYLRKDWESLDECKLQKDYNGLNQCSSTTHSKIFQYNKYVKIFDNFSNLHRRNISNTGEKPFKCQECGKSFQMLSFLTEHQKIHTGKKFQKCGECGKTFIQCSHFTEPENIDTGEKPYKCQECNNVIKTCSVLTKNRIYAGGEHYRCEEFGKVFNQCSHLTEHEHGTEEKPCKYEECSSVFISCSSLSNQQMILAGEKLSKCETWYKGFNHSPNPSKHQRNEIGGKPFKCEECDSIFKWFSDLTKHKRIHTGEKPYKCDECGKAYTQSSHLSEHRRIHTGEKPYQCEECGKVFRTCSSLSNHKRTHSEEKPYTCEECGNIFKQLSDLTKHKKTHTGEKPYKCDECGKNFTQSSNLIVHKRIHTGEKPYKCEECGRVFMWFSDITKHKKTHTGEKPYKCDECGKNFTQSSNLIVHKRIHTGEKPYKCEKCGKAFTQFSHLTVHESIHT

SEQ ID NO: 12317 - protein, 2138 aa, Homo sapiens
MVNENTRMYIPEENHQGSNYGSPRPAHANMNANAAAGLAPEHIPTPGAALSWQAAIDAARQAKLMGSAGNATISTVSSTQRKRQQYGKPKKQGSTTATRPPRALLCLTLKNPIRRACISIVEWKPFEIIILLTIFANCVALAIYIPFPEDDSNATNSNLERVEYLFLIIFTVEAFLKVIAYGLLFHPNAYLRNGWNLLDFIIVVVGLFSAILEQATKADGANALGGKGAGFDVKALRAFRVLRPLRLVSGVPSLQVVLNSIIKAMVPLLHIALLVLFVIIIYAIIGLELFMGKMHKTCYNQEGIADVPAEDDPSPCALETGHGRQCQNGTVCKPGWDGPKHGITNFDNFAFAMLTVFQCITMEGWTDVLYWMQDAMGYELPWVYFVSLVIFGSFFVLNLVLGVLSGEFSKEREKAKARGDFQKLREKQQLEEDLKGYLDWITQAEDIDPENEDEGMDEEKPRNMSMPTSETESVNTENVAGGDIEGENCGARLAHRISKSKFSRYWRRWNRFCRRKCRAAVKSNVFYWLVIFLVFLNTLTIASEHYNQPNWLTEVQDTANKALLALFTAEMLLKMYSLGLQAYFVSLFNRFDCFVVCGGILETILVETKIMSPLGISVLRCVRLLRIFKITRYWNSLSNLVASLLNSVRSIASLLLLLFLFIIIFSLLGMQLFGGKFNFDEMQTRRSTFDNFPQSLLTVFQILTGEDWNSVMYDGIMAYGGPSFPGMLVCIYFIILFICGNYILLNVFLAIAVDNLADAESLTSAQKEEEEEKERKKLARTASPEKKQELVEKPAVGESKEEKIELKSITADGESPPATKINMDDLQPNENEDKSPYPNPETTGEEDEEEPEMPVGPRPRPLSELHLKEKAVPMPEASAFFIFSSNNRFRLQCHRIVNDTIFTNLILFFILLSSISLAAEDPVQHTSFRNHILFYFDIVFTTIFTIEIALKMTAYGAFLHKGSFCRNYFNILDLLVVSVSLISFGIQSSAINVVKILRVLRVLRPLRAINRAKGLKHVVQCVFVAIRTIGNIVIVTTLLQFMFACIGVQLFKGKLYTCSDSSKQTEAECKGNYITYKDGEVDHPIIQPRSWENSKFDFDNVLAAMMALFTVSTFEGWPELLYRSIDSHTEDKGPIYNYRVEISIFFIIYIIIIAFFMMNIFVGFVIVTFQEQGEQEYKNCELDKNQRQCVEYALKARPLRRYIPKNQHQYKVWYVVNSTYFEYLMFVLILLNTICLAMQHYGQSCLFKIAMNILNMLFTGLFTVEMILKLIAFKPKGYFSDPWNVFDFLIVIGSIIDVILSETNPAEHTQCSPSMNAEENSRISITFFRLFRVMRLVKLLSRGEGIRTLLWTFIKSFQALPYVALLIVMLFFIYAVIGMQVFGKIALNDTTEINRNNNFQTFPQAVLLLFRCATGEAWQDIMLACMPGKKCAPESEPSNSTEGETPCGSSFAVFYFISFYMLCAFLIINLFVAVIMDNFDYLTRDWSILGPHHLDEFKRIWAEYDPEAKGRIKHLDVVTLLRRIQPPLGFGKLCPHRVACKRLVSMNMPLNSDGTVMFNATLFALVRTALRIKTEGNLEQANEELRAIIKKIWKRTSMKLLDQVVPPAGDDEVTVGKFYATFLIQEYFRKFKKRKEQGLVGKPSQRNALSLQAGLRTLHDIGPEIRRAISGDLTAEEELDKAMKEAVSAASEDDIFRRAGGLFGNHVSYYQSDGRSAFPQTFTTQRPLHINKAGSSQGDTESPSHEKLVDSTFTPSSYSSTGSNANINNANNTALGRLPRPAGYPSTVSTVEGHGPPLSPAIRVQEVAWKLSSNRCHSRESQAAMAGQEETSQDETYEVKMNHDTEACSEPSLLSTEMLSYQDDENRQLTLPEEDKRDIRQSPKRGFLRSASLGRRASFHLECLKRQKDRGGDISQKTVLPLHLVHHQALAVAGLSPLLQRSHSPASFPRPFATPPATPGSRGWPPQPVPTLRLEGVESSEKLNSSFPSIHCGSWAETTPGGGGSSAARRVRPVSLMVPSQAGAPGRQFHGSASSLVEAVLISEGLGQFAQDPKFIEVTTQELADACDMTIEEMESAADNILSGGAPQSPNGALLPFVNCRDAGQDRAGGEEDAGCVRARGRPSEEELQDSRVYVSSL

SEQ ID NO: 12318 - protein, 807 aa, Homo sapiens
MKEWKSKMEISEEKKSARAASEKLQRQITQECELVETSNSEDRLLKHWVSPLKDAMRHLPSQESGIREMHIIPQKAIVGEIGHGCNEGEKILSAGESSHRYEVSGQNFKQKSGLTEHQKIHNINKTYECKECEKTFNRSSNLIIHQRIHTGNKPYVCNECGKDSNQSSNLIIHQRIHTGKKPYICHECGKDFNQSSNLVRHKQIHSGGNPYECKECGKAFKGSSNLVLHQRIHSRGKPYLCNKCGKAFSQSTDLIIHHRIHTGEKPYECYDCGQMFSQSSHLVPHQRIHTGEKPLKCNECEKAFRQHSHLTEHQRLHSGEKPYECHRCGKTFSGRTAFLKHQRLHAGEKIEECEKTFSKDEELREEQRIHQEEKAYWCNQCGRNFQGTSDLIRHQVTHTGEKPYECKECGKTFNQSSDLLRHHRIHSGEKPCVCSKCGKSFRGSSDLIRHHRVHTGEKPYECSECGKAFSQRSHLVTHQKIHTGEKPYQCTECGKAFRRRSLLIQHRRIHSGEKPYECKECGKLFIWRTAFLKHQSLHTGEKLECEKTFSQDEELRGEQKIHQEAKAYWCNQCGRAFQGSSDLIRHQVTHTREKPYECKECGKTFNQSSDLLRHHRIHSGEKPYVCNKCGKSFRGSSDLIKHHRIHTGEKPYECSECGKAFSQRSHLATHQKIHTGEKPYQCSECGNAFRRRSLLIQHRRLHSGEKPYECKECGKLFMWHTAFLKHQRLHAGEKLEECEKTFSKDEELRKEQRTHQEKKVYWCNQCSRTFQGSSDLIRHQVTHTREKPYECKECGKTQSELRPSETS

SEQ ID NO: 12319 - protein, 2158 aa, Homo sapiens
MVNENTRMYIPEENHQGSNYGSPRPAHANMNANAAAGLAPEHIPTPGAALSWQAAIDAARQAKLMGSAGNATISTVSSTQRKRQQYGKPKKQGSTTATRPPRALLCLTLKNPIRRACISIVEWKPFEIIILLTIFANCVALAIYIPFPEDDSNATNSNLERVEYLFLIIFTVEAFLKVIAYGLLFHPNAYLRNGWNLLDFIIVVVGLFSAILEQATKADGANALGGKGAGFDVKALRAFRVLRPLRLVSGVPSLQVVLNSIIKAMVPLLHIALLVLFVIIIYAIIGLELFMGKMHKTCYNQEGIADVPAEDDPSPCALETGHGRQCQNGTVCKPGWDGPKHGITNFDNFAFAMLTVFQCITMEGWTDVLYWVNDAVGRDWPWIYFVTLIIIGSFFVLNLVLGVLSGEFSKEREKAKARGDFQKLREKQQLEEDLKGYLDWITQAEDIDPENEDEGMDEEKPRNMSMPTSETESVNTENVAGGDIEGENCGARLAHRISKSKFSRYWRRWNRFCRRKCRAAVKSNVFYWLVIFLVFLNTLTIASEHYNQPNWLTEVQDTANKALLALFTAEMLLKMYSLGLQAYFVSLFNRFDCFVVCGGILETILVETKIMSPLGISVLRCVRLLRIFKITRYWNSLSNLVASLLNSVRSIASLLLLLFLFIIIFSLLGMQLFGGKFNFDEMQTRRSTFDNFPQSLLTVFQILTGEDWNSVMYDGIMAYGGPSFPGMLVCIYFIILFICGNYILLNVFLAIAVDNLADAESLTSAQKEEEEEKERKKLARTASPEKKQELVEKPAVGESKEEKIELKSITADGESPPATKINMDDLQPNENEDKSPYPNPETTGEEDEEEPEMPVGPRPRPLSELHLKEKAVPMPEASAFFIFSSNNRFRLQCHRIVNDTIFTNLILFFILLSSISLAAEDPVQHTSFRNHILFYFDIVFTTIFTIEIALKILGNADYVFTSIFTLEIILKMTAYGAFLHKGSFCRNYFNILDLLVVSVSLISFGIQSSAINVVKILRVLRVLRPLRAINRAKGLKHVVQCVFVAIRTIGNIVIVTTLLQFMFACIGVQLFKGKLYTCSDSSKQTEAECKGNYITYKDGEVDHPIIQPRSWENSKFDFDNVLAAMMALFTVSTFEGWPELLYRSIDSHTEDKGPIYNYRVEISIFFIIYIIIIAFFMMNIFVGFVIVTFQEQGEQEYKNCELDKNQRQCVEYALKARPLRRYIPKNQHQYKVWYVVNSTYFEYLMFVLILLNTICLAMQHYGQSCLFKIAMNILNMLFTGLFTVEMILKLIAFKPKHYFCDAWNTFDALIVVGSIVDIAITEVNPAEHTQCSPSMNAEENSRISITFFRLFRVMRLVKLLSRGEGIRTLLWTFIKSFQALPYVALLIVMLFFIYAVIGMQVFGKIALNDTTEINRNNNFQTFPQAVLLLFRCATGEAWQDIMLACMPGKKCAPESEPSNSTEGETPCGSSFAVFYFISFYMLCAFLIINLFVAVIMDNFDYLTRDWSILGPHHLDEFKRIWAEYDPEAKGRIKHLDVVTLLRRIQPPLGFGKLCPHRVACKRLVSMNMPLNSDGTVMFNATLFALVRTALRIKTEGNLEQANEELRAIIKKIWKRTSMKLLDQVVPPAGDDEVTVGKFYATFLIQEYFRKFKKRKEQGLVGKPSQRNALSLQAGLRTLHDIGPEIRRAISGDLTAEEELDKAMKEAVSAASEDDIFRRAGGLFGNHVSYYQSDGRSAFPQTFTTQRPLHINKAGSSQGDTESPSHEKLVDSTFTPSSYSSTGSNANINNANNTALGRLPRPAGYPSTVSTVEGHGPPLSPAIRVQEVAWKLSSNRCHSRESQAAMAGQEETSQDETYEVKMNHDTEACSEPSLLSTEMLSYQDDENRQLTLPEEDKRDIRQSPKRGFLRSASLGRRASFHLECLKRQKDRGGDISQKTVLPLHLVHHQALAVAGLSPLLQRSHSPASFPRPFATPPATPGSRGWPPQPVPTLRLEGVESSEKLNSSFPSIHCGSWAETTPGGGGSSAARRVRPVSLMVPSQAGAPGRQFHGSASSLVEAVLISEGLGQFAQDPKFIEVTTQELADACDMTIEEMESAADNILSGGAPQSPNGALLPFVNCRDAGQDRAGGEEDAGCVRARGRPSEEELQDSRVYVSSL

SEQ ID NO: 12320 - protein, 2173 aa, Homo sapiens
MVNENTRMYIPEENHQGSNYGSPRPAHANMNANAAAGLAPEHIPTPGAALSWQAAIDAARQAKLMGSAGNATISTVSSTQRKRQQYGKPKKQGSTTATRPPRALLCLTLKNPIRRACISIVEWKPFEIIILLTIFANCVALAIYIPFPEDDSNATNSNLERVEYLFLIIFTVEAFLKVIAYGLLFHPNAYLRNGWNLLDFIIVVVGLFSAILEQATKADGANALGGKGAGFDVKALRAFRVLRPLRLVSGVPSLQVVLNSIIKAMVPLLHIALLVLFVIIIYAIIGLELFMGKMHKTCYNQEGIADVPAEDDPSPCALETGHGRQCQNGTVCKPGWDGPKHGITNFDNFAFAMLTVFQCITMEGWTDVLYWMQDAMGYELPWVYFVSLVIFGSFFVLNLVLGVLSGEFSKEREKAKARGDFQKLREKQQLEEDLKGYLDWITQAEDIDPENEDEGMDEEKPRNMSMPTSETESVNTENVAGGDIEGENCGARLAHRISKSKFSRYWRRWNRFCRRKCRAAVKSNVFYWLVIFLVFLNTLTIASEHYNQPNWLTEVQDTANKALLALFTAEMLLKMYSLGLQAYFVSLFNRFDCFVVCGGILETILVETKIMSPLGISVLRCVRLLRIFKITRYWNSLSNLVASLLNSVRSIASLLLLLFLFIIIFSLLGMQLFGGKFNFDEMQTRRSTFDNFPQSLLTVFQILTGEDWNSVMYDGIMAYGGPSFPGMLVCIYFIILFICGNYILLNVFLAIAVDNLADAESLTSAQKEEEEEKERKKLARTASPEKKQELVEKPAVGESKEEKIELKSITADGESPPATKINMDDLQPNENEDKSPYPNPETTGEEDEEEPEMPVGPRPRPLSELHLKEKAVPMPEASAFFIFSSNNRFRLQCHRIVNDTIFTNLILFFILLSSISLAAEDPVQHTSFRNHILFYFDIVFTTIFTIEIALKMTAYGAFLHKGSFCRNYFNILDLLVVSVSLISFGIQSSAINVVKILRVLRVLRPLRAINRAKGLKHVVQCVFVAIRTIGNIVIVTTLLQFMFACIGVQLFKGKLYTCSDSSKQTEAECKGNYITYKDGEVDHPIIQPRSWENSKFDFDNVLAAMMALFTVSTFEGWPELLYRSIDSHTEDKGPIYNYRVEISIFFIIYIIIIAFFMMNIFVGFVIVTFQEQGEQEYKNCELDKNQRQCVEYALKARPLRRYIPKNQHQYKVWYVVNSTYFEYLMFVLILLNTICLAMQHYGQSCLFKIAMNILNMLFTGLFTVEMILKLIAFKPKGYFSDPWNVFDFLIVIGSIIDVILSETNPAEHTQCSPSMNAEENSRISITFFRLFRVMRLVKLLSRGEGIRTLLWTFIKSFQALPYVALLIVMLFFIYAVIGMQVFGKIALNDTTEINRNNNFQTFPQAVLLLFRCATGEAWQDIMLACMPGKKCAPESEPSNSTEGETPCGSSFAVFYFISFYMLCAFLIINLFVAVIMDNFDYLTRDWSILGPHHLDEFKRIWAEYDPEAKGRIKHLDVVTLLRRIQPPLGFGKLCPHRVACKRLVSMNMPLNSDGTVMFNATLFALVRTALRIKTEGNLEQANEELRAIIKKIWKRTSMKLLDQVVPPAGDDEVTVGKFYATFLIQEYFRKFKKRKEQGLVGKPSQRNALSLQAGLRTLHDIGPEIRRAISGDLTAEEELDKAMKEAVSAASEDDIFRRAGGLFGNHVSYYQSDGRSAFPQTFTTQRPLHINKAGSSQGDTESPSHEKLVDSTFTPSSYSSTGSNANINNANNTALGRLPRPAGYPSTVSTVEGHGPPLSPAIRVQEVAWKLSSNRERHVPMCEDLELRRDSGSAGTQAHCLLLRRANPSRCHSRESQAAMAGQEETSQDETYEVKMNHDTEACSEPSLLSTEMLSYQDDENRQLTLPEEDKRDIRQSPKRGFLRSASLGRRASFHLECLKRQKDRGGDISQKTVLPLHLVHHQALAVAGLSPLLQRSHSPASFPRPFATPPATPGSRGWPPQPVPTLRLEGVESSEKLNSSFPSIHCGSWAETTPGGGGSSAARRVRPVSLMVPSQAGAPGRQFHGSASSLVEAVLISEGLGQFAQDPKFIEVTTQELADACDMTIEEMESAADNILSGGAPQSPNGALLPFVNCRDAGQDRAGGEEDAGCVRARGRPSEEELQDSRVYVSSL

SEQ ID NO: 12321 - protein, 2157 aa, Homo sapiens
MVNENTRMYIPEENHQGSNYGSPRPAHANMNANAAAGLAPEHIPTPGAALSWQAAIDAARQAKLMGSAGNATISTVSSTQRKRQQYGKPKKQGSTTATRPPRALLCLTLKNPIRRACISIVEWKPFEIIILLTIFANCVALAIYIPFPEDDSNATNSNLERVEYLFLIIFTVEAFLKVIAYGLLFHPNAYLRNGWNLLDFIIVVVGLFSAILEQATKADGANALGGKGAGFDVKALRAFRVLRPLRLVSGVPSLQVVLNSIIKAMVPLLHIALLVLFVIIIYAIIGLELFMGKMHKTCYNQEGIADVPAEDDPSPCALETGHGRQCQNGTVCKPGWDGPKHGITNFDNFAFAMLTVFQCITMEGWTDVLYWVNDAVGRDWPWIYFVTLIIIGSFFVLNLVLGVLSGEFSKEREKAKARGDFQKLREKQQLEEDLKGYLDWITQAEDIDPENEDEGMDEEKPRNMSMPTSETESVNTENVAGGDIEGENCGARLAHRISKSKFSRYWRRWNRFCRRKCRAAVKSNVFYWLVIFLVFLNTLTIASEHYNQPNWLTEVQDTANKALLALFTAEMLLKMYSLGLQAYFVSLFNRFDCFVVCGGILETILVETKIMSPLGISVLRCVRLLRIFKITRYWNSLSNLVASLLNSVRSIASLLLLLFLFIIIFSLLGMQLFGGKFNFDEMQTRRSTFDNFPQSLLTVFQILTGEDWNSVMYDGIMAYGGPSFPGMLVCIYFIILFICGNYILLNVFLAIAVDNLADAESLTSAQKEEEEEKERKKLARTASPEKKQELVEKPAVGESKEEKIELKSITADGESPPATKINMDDLQPNENEDKSPYPNPETTGEEDEEEPEMPVGPRPRPLSELHLKEKAVPMPEASAFFIFSSNNRFRLQCHRIVNDTIFTNLILFFILLSSISLAAEDPVQHTSFRNHILFYFDIVFTTIFTIEIALKMTAYGAFLHKGSFCRNYFNILDLLVVSVSLISFGIQSSAINVVKILRVLRVLRPLRAINRAKGLKHVVQCVFVAIRTIGNIVIVTTLLQFMFACIGVQLFKGKLYTCSDSSKQTEAECKGNYITYKDGEVDHPIIQPRSWENSKFDFDNVLAAMMALFTVSTFEGWPELLYRSIDSHTEDKGPIYNYRVEISIFFIIYIIIIAFFMMNIFVGFVIVTFQEQGEQEYKNCELDKNQRQCVEYALKARPLRRYIPKNQHQYKVWYVVNSTYFEYLMFVLILLNTICLAMQHYGQSCLFKIAMNILNMLFTGLFTVEMILKLIAFKPKHYFCDAWNTFDALIVVGSIVDIAITEVNPAEHTQCSPSMNAEENSRISITFFRLFRVMRLVKLLSRGEGIRTLLWTFIKSFQALPYVALLIVMLFFIYAVIGMQVFGKIALNDTTEINRNNNFQTFPQAVLLLFRCATGEAWQDIMLACMPGKKCAPESEPSNSTEGETPCGSSFAVFYFISFYMLCAFLIINLFVAVIMDNFDYLTRDWSILGPHHLDEFKRIWAEYDPEAKGRIKHLDVVTLLRRIQPPLGFGKLCPHRVACKRLVSMNMPLNSDGTVMFNATLFALVRTALRIKTEEGPSPSEAHQGAEDPFRPAGNLEQANEELRAIIKKIWKRTSMKLLDQVVPPAGDDEVTVGKFYATFLIQEYFRKFKKRKEQGLVGKPSQRNALSLQAGLRTLHDIGPEIRRAISGDLTAEEELDKAMKEAVSAASEDDIFRRAGGLFGNHVSYYQSDGRSAFPQTFTTQRPLHINKAGSSQGDTESPSHEKLVDSTFTPSSYSSTGSNANINNANNTALGRLPRPAGYPSTVSTVEGHGPPLSPAIRVQEVAWKLSSNRCHSRESQAAMAGQEETSQDETYEVKMNHDTEACSEPSLLSTEMLSYQDDENRQLTLPEEDKRDIRQSPKRGFLRSASLGRRASFHLECLKRQKDRGGDISQKTVLPLHLVHHQALAVAGLSPLLQRSHSPASFPRPFATPPATPGSRGWPPQPVPTLRLEGVESSEKLNSSFPSIHCGSWAETTPGGGGSSAARRVRPVSLMVPSQAGAPGRQFHGSASSLVEAVLISEGLGQFAQDPKFIEVTTQELADACDMTIEEMESAADNILSGGAPQSPNGALLPFVNCRDAGQDRAGGEEDAGCVRARGRPSEEELQDSRVYVSSL

SEQ ID NO: 12322 - protein, 2155 aa, Homo sapiens
MVNENTRMYIPEENHQGSNYGSPRPAHANMNANAAAGLAPEHIPTPGAALSWQAAIDAARQAKLMGSAGNATISTVSSTQRKRQQYGKPKKQGSTTATRPPRALLCLTLKNPIRRACISIVEWKPFEIIILLTIFANCVALAIYIPFPEDDSNATNSNLERVEYLFLIIFTVEAFLKVIAYGLLFHPNAYLRNGWNLLDFIIVVVGLFSAILEQATKADGANALGGKGAGFDVKALRAFRVLRPLRLVSGVPSLQVVLNSIIKAMVPLLHIALLVLFVIIIYAIIGLELFMGKMHKTCYNQEGIADVPAEDDPSPCALETGHGRQCQNGTVCKPGWDGPKHGITNFDNFAFAMLTVFQCITMEGWTDVLYWVNDAVGRDWPWIYFVTLIIIGSFFVLNLVLGVLSGEFSKEREKAKARGDFQKLREKQQLEEDLKGYLDWITQAEDIDPENEDEGMDEEKPRNMSMPTSETESVNTENVAGGDIEGENCGARLAHRISKSKFSRYWRRWNRFCRRKCRAAVKSNVFYWLVIFLVFLNTLTIASEHYNQPNWLTEVQDTANKALLALFTAEMLLKMYSLGLQAYFVSLFNRFDCFVVCGGILETILVETKIMSPLGISVLRCVRLLRIFKITRYWNSLSNLVASLLNSVRSIASLLLLLFLFIIIFSLLGMQLFGGKFNFDEMQTRRSTFDNFPQSLLTVFQILTGEDWNSVMYDGIMAYGGPSFPGMLVCIYFIILFICGNYILLNVFLAIAVDNLADAESLTSAQKEEEEEKERKKLARTASPEKKQELVEKPAVGESKEEKIELKSITADGESPPATKINMDDLQPNENEDKSPYPNPETTGEEDEEEPEMPVGPRPRPLSELHLKEKAVPMPEASAFFIFSSNNRFRLQCHRIVNDTIFTNLILFFILLSSISLAAEDPVQHTSFRNHILGNADYVFTSIFTLEIILKMTAYGAFLHKGSFCRNYFNILDLLVVSVSLISFGIQSSAINVVKILRVLRVLRPLRAINRAKGLKHVVQCVFVAIRTIGNIVIVTTLLQFMFACIGVQLFKGKLYTCSDSSKQTEAECKGNYITYKDGEVDHPIIQPRSWENSKFDFDNVLAAMMALFTVSTFEGWPELLYRSIDSHTEDKGPIYNYRVEISIFFIIYIIIIAFFMMNIFVGFVIVTFQEQGEQEYKNCELDKNQRQCVEYALKARPLRRYIPKNQHQYKVWYVVNSTYFEYLMFVLILLNTICLAMQHYGQSCLFKIAMNILNMLFTGLFTVEMILKLIAFKPKGYFSDPWNVFDFLIVIGSIIDVILSETNHYFCDAWNTFDALIVVGSIVDIAITEVNNAEENSRISITFFRLFRVMRLVKLLSRGEGIRTLLWTFIKSFQALPYVALLIVMLFFIYAVIGMQVFGKIALNDTTEINRNNNFQTFPQAVLLLFRCATGEAWQDIMLACMPGKKCAPESEPSNSTEGETPCGSSFAVFYFISFYMLCAFLIINLFVAVIMDNFDYLTRDWSILGPHHLDEFKRIWAEYDPEAKGRIKHLDVVTLLRRIQPPLGFGKLCPHRVACKRLVSMNMPLNSDGTVMFNATLFALVRTALRIKTEGNLEQANEELRAIIKKIWKRTSMKLLDQVVPPAGDDEVTVGKFYATFLIQEYFRKFKKRKEQGLVGKPSQRNALSLQAGLRTLHDIGPEIRRAISGDLTAEEELDKAMKEAVSAASEDDIFRRAGGLFGNHVSYYQSDGRSAFPQTFTTQRPLHINKAGSSQGDTESPSHEKLVDSTFTPSSYSSTGSNANINNANNTALGRLPRPAGYPSTVSTVEGHGPPLSPAIRVQEVAWKLSSNRCHSRESQAAMAGQEETSQDETYEVKMNHDTEACSEPSLLSTEMLSYQDDENRQLTLPEEDKRDIRQSPKRGFLRSASLGRRASFHLECLKRQKDRGGDISQKTVLPLHLVHHQALAVAGLSPLLQRSHSPASFPRPFATPPATPGSRGWPPQPVPTLRLEGVESSEKLNSSFPSIHCGSWAETTPGGGGSSAARRVRPVSLMVPSQAGAPGRQFHGSASSLVEAVLISEGLGQFAQDPKFIEVTTQELADACDMTIEEMESAADNILSGGAPQSPNGALLPFVNCRDAGQDRAGGEEDAGCVRARGRPSEEELQDSRVYVSSL

SEQ ID NO: 12323 - protein, 2209 aa, Homo sapiens
MVNENTRMYIPEENHQGSNYGSPRPAHANMNANAAAGLAPEHIPTPGAALSWQAAIDAARQAKLMGSAGNATISTVSSTQRKRQQYGKPKKQGSTTATRPPRALLCLTLKNPIRRACISIVEWKPFEIIILLTIFANCVALAIYIPFPEDDSNATNSNLERVEYLFLIIFTVEAFLKVIAYGLLFHPNAYLRNGWNLLDFIIVVVGLFSAILEQATKADGANALGGKGAGFDVKALRAFRVLRPLRLVSGVPSLQVVLNSIIKAMVPLLHIALLVLFVIIIYAIIGLELFMGKMHKTCYNQEGIADVPAEDDPSPCALETGHGRQCQNGTVCKPGWDGPKHGITNFDNFAFAMLTVFQCITMEGWTDVLYWMQDAMGYELPWVYFVSLVIFGSFFVLNLVLGVLSGEFSKEREKAKARGDFQKLREKQQLEEDLKGYLDWITQAEDIDPENEDEGMDEEKPRNMSMPTSETESVNTENVAGGDIEGENCGARLAHRISKSKFSRYWRRWNRFCRRKCRAAVKSNVFYWLVIFLVFLNTLTIASEHYNQPNWLTEVQDTANKALLALFTAEMLLKMYSLGLQAYFVSLFNRFDCFVVCGGILETILVETKIMSPLGISVLRCVRLLRIFKITRYWNSLSNLVASLLNSVRSIASLLLLLFLFIIIFSLLGMQLFGGKFNFDEMQTRRSTFDNFPQSLLTVFQILTGEDWNSVMYDGIMAYGGPSFPGMLVCIYFIILFICGNYILLNVFLAIAVDNLADAESLTSAQKEEEEEKERKKLARTASPEKKQELVEKPAVGESKEEKIELKSITADGESPPATKINMDDLQPNENEDKSPYPNPETTGEEDEEEPEMPVGPRPRPLSELHLKEKAVPMPEASAFFIFSSNNRFRLQCHRIVNDTIFTNLILFFILLSSISLAAEDPVQHTSFRNHILFYFDIVFTTIFTIEIALKMTAYGAFLHKGSFCRNYFNILDLLVVSVSLISFGIQSSAINVVKILRVLRVLRPLRAINRAKGLKHVVQCVFVAIRTIGNIVIVTTLLQFMFACIGVQLFKGKLYTCSDSSKQTEAECKGNYITYKDGEVDHPIIQPRSWENSKFDFDNVLAAMMALFTVSTFEGWPELLYRSIDSHTEDKGPIYNYRVEISIFFIIYIIIIAFFMMNIFVGFVIVTFQEQGEQEYKNCELDKNQRQCVEYALKARPLRRYIPKNQHQYKVWYVVNSTYFEYLMFVLILLNTICLAMQHYGQSCLFKIAMNILNMLFTGLFTVEMILKLIAFKPKHYFCDAWNTFDALIVVGSIVDIAITEVNPAEHTQCSPSMNAEENSRISITFFRLFRVMRLVKLLSRGEGIRTLLWTFIKSFQALPYVALLIVMLFFIYAVIGMQVFGKIALNDTTEINRNNNFQTFPQAVLLLFRCATGEAWQDIMLACMPGKKCAPESEPSNSTEGETPCGSSFAVFYFISFYMLCAFLIINLFVAVIMDNFDYLTRDWSILGPHHLDEFKRIWAEYDPEAKGRIKHLDVVTLLRRIQPPLGFGKLCPHRVACKRLVSMNMPLNSDGTVMFNATLFALVRTALRIKTEGNLEQANEELRAIIKKIWKRTSMKLLDQVVPPAGDDEVTVGKFYATFLIQEYFRKFKKRKEQGLVGKPSQRNALSLQAGLRTLHDIGPEIRRAISGDLTAEEELDKAMKEAVSAASEDDIFRRAGGLFGNHVSYYQSDGRSAFPQTFTTQRPLHINKAGSSQGDTESPSHEKLVDSTFTPSSYSSTGSNANINNANNTALGRLPRPAGYPSTVSTVEGHGPPLSPAIRVQEVAWKLSSNRMHCCDMLDGGTFPPALGPRRAPPCLHQQLQGSLAGLREDTPCIVPGHASLCCSSRVGEWLPAGCTAPQHARCHSRESQAAMAGQEETSQDETYEVKMNHDTEACSEPSLLSTEMLSYQDDENRQLTLPEEDKRDIRQSPKRGFLRSASLGRRASFHLECLKRQKDRGGDISQKTVLPLHLVHHQALAVAGLSPLLQRSHSPASFPRPFATPPATPGSRGWPPQPVPTLRLEGVESSEKLNSSFPSIHCGSWAETTPGGGGSSAARRVRPVSLMVPSQAGAPGRQFHGSASSLVEAVLISEGLGQFAQDPKFIEVTTQELADACDMTIEEMESAADNILSGGAPQSPNGALLPFVNCRDAGQDRAGGEEDAGCVRARGRPSEEELQDSRVYVSSL

SEQ ID NO: 12324 - protein, 2157 aa, Homo sapiens
MVNENTRMYIPEENHQGSNYGSPRPAHANMNANAAAGLAPEHIPTPGAALSWQAAIDAARQAKLMGSAGNATISTVSSTQRKRQQYGKPKKQGSTTATRPPRALLCLTLKNPIRRACISIVEWKPFEIIILLTIFANCVALAIYIPFPEDDSNATNSNLERVEYLFLIIFTVEAFLKVIAYGLLFHPNAYLRNGWNLLDFIIVVVGLFSAILEQATKADGANALGGKGAGFDVKALRAFRVLRPLRLVSGVPSLQVVLNSIIKAMVPLLHIALLVLFVIIIYAIIGLELFMGKMHKTCYNQEGIADVPAEDDPSPCALETGHGRQCQNGTVCKPGWDGPKHGITNFDNFAFAMLTVFQCITMEGWTDVLYWVNDAVGRDWPWIYFVTLIIIGSFFVLNLVLGVLSGEFSKEREKAKARGDFQKLREKQQLEEDLKGYLDWITQAEDIDPENEDEGMDEEKPRNMSMPTSETESVNTENVAGGDIEGENCGARLAHRISKSKFSRYWRRWNRFCRRKCRAAVKSNVFYWLVIFLVFLNTLTIASEHYNQPNWLTEVQDTANKALLALFTAEMLLKMYSLGLQAYFVSLFNRFDCFVVCGGILETILVETKIMSPLGISVLRCVRLLRIFKITRYWNSLSNLVASLLNSVRSIASLLLLLFLFIIIFSLLGMQLFGGKFNFDEMQTRRSTFDNFPQSLLTVFQILTGEDWNSVMYDGIMAYGGPSFPGMLVCIYFIILFICGNYILLNVFLAIAVDNLADAESLTSAQKEEEEEKERKKLARTASPEKKQELVEKPAVGESKEEKIELKSITADGESPPATKINMDDLQPNENEDKSPYPNPETTGEEDEEEPEMPVGPRPRPLSELHLKEKAVPMPEASAFFIFSSNNRFRLQCHRIVNDTIFTNLILFFILLSSISLAAEDPVQHTSFRNHILGNADYVFTSIFTLEIILKMTAYGAFLHKGSFCRNYFNILDLLVVSVSLISFGIQSSAINVVKILRVLRVLRPLRAINRAKGLKHVVQCVFVAIRTIGNIVIVTTLLQFMFACIGVQLFKGKLYTCSDSSKQTEAECKGNYITYKDGEVDHPIIQPRSWENSKFDFDNVLAAMMALFTVSTFEGWPELLYRSIDSHTEDKGPIYNYRVEISIFFIIYIIIIAFFMMNIFVGFVIVTFQEQGEQEYKNCELDKNQRQCVEYALKARPLRRYIPKNQHQYKVWYVVNSTYFEYLMFVLILLNTICLAMQHYGQSCLFKIAMNILNMLFTGLFTVEMILKLIAFKPKHYFCDAWNTFDALIVVGSIVDIAITEVNPAEHTQCSPSMNAEENSRISITFFRLFRVMRLVKLLSRGEGIRTLLWTFIKSFQALPYVALLIVMLFFIYAVIGMQVFGKIALNDTTEINRNNNFQTFPQAVLLLFRCATGEAWQDIMLACMPGKKCAPESEPSNSTEGETPCGSSFAVFYFISFYMLCAFLIINLFVAVIMDNFDYLTRDWSILGPHHLDEFKRIWAEYDPEAKGRIKHLDVVTLLRRIQPPLGFGKLCPHRVACKRLVSMNMPLNSDGTVMFNATLFALVRTALRIKTEEGPSPSEAHQGAEDPFRPAGNLEQANEELRAIIKKIWKRTSMKLLDQVVPPAGDDEVTVGKFYATFLIQEYFRKFKKRKEQGLVGKPSQRNALSLQAGLRTLHDIGPEIRRAISGDLTAEEELDKAMKEAVSAASEDDIFRRAGGLFGNHVSYYQSDGRSAFPQTFTTQRPLHINKAGSSQGDTESPSHEKLVDSTFTPSSYSSTGSNANINNANNTALGRLPRPAGYPSTVSTVEGHGPPLSPAIRVQEVAWKLSSNRCHSRESQAAMAGQEETSQDETYEVKMNHDTEACSEPSLLSTEMLSYQDDENRQLTLPEEDKRDIRQSPKRGFLRSASLGRRASFHLECLKRQKDRGGDISQKTVLPLHLVHHQALAVAGLSPLLQRSHSPASFPRPFATPPATPGSRGWPPQPVPTLRLEGVESSEKLNSSFPSIHCGSWAETTPGGGGSSAARRVRPVSLMVPSQAGAPGRQFHGSASSLVEAVLISEGLGQFAQDPKFIEVTTQELADACDMTIEEMESAADNILSGGAPQSPNGALLPFVNCRDAGQDRAGGEEDAGCVRARGRPSEEELQDSRVYVSSL

SEQ ID NO: 12325 - protein, 2166 aa, Homo sapiens
MVNENTRMYIPEENHQGSNYGSPRPAHANMNANAAAGLAPEHIPTPGAALSWQAAIDAARQAKLMGSAGNATISTVSSTQRKRQQYGKPKKQGSTTATRPPRALLCLTLKNPIRRACISIVEWKPFEIIILLTIFANCVALAIYIPFPEDDSNATNSNLERVEYLFLIIFTVEAFLKVIAYGLLFHPNAYLRNGWNLLDFIIVVVGLFSAILEQATKADGANALGGKGAGFDVKALRAFRVLRPLRLVSGVPSLQVVLNSIIKAMVPLLHIALLVLFVIIIYAIIGLELFMGKMHKTCYNQEGIADVPAEDDPSPCALETGHGRQCQNGTVCKPGWDGPKHGITNFDNFAFAMLTVFQCITMEGWTDVLYWVNDAVGRDWPWIYFVTLIIIGSFFVLNLVLGVLSGEFSKEREKAKARGDFQKLREKQQLEEDLKGYLDWITQAEDIDPENEDEGMDEEKPRNMSMPTSETESVNTENVAGGDIEGENCGARLAHRISKSKFSRYWRRWNRFCRRKCRAAVKSNVFYWLVIFLVFLNTLTIASEHYNQPNWLTEVQDTANKALLALFTAEMLLKMYSLGLQAYFVSLFNRFDCFVVCGGILETILVETKIMSPLGISVLRCVRLLRIFKITRYWNSLSNLVASLLNSVRSIASLLLLLFLFIIIFSLLGMQLFGGKFNFDEMQTRRSTFDNFPQSLLTVFQILTGEDWNSVMYDGIMAYGGPSFPGMLVCIYFIILFICGNYILLNVFLAIAVDNLADAESLTSAQKEEEEEKERKKLARTASPEKKQELVEKPAVGESKEEKIELKSITADGESPPATKINMDDLQPNENEDKSPYPNPETTGEEDEEEPEMPVGPRPRPLSELHLKEKAVPMPEASAFFIFSSNNRFRLQCHRIVNDTIFTNLILFFILLSSISLAAEDPVQHTSFRNHILFYFDIVFTTIFTIEIALKMTAYGAFLHKGSFCRNYFNILDLLVVSVSLISFGIQSSAINVVKILRVLRVLRPLRAINRAKGLKHVVQCVFVAIRTIGNIVIVTTLLQFMFACIGVQLFKGKLYTCSDSSKQTEAECKGNYITYKDGEVDHPIIQPRSWENSKFDFDNVLAAMMALFTVSTFEGWPELLYRSIDSHTEDKGPIYNYRVEISIFFIIYIIIIAFFMMNIFVGFVIVTFQEQGEQEYKNCELDKNQRQCVEYALKARPLRRYIPKNQHQYKVWYVVNSTYFEYLMFVLILLNTICLAMQHYGQSCLFKIAMNILNMLFTGLFTVEMILKLIAFKPKGYFSDPWNVFDFLIVIGSIIDVILSETNHYFCDAWNTFDALIVVGSIVDIAITEVNPAEHTQCSPSMNAEENSRISITFFRLFRVMRLVKLLSRGEGIRTLLWTFIKSFQALPYVALLIVMLFFIYAVIGMQVFGKIALNDTTEINRNNNFQTFPQAVLLLFRCATGEAWQDIMLACMPGKKCAPESEPSNSTEGETPCGSSFAVFYFISFYMLCAFLIINLFVAVIMDNFDYLTRDWSILGPHHLDEFKRIWAEYDPEAKGRIKHLDVVTLLRRIQPPLGFGKLCPHRVACKRLVSMNMPLNSDGTVMFNATLFALVRTALRIKTEGNLEQANEELRAIIKKIWKRTSMKLLDQVVPPAGDDEVTVGKFYATFLIQEYFRKFKKRKEQGLVGKPSQRNALSLQAGLRTLHDIGPEIRRAISGDLTAEEELDKAMKEAVSAASEDDIFRRAGGLFGNHVSYYQSDGRSAFPQTFTTQRPLHINKAGSSQGDTESPSHEKLVDSTFTPSSYSSTGSNANINNANNTALGRLPRPAGYPSTVSTVEGHGPPLSPAIRVQEVAWKLSSNRCHSRESQAAMAGQEETSQDETYEVKMNHDTEACSEPSLLSTEMLSYQDDENRQLTLPEEDKRDIRQSPKRGFLRSASLGRRASFHLECLKRQKDRGGDISQKTVLPLHLVHHQALAVAGLSPLLQRSHSPASFPRPFATPPATPGSRGWPPQPVPTLRLEGVESSEKLNSSFPSIHCGSWAETTPGGGGSSAARRVRPVSLMVPSQAGAPGRQFHGSASSLVEAVLISEGLGQFAQDPKFIEVTTQELADACDMTIEEMESAADNILSGGAPQSPNGALLPFVNCRDAGQDRAGGEEDAGCVRARGRPSEEELQDSRVYVSSL

SEQ ID NO: 12326 - protein, 2138 aa, Homo sapiens
MVNENTRMYIPEENHQGSNYGSPRPAHANMNANAAAGLAPEHIPTPGAALSWQAAIDAARQAKLMGSAGNATISTVSSTQRKRQQYGKPKKQGSTTATRPPRALLCLTLKNPIRRACISIVEWKPFEIIILLTIFANCVALAIYIPFPEDDSNATNSNLERVEYLFLIIFTVEAFLKVIAYGLLFHPNAYLRNGWNLLDFIIVVVGLFSAILEQATKADGANALGGKGAGFDVKALRAFRVLRPLRLVSGVPSLQVVLNSIIKAMVPLLHIALLVLFVIIIYAIIGLELFMGKMHKTCYNQEGIADVPAEDDPSPCALETGHGRQCQNGTVCKPGWDGPKHGITNFDNFAFAMLTVFQCITMEGWTDVLYWMQDAMGYELPWVYFVSLVIFGSFFVLNLVLGVLSGEFSKEREKAKARGDFQKLREKQQLEEDLKGYLDWITQAEDIDPENEDEGMDEEKPRNMSMPTSETESVNTENVAGGDIEGENCGARLAHRISKSKFSRYWRRWNRFCRRKCRAAVKSNVFYWLVIFLVFLNTLTIASEHYNQPNWLTEVQDTANKALLALFTAEMLLKMYSLGLQAYFVSLFNRFDCFVVCGGILETILVETKIMSPLGISVLRCVRLLRIFKITRYWNSLSNLVASLLNSVRSIASLLLLLFLFIIIFSLLGMQLFGGKFNFDEMQTRRSTFDNFPQSLLTVFQILTGEDWNSVMYDGIMAYGGPSFPGMLVCIYFIILFICGNYILLNVFLAIAVDNLADAESLTSAQKEEEEEKERKKLARTASPEKKQELVEKPAVGESKEEKIELKSITADGESPPATKINMDDLQPNENEDKSPYPNPETTGEEDEEEPEMPVGPRPRPLSELHLKEKAVPMPEASAFFIFSSNNRFRLQCHRIVNDTIFTNLILFFILLSSISLAAEDPVQHTSFRNHILGNADYVFTSIFTLEIILKMTAYGAFLHKGSFCRNYFNILDLLVVSVSLISFGIQSSAINVVKILRVLRVLRPLRAINRAKGLKHVVQCVFVAIRTIGNIVIVTTLLQFMFACIGVQLFKGKLYTCSDSSKQTEAECKGNYITYKDGEVDHPIIQPRSWENSKFDFDNVLAAMMALFTVSTFEGWPELLYRSIDSHTEDKGPIYNYRVEISIFFIIYIIIIAFFMMNIFVGFVIVTFQEQGEQEYKNCELDKNQRQCVEYALKARPLRRYIPKNQHQYKVWYVVNSTYFEYLMFVLILLNTICLAMQHYGQSCLFKIAMNILNMLFTGLFTVEMILKLIAFKPKHYFCDAWNTFDALIVVGSIVDIAITEVNPAEHTQCSPSMNAEENSRISITFFRLFRVMRLVKLLSRGEGIRTLLWTFIKSFQALPYVALLIVMLFFIYAVIGMQVFGKIALNDTTEINRNNNFQTFPQAVLLLFRCATGEAWQDIMLACMPGKKCAPESEPSNSTEGETPCGSSFAVFYFISFYMLCAFLIINLFVAVIMDNFDYLTRDWSILGPHHLDEFKRIWAEYDPEAKGRIKHLDVVTLLRRIQPPLGFGKLCPHRVACKRLVSMNMPLNSDGTVMFNATLFALVRTALRIKTEGNLEQANEELRAIIKKIWKRTSMKLLDQVVPPAGDDEVTVGKFYATFLIQEYFRKFKKRKEQGLVGKPSQRNALSLQAGLRTLHDIGPEIRRAISGDLTAEEELDKAMKEAVSAASEDDIFRRAGGLFGNHVSYYQSDGRSAFPQTFTTQRPLHINKAGSSQGDTESPSHEKLVDSTFTPSSYSSTGSNANINNANNTALGRLPRPAGYPSTVSTVEGHGPPLSPAIRVQEVAWKLSSNRCHSRESQAAMAGQEETSQDETYEVKMNHDTEACSEPSLLSTEMLSYQDDENRQLTLPEEDKRDIRQSPKRGFLRSASLGRRASFHLECLKRQKDRGGDISQKTVLPLHLVHHQALAVAGLSPLLQRSHSPASFPRPFATPPATPGSRGWPPQPVPTLRLEGVESSEKLNSSFPSIHCGSWAETTPGGGGSSAARRVRPVSLMVPSQAGAPGRQFHGSASSLVEAVLISEGLGQFAQDPKFIEVTTQELADACDMTIEEMESAADNILSGGAPQSPNGALLPFVNCRDAGQDRAGGEEDAGCVRARGRPSEEELQDSRVYVSSL

SEQ ID NO: 12327 - protein, 2138 aa, Homo sapiens
MVNENTRMYIPEENHQGSNYGSPRPAHANMNANAAAGLAPEHIPTPGAALSWQAAIDAARQAKLMGSAGNATISTVSSTQRKRQQYGKPKKQGSTTATRPPRALLCLTLKNPIRRACISIVEWKPFEIIILLTIFANCVALAIYIPFPEDDSNATNSNLERVEYLFLIIFTVEAFLKVIAYGLLFHPNAYLRNGWNLLDFIIVVVGLFSAILEQATKADGANALGGKGAGFDVKALRAFRVLRPLRLVSGVPSLQVVLNSIIKAMVPLLHIALLVLFVIIIYAIIGLELFMGKMHKTCYNQEGIADVPAEDDPSPCALETGHGRQCQNGTVCKPGWDGPKHGITNFDNFAFAMLTVFQCITMEGWTDVLYWVNDAVGRDWPWIYFVTLIIIGSFFVLNLVLGVLSGEFSKEREKAKARGDFQKLREKQQLEEDLKGYLDWITQAEDIDPENEDEGMDEEKPRNMSMPTSETESVNTENVAGGDIEGENCGARLAHRISKSKFSRYWRRWNRFCRRKCRAAVKSNVFYWLVIFLVFLNTLTIASEHYNQPNWLTEVQDTANKALLALFTAEMLLKMYSLGLQAYFVSLFNRFDCFVVCGGILETILVETKIMSPLGISVLRCVRLLRIFKITRYWNSLSNLVASLLNSVRSIASLLLLLFLFIIIFSLLGMQLFGGKFNFDEMQTRRSTFDNFPQSLLTVFQILTGEDWNSVMYDGIMAYGGPSFPGMLVCIYFIILFICGNYILLNVFLAIAVDNLADAESLTSAQKEEEEEKERKKLARTASPEKKQELVEKPAVGESKEEKIELKSITADGESPPATKINMDDLQPNENEDKSPYPNPETTGEEDEEEPEMPVGPRPRPLSELHLKEKAVPMPEASAFFIFSSNNRFRLQCHRIVNDTIFTNLILFFILLSSISLAAEDPVQHTSFRNHILGNADYVFTSIFTLEIILKMTAYGAFLHKGSFCRNYFNILDLLVVSVSLISFGIQSSAINVVKILRVLRVLRPLRAINRAKGLKHVVQCVFVAIRTIGNIVIVTTLLQFMFACIGVQLFKGKLYTCSDSSKQTEAECKGNYITYKDGEVDHPIIQPRSWENSKFDFDNVLAAMMALFTVSTFEGWPELLYRSIDSHTEDKGPIYNYRVEISIFFIIYIIIIAFFMMNIFVGFVIVTFQEQGEQEYKNCELDKNQRQCVEYALKARPLRRYIPKNQHQYKVWYVVNSTYFEYLMFVLILLNTICLAMQHYGQSCLFKIAMNILNMLFTGLFTVEMILKLIAFKPKGYFSDPWNVFDFLIVIGSIIDVILSETNPAEHTQCSPSMNAEENSRISITFFRLFRVMRLVKLLSRGEGIRTLLWTFIKSFQALPYVALLIVMLFFIYAVIGMQVFGKIALNDTTEINRNNNFQTFPQAVLLLFRCATGEAWQDIMLACMPGKKCAPESEPSNSTEGETPCGSSFAVFYFISFYMLCAFLIINLFVAVIMDNFDYLTRDWSILGPHHLDEFKRIWAEYDPEAKGRIKHLDVVTLLRRIQPPLGFGKLCPHRVACKRLVSMNMPLNSDGTVMFNATLFALVRTALRIKTEGNLEQANEELRAIIKKIWKRTSMKLLDQVVPPAGDDEVTVGKFYATFLIQEYFRKFKKRKEQGLVGKPSQRNALSLQAGLRTLHDIGPEIRRAISGDLTAEEELDKAMKEAVSAASEDDIFRRAGGLFGNHVSYYQSDGRSAFPQTFTTQRPLHINKAGSSQGDTESPSHEKLVDSTFTPSSYSSTGSNANINNANNTALGRLPRPAGYPSTVSTVEGHGPPLSPAIRVQEVAWKLSSNRCHSRESQAAMAGQEETSQDETYEVKMNHDTEACSEPSLLSTEMLSYQDDENRQLTLPEEDKRDIRQSPKRGFLRSASLGRRASFHLECLKRQKDRGGDISQKTVLPLHLVHHQALAVAGLSPLLQRSHSPASFPRPFATPPATPGSRGWPPQPVPTLRLEGVESSEKLNSSFPSIHCGSWAETTPGGGGSSAARRVRPVSLMVPSQAGAPGRQFHGSASSLVEAVLISEGLGQFAQDPKFIEVTTQELADACDMTIEEMESAADNILSGGAPQSPNGALLPFVNCRDAGQDRAGGEEDAGCVRARGRPSEEELQDSRVYVSSL

SEQ ID NO: 12328 - protein, 2144 aa, Homo sapiens
MVNENTRMYIPEENHQGSNYGSPRPAHANMNANAAAGLAPEHIPTPGAALSWQAAIDAARQAKLMGSAGNATISTVSSTQRKRQQYGKPKKQGSTTATRPPRALLCLTLKNPIRRACISIVEWKPFEIIILLTIFANCVALAIYIPFPEDDSNATNSNLERVEYLFLIIFTVEAFLKVIAYGLLFHPNAYLRNGWNLLDFIIVVVGLFSAILEQATKADGANALGGKGAGFDVKALRAFRVLRPLRLVSGVPSLQVVLNSIIKAMVPLLHIALLVLFVIIIYAIIGLELFMGKMHKTCYNQEGIADVPAEDDPSPCALETGHGRQCQNGTVCKPGWDGPKHGITNFDNFAFAMLTVFQCITMEGWTDVLYWVNDAVGRDWPWIYFVTLIIIGSFFVLNLVLGVLSGEFSKEREKAKARGDFQKLREKQQLEEDLKGYLDWITQAEDIDPENEDEGMDEEKPRNMSMPTSETESVNTENVAGGDIEGENCGARLAHRISKSKFSRYWRRWNRFCRRKCRAAVKSNVFYWLVIFLVFLNTLTIASEHYNQPNWLTEVQDTANKALLALFTAEMLLKMYSLGLQAYFVSLFNRFDCFVVCGGILETILVETKIMSPLGISVLRCVRLLRIFKITRYWNSLSNLVASLLNSVRSIASLLLLLFLFIIIFSLLGMQLFGGKFNFDEMQTRRSTFDNFPQSLLTVFQILTGEDWNSVMYDGIMAYGGPSFPGMLVCIYFIILFICGNYILLNVFLAIAVDNLADAESLTSAQKEEEEEKERKKLARTASPEKKQELVEKPAVGESKEEKIELKSITADGESPPATKINMDDLQPNENEDKSPYPNPETTGEEDEEEPEMPVGPRPRPLSELHLKEKAVPMPEASAFFIFSSNNRFRLQCHRIVNDTIFTNLILFFILLSSISLAAEDPVQHTSFRNHILFYFDIVFTTIFTIEIALKMTAYGAFLHKGSFCRNYFNILDLLVVSVSLISFGIQSSAINVVKILRVLRVLRPLRAINRAKGLKHVVQCVFVAIRTIGNIVIVTTLLQFMFACIGVQLFKGKLYTCSDSSKQTEAECKGNYITYKDGEVDHPIIQPRSWENSKFDFDNVLAAMMALFTVSTFEGWPELLYRSIDSHTEDKGPIYNYRVEISIFFIIYIIIIAFFMMNIFVGFVIVTFQEQGEQEYKNCELDKNQRQCVEYALKARPLRRYIPKNQHQYKVWYVVNSTYFEYLMFVLILLNTICLAMQHYGQSCLFKIAMNILNMLFTGLFTVEMILKLIAFKPKHYFCDAWNTFDALIVVGSIVDIAITENAEENSRISITFFRLFRVMRLVKLLSRGEGIRTLLWTFIKSFQALPYVALLIVMLFFIYAVIGMQVFGKIALNDTTEINRNNNFQTFPQAVLLLFRCATGEAWQDIMLACMPGKKCAPESEPSNSTEGETPCGSSFAVFYFISFYMLCAFLIINLFVAVIMDNFDYLTRDWSILGPHHLDEFKRIWAEYDPEAKGRIKHLDVVTLLRRIQPPLGFGKLCPHRVACKRLVSMNMPLNSDGTVMFNATLFALVRTALRIKTEEGPSPSEAHQGAEDPFRPAGNLEQANEELRAIIKKIWKRTSMKLLDQVVPPAGDDEVTVGKFYATFLIQEYFRKFKKRKEQGLVGKPSQRNALSLQAGLRTLHDIGPEIRRAISGDLTAEEELDKAMKEAVSAASEDDIFRRAGGLFGNHVSYYQSDGRSAFPQTFTTQRPLHINKAGSSQGDTESPSHEKLVDSTFTPSSYSSTGSNANINNANNTALGRLPRPAGYPSTVSTVEGHGPPLSPAIRVQEVAWKLSSNRCHSRESQAAMAGQEETSQDETYEVKMNHDTEACSEPSLLSTEMLSYQDDENRQLTLPEEDKRDIRQSPKRGFLRSASLGRRASFHLECLKRQKDRGGDISQKTVLPLHLVHHQALAVAGLSPLLQRSHSPASFPRPFATPPATPGSRGWPPQPVPTLRLEGVESSEKLNSSFPSIHCGSWAETTPGGGGSSAARRVRPVSLMVPSQAGAPGRQFHGSASSLVEAVLISEGLGQFAQDPKFIEVTTQELADACDMTIEEMESAADNILSGGAPQSPNGALLPFVNCRDAGQDRAGGEEDAGCVRARGRPSEEELQDSRVYVSSL

SEQ ID NO: 12329 - protein, 2138 aa, Homo sapiens
MVNENTRMYIPEENHQGSNYGSPRPAHANMNANAAAGLAPEHIPTPGAALSWQAAIDAARQAKLMGSAGNATISTVSSTQRKRQQYGKPKKQGSTTATRPPRALLCLTLKNPIRRACISIVEWKPFEIIILLTIFANCVALAIYIPFPEDDSNATNSNLERVEYLFLIIFTVEAFLKVIAYGLLFHPNAYLRNGWNLLDFIIVVVGLFSAILEQATKADGANALGGKGAGFDVKALRAFRVLRPLRLVSGVPSLQVVLNSIIKAMVPLLHIALLVLFVIIIYAIIGLELFMGKMHKTCYNQEGIADVPAEDDPSPCALETGHGRQCQNGTVCKPGWDGPKHGITNFDNFAFAMLTVFQCITMEGWTDVLYWVNDAVGRDWPWIYFVTLIIIGSFFVLNLVLGVLSGEFSKEREKAKARGDFQKLREKQQLEEDLKGYLDWITQAEDIDPENEDEGMDEEKPRNMSMPTSETESVNTENVAGGDIEGENCGARLAHRISKSKFSRYWRRWNRFCRRKCRAAVKSNVFYWLVIFLVFLNTLTIASEHYNQPNWLTEVQDTANKALLALFTAEMLLKMYSLGLQAYFVSLFNRFDCFVVCGGILETILVETKIMSPLGISVLRCVRLLRIFKITRYWNSLSNLVASLLNSVRSIASLLLLLFLFIIIFSLLGMQLFGGKFNFDEMQTRRSTFDNFPQSLLTVFQILTGEDWNSVMYDGIMAYGGPSFPGMLVCIYFIILFICGNYILLNVFLAIAVDNLADAESLTSAQKEEEEEKERKKLARTASPEKKQELVEKPAVGESKEEKIELKSITADGESPPATKINMDDLQPNENEDKSPYPNPETTGEEDEEEPEMPVGPRPRPLSELHLKEKAVPMPEASAFFIFSSNNRFRLQCHRIVNDTIFTNLILFFILLSSISLAAEDPVQHTSFRNHILFYFDIVFTTIFTIEIALKMTAYGAFLHKGSFCRNYFNILDLLVVSVSLISFGIQSSAINVVKILRVLRVLRPLRAINRAKGLKHVVQCVFVAIRTIGNIVIVTTLLQFMFACIGVQLFKGKLYTCSDSSKQTEAECKGNYITYKDGEVDHPIIQPRSWENSKFDFDNVLAAMMALFTVSTFEGWPELLYRSIDSHTEDKGPIYNYRVEISIFFIIYIIIIAFFMMNIFVGFVIVTFQEQGEQEYKNCELDKNQRQCVEYALKARPLRRYIPKNQHQYKVWYVVNSTYFEYLMFVLILLNTICLAMQHYGQSCLFKIAMNILNMLFTGLFTVEMILKLIAFKPKHYFCDAWNTFDALIVVGSIVDIAITEVNPAEHTQCSPSMNAEENSRISITFFRLFRVMRLVKLLSRGEGIRTLLWTFIKSFQALPYVALLIVMLFFIYAVIGMQVFGKIALNDTTEINRNNNFQTFPQAVLLLFRCATGEAWQDIMLACMPGKKCAPESEPSNSTEGETPCGSSFAVFYFISFYMLCAFLIINLFVAVIMDNFDYLTRDWSILGPHHLDEFKRIWAEYDPEAKGRIKHLDVVTLLRRIQPPLGFGKLCPHRVACKRLVSMNMPLNSDGTVMFNATLFALVRTALRIKTEGNLEQANEELRAIIKKIWKRTSMKLLDQVVPPAGDDEVTVGKFYATFLIQEYFRKFKKRKEQGLVGKPSQRNALSLQAGLRTLHDIGPEIRRAISGDLTAEEELDKAMKEAVSAASEDDIFRRAGGLFGNHVSYYQSDGRSAFPQTFTTQRPLHINKAGSSQGDTESPSHEKLVDSTFTPSSYSSTGSNANINNANNTALGRLPRPAGYPSTVSTVEGHGPPLSPAIRVQEVAWKLSSNRCHSRESQAAMAGQEETSQDETYEVKMNHDTEACSEPSLLSTEMLSYQDDENRQLTLPEEDKRDIRQSPKRGFLRSASLGRRASFHLECLKRQKDRGGDISQKTVLPLHLVHHQALAVAGLSPLLQRSHSPASFPRPFATPPATPGSRGWPPQPVPTLRLEGVESSEKLNSSFPSIHCGSWAETTPGGGGSSAARRVRPVSLMVPSQAGAPGRQFHGSASSLVEAVLISEGLGQFAQDPKFIEVTTQELADACDMTIEEMESAADNILSGGAPQSPNGALLPFVNCRDAGQDRAGGEEDAGCVRARGRPSEEELQDSRVYVSSL

SEQ ID NO: 12330 - protein, 2316 aa, Homo sapiens
MDGVSSEANEENDNIERPVRRRHSSILKPPRSPLQDLRGGNERVQESNALRNKKNSRRVSFADTIKVFQTESHMKIVRKSEMEETETGENLLLIQNKKLEDNYCEITGMNTLLSAPIHTQMQQKEFSIIEHTRERKHANDQTVIFSDENQMDLTSSHTVMITKGLLDNPISEKSTKIDTTSFLANLKLHTEDSRMKKEVNFSVDQNTSSENKIDFNDFIKRLKTGKCSAFPDVPDKENFEIPIYSKEPNSASSTHQMHVSLKEDENNSNITRLFREKDDGMNFTQCHTANIQTLIPTSSETNSRESKGNDITIYGNDFMDLTFNHTLQILPATGNFSEIENQTQNAMDVTTGYGTKASGNKTVFKSKQNTAFQDLSINSADKIHITRSHIMGAETHIVSQTCNQDARILAMTPESIYSNPSIQGCKTVFYSSCNDAMEMTKCLSNMREEKNLLKHDSNYAKMYCNPDAMSSLTEKTIYSGEENMDITKSHTVAIDNQIFKQDQSNVQIAAAPTPEKEMMLQNLMTTSEDGKMNVNCNSVPHVSKERIQQSLSNPLSISLTDRKTELLSGENMDLTESHTSNLGSQVPLAAYNLAPESTSESHSQSKSSSDECEEITKSRNEPFQRSDIIAKNSLTDTWNKDKDWVLKILPYLDKDSPQSADCNQEIATSHNIVYCGGVLDKQITNRNTVSWEQSLFSTTKPLFSSGQFSMKNHDTAISSHTVKSVLGQNSKLAEPLRKSLSNPTPDYCHDKMIICSEEEQNMDLTKSHTVVIGFGPSELQELGKTNLEHTTGQLTTMNRQIAVKVEKCGKSPIEKSGVLKSNCIMDVLEDESVQKPKFPKEKQNVKIWGRKSVGGPKIDKTIVFSEDDKNDMDITKSYTIEINHRPLLEKRDCHLVPLAGTSETILYTCRQDDMEITRSHTTALECKTVSPDEITTRPMDKTVVFVDNHVELEMTESHTVFIDYQEKERTDRPNFELSQRKSLGTPTVICTPTEESVFFPGNGESDRLVANDSQLTPLEEWSNNRGPVEVADNMELSKSATCKNIKDVQSPGFLNEPLSSKSQRRKSLKLKNDKTIVFSENHKNDMDITQSCMVEIDNESALEDKEDFHLAGASKTILYSCGQDDMEITRSHTTALECKTLLPNEIAIRPMDKTVLFTDNYSDLEVTDSHTVFIDCQATEKILEENPKFGIGKGKNLGVSFPKDNSCVQEIAEKQALAVGNKIVLHTEQKQQLFAATNRTTNEIIKFHSAAMDEKVIGKVVDQACTLEKAQVESCQLNNRDRRNVDFTSSHATAVCGSSDNYSCLPNVISCTDNLEGSAMLLCDKDEEKANYCPVQNDLAYANDFASEYYLESEGQPLSAPCPLLEKEEVIQTSTKGQLDCVITLHKDQDLIKDPRNLLANQTLVYSQDLGEMTKLNSKRVSFKLPKDQMKVYVDDIYVIPQPHFSTDQPPLPKKGQSSINKEEVILSKAGNKSLNIIENSSAPICENKPKILNSEEWFAAACKKELKENIQTTNYNTALDFHSNSDVTKQVIQTHVNAGEAPDPVITSNVPCFHSIKPNLNNLNGKTGEFLAFQTVHLPPLPEQLLELGNKAHNDMHIVQATEIHNINIISSNAKDSRDEENKKSHNGAETTSLPPKTVFKDKVRRCSLGIFLPRLPNKRNCSVTGIDDLEQIPADTTDINHLETQPVSSKDSGIGSVAGKLNLSPSQYINEENLPVYPDEINSSDSINIETEEKALIETYQKEISPYENKMGKTCNSQKRTWVQEEEDIHKEKKIRKNEIKFSDTTQDREIFDHHTEEDIDKSANSVLIKNLSRTPSSCSSSLDSIKADGTSLDFSTYRSSQMESQFLRDTICEESLREKLQDGRITIREFFILLQVHILIQKPRQSNLPGNFTVNTPPTPEDLMLSQYVYRPKIQIYREDCEARRQKIEELKLSASNQDKLLVDINKNLWEKMRHCSDKELKAFGIYLNKIKSCFTKMTKVFTHQGKVALYGKLVQSAQNEREKLQIKIDEMDKILKKIDNCLTEMETETKNLEDEEKNNPVEEWDSEMRAAEKELEQLKTEEEELQRNLLELEVQKEQTLAQIDFMQKQRNRTEELLDQLSLSEWDVVEWSDDQAVFTFVYDTIQLTITFEESVVGFPFLDKRYRKIVDVNFQSLLDEDQAPPSSLLVHKLIFQYVEEKESWKKTCTTQHQLPKMLEEFSLVVHHCRLLGEEIEYLKRWGPNYNLMNIDINNNELRLLFSSSAAFAKFEITLFLSAYYPSVPLPSTIQNHVGNTSQDDIATILSKVPLENNYLKNVVKQIYQDLFQDCHFYH

SEQ ID NO: 12331 - protein, 910 aa, Homo sapiens
VEMCVDARTFGNDARFIRRSCTPNAEVRHMIADGMIHLCIYAVSAITKDAEVTIAFDYEYSNCNYKVDCACHKGNRNCPIQKRNPNATELPLLPPPPSLPTIGAETRRRKARRKELEMEQQNEASEENNDQQSQEVPEKVTVSSDHEEVDNPEEKPEEEKEEVIDDQENLAHSRRTREDRKVEAIMHAFENLEKRKKRRDQPLEQSNSDVEITTTTSETPVGEETKTEAPESEVSNSVSNVTIPSTPQSVGVNTRRSSQAGDIAAEKLVPKPPPAKPSRPRPKSRISRYRTSSAQRLKRQKQANAQQAELSQAALEEGGSNSLVTPTEAGSLDSSGENRPLTGSDPTVVSITGSHVNRAASKYPKTKKYLVTEWLNDKAEKQECPVECPLRITTDPTVLATTLNMLPGLIHSPLICTTPKHYIRFGSPFIPERRRRPLLPDGTFSSCKKRWIKQALEEGMTQTSSVPQETRTQHLYQSNENSSSSSICKDNADLLSPLKKWKSRYLMEQNVTKLLRPLSPVTPPPPNSGSKSPQLATPGSSHPGEEECRNGYSLMFSPVTSLTTASRCNTPLQFELCHRKDLDLAKVGYLDSNTNSCADRPSLLNSGHSDLAPHPSLGPTSETGFPSRSGDGHQTLVRNSDQAFRTEFNLMYAYSPLNAMPRADGLYRGSPLVGDRKPLHLDGGYCSPAEGFSSRYEHGLMKDLSRGSLSPGGERACEGVPSAPQNPPQRKKVSLLEYRKRKQEAKENSAGGGGDSAQSKSKSAGAGQGSSNSVSDTGAHGVQGSSARTPSSPHKKFSPSHSSMSHLEAVSPSDSRGTSSSHCRPQENISSRWMVPTSVERLREGGSIPKVLRSSVRVAQKGEPSPTWESNITEKDSDPADGEGPETLSSALSKGATVYSPSRYSYQICD

SEQ ID NO: 12332 - protein, 992 aa, Homo sapiens
MRKLFSFGRRLGQALLSSMDQEYAGPGYDIRDWELRKIHRAAIKGDAAEVERCLTRRFRDLDARDRKDRTVLHLACAHGRVQVVTLLLHRRCQIDICDRLNRTPLMKAVHSQEEACAIVLLECGANPNIEDIYGNTALHYAVYNKGTSLAERLLSHHANIEALNKEGNTPLLFAINSRRQHMVEFLLKNQANIHAVDNFKRTALILAVQHNLSSIVTLLLQQNIRISSQDMFGQTAEDYALCSDLRSIRQQILEHKNKMLKNHLRNDNQETAAMKPANLKKRKERAKAEHNLKVASEEKQERLQRSENKQPQDSQSYGKKKDAMYGNFMLKKDIAMLKEELYAIKNDSLRKEKKYIQEIKSITEINANFEKSVRLNEKMITKTVARYSQQLNDLKAENARLNSELEKEKHNKERLEAEVESLHSSLATAINEYNEIVERKDLELVLWRADDVSRHEKMGSNISQLTDKNELLTEQVHKARVKFNTLKGKLRETRDALREKTLALGSVQLDLRQAQHRIKEMKQMHPNGEAKESQSIGKQNSLEERIRQQELENLLLERQLEDARKEGDNKEIVINIHRDCLENGKEDLLEERNKELMKEYNYLKEKLLQCEKEKAEREVIVREFQEELVDHLKTFSISESPLEGTSHCHINLNETWTSKKKLFQVEIQPEEKHEEFRKLFELISLLNYTADQIRKKNRELEEEATGYKKCLEMTINMLNAFANEDFSCHGDLNTDQLKMDILFKKLKQKFNDLVAEKEAVSSECVNLAKDNEVLHQELLSMRNVQEKCEKLEKDKKMLEEEVLNLKTHMEKDMVELGKLQEYKSELDERAVQEIEKLEEIHLQKQAEYEKQLEQLNKDNTASLKKKELTLKDVECKFSKMKTAYEEVTTELEEFKEAFAGAVKANNSMSKKLMKSDKKIAVISTKLFTEKQRMKYFLSTLPTRPEPELPCVENLNSIELNRKYIPKTAIRIPTSNPQTSNNCKNFLTEVLLC

SEQ ID NO: 12333 - protein, 580 aa, Homo sapiens
MNISGSSCGSPNSADTSSDFKDLWTKLKECHDREVQGLQVKVTKLKQERILDAQRLEEFFTKNQQLREQQKVLHETIKVLEDRLRAGLCDRCAVTEEHMRKKQQEFENIRQQNLKLITELMNERNTLQEENKKLSEQLQQKIENDQQHQAAELECEEDVIPDSPITAFSFSGVNRLRRKENPHVRYIEQTHTKLEHSVCANEMRKVSKSSTHPQHNPNENEILVADTYDQSQSPMAKAHGTSSYTPDKSSFNLATVVAETLGLGVQEESETQGPMSPLGDELYHCLEGNHKKQPFEESTRNTEDSLRFSDSTSKTPPQEELPTRVSSPVFGATSSIKSGLDLNTSLSPSLLQPGKKKHLKTLPFSNTCISRLEKTRSKSEDSALFTHHSLGSEVNKIIIQSSNKQILINKNISESLGEQNRTEYGKDSNTDKHLEPLKSLGGRTSKRKKTEEESEHEVSCPQASFDKENAFPFPMDNQFSMNGDCVMDKPLDLSDRFSAIQRQEKSQGSETSKNKFRQVTLYEALKTIPKGFSSSRKASDGNCTLPKDSPGEPCSQECIILQPLNKCSPDNKPSLQIKEE

SEQ ID NO: 12334 - protein, 867 aa, Homo sapiens
MNISGSSCGSPNSADTSSDFKDLWTKLKECHDREVQGLQVKVTKLKQERILDAQRLEEFFTKNQQLREQQKVLHETIKVLEDRLRAGLCDRCAVTEEHMRKKQQEFENIRQQNLKLITELMNERNTLQEENKKLSEQLQQKIENDQQHQAAELECEEDVIPDSPITAFSFSGVNRLRRKENPHVRYIEQTHTKLEHSVCANEMRKVSKSSTHPQHNPNENEILVADTYDQSQSPMAKAHGTSSYTPDKSSFNLATVVAETLGLGVQEESETQGPMSPLGDELYHCLEGNHKKQPFEESTRNTEDSLRFSDSTSKTPPQEELPTRVSSPVFGATSSIKSGLDLNTSLSPSLLQPGKKKHLKTLPFSNTCISRLEKTRSKSEDSALFTHHSLGSEVNKIIIQSSNKQILINKNISESLGEQNRTEYGKDSNTDKHLEPLKSLGGRTSKRKKTEEESEHEVSCPQASFDKENAFPFPMDNQFSMNGDCVMDKPLDLSDRFSAIQRQEKSQGSETSKNKFRQVTLYEALKTIPKGFSSSRKASDGNCTLPKDSPGEPCSQECIILQPLNKCSPDNKPSLQIKEENAVFKIPLRPRESLETENVLDDIKSAGSHEPIKIQTRSDHGGCELASVLQLNPCRTGKIKSLQNNQDVSFENIQWSIDPGADLSQYKMDVTVIDTKDGSQSKLGGETVDMDCTLVSETVLLKMKKQEQKGEKSSNEERKMNDSLEDMFDRTTHEEYESCLADSFSQAADEEEELSTATKKLHTHGDKQDKVKQKAFVEPYFKGDESIMQICQQKKEKRNWLPAQDTDSATFHPTHQRIFGKLVFLPLRLVWKEVILRKILILVLVQKDVSLTTQYFLQKARSRRHRR

SEQ ID NO: 12335 - protein, 309 aa, Homo sapiens
MDRRNDYGYRVPLFQSKHLNGDERSGSNYRRIPWGRRPAPPRDVAILQERANKLVKYLLVKDQTKIPIKRSDMLRDVIQEYDEYFPEIIERASYTLEKMFRVNLKEIDKQSSLYILISTQESSAGILGTTKDTPKLGLLMVILSVIFMNGNKASEAVIWEVLRKLGLRPGVRHSLFGEVRKLITDEFVKQKYLEYKRVPNSRPPEYEFFWGLRSYHETSKMKVLKFACRVQKKDPKDWAVQYREAVEMEVQAAAVAVAEAEARAEIYSPCLQIPLINCSSPSHGAKVHPWNLCPHSSQGSYGQSAEGVM

SEQ ID NO: 12336 - protein, 437 aa, Homo sapiens
MKRRNADCSKLRRPLKRNRITEGIYGSTFLYLKFLVVWALVLLADFVLEFRFEYLWPFWLFIRSVYDSFRYQGLAFSVFFVCVAFTSNIICLLFIPIQWLFFAASTYVWVQYVWHTERGVCLPTVSLWILFVYIEAAIRFKDLKNFHVDLCRPFAAHWLEQDIKKLKADLQASRQVEQELRSQISSLSSTERGIRSEMGQLRQENELLQNKLHNAVQMKQKDKQNISQLEKKLKAEQEARSFVEKQLMEEKKRKKLEEATAARAVAFAAASRGECTETLRNRIRELEAEGKKLTMDMKVKEDQIRELELKVQELRKYKENEKDTEVLMSALSAMQDKTQHLENSLSAETRIKLDLFSALGDAKRQLEIAQGQILQKDQEIKDLKQKIAEVMAVMPSITYSAATSPLSPVSPHYSSKFVETSPSGLDPNASVYQPLKK

SEQ ID NO: 12337 - protein, 290 aa, Homo sapiens
MLKREMKPESDRPRKVRFRIASSHSGRVLKEVYEDGQPSGSLDSECASICGIDGLGDSDGQQNGHIESEGDENENDQDSLLVLARAASEKGFGTRRVNILSKNGTVRGVKYKVSAGQALFNNLTKVLQQPSTDLEFDRVVIYTTCLRVVRTTFERCELVRKIFQNHRVKFEEKNIALNGEYGKELDERCRRVSEAPSLPVVFIDGHYLGGAEKILSMNESGELQDILTKIERVQHPHECPSCGGFGFLPCSVCHGSKMSMFRNCFTDSFKALKCTACNENGLQRCKNCAG

SEQ ID NO: 12338 - protein, 195 aa, Homo sapiens
MDCEVNNGSSLRDECITNLLVFGFLQSCSDNSFRRELDALGHELPVLAPQWEGYDELQTDGNRSSHSRLGRIEADSESQEDIIRNIARHLAQVGDSMDRSIPPGLVNGLALQLRNTSRSEEDRNRDLATALEQLLQAYPRDMEKEKTMLVLALLLAKKVASHTPSLLRDVFHTTVNFINQNLRTYVRSLARNGMD

SEQ ID NO: 12339 - protein, 201 aa, Homo sapiens
MASSSTVPLGFHYETKYVVLSYLGLLSQEKLQEQHLSSPQGVQLDIASQSLDQEILLKVKTEIEEELKSLDKEISEAFTSTGFDRHTSPVFSPANPESSMEDCLAHLGEKVSQELKEPLHKALQMLLSQPVTYQAFRECTLETTVHASGWNKILVPLVLLRQMLLELTRRGQEPLSALLQFGVTYLEDYSAEYIIQQGGWV

SEQ ID NO: 12340 - protein, 1690 aa, Homo sapiens
MAGVGPGGYAAEFVPPPECPVFEPSWEEFTDPLSFIGRIRPLAEKTGICKIRPPKDWQPPFACEVKSFRFTPRVQRLNELEAMTRVRLDFLDQLAKFWELQGSTLKIPVVERKILDLYALSKIVASKGGFEMVTKEKKWSKVGSRLGYLPGKGTGSLLKSHYERILYPYELFQSGVSLMGVQMPNLDLKEKVEPEVLSTDTQTSPEPGTRMNILPKRTRRVKTQSESGDVSRNTELKKLQIFGAGPKVVGLAMGTKDKEDEVTRRRKVTNRSDAFNMQMRQRKGTLSVNFVDLYVCMFCGRGNNEDKLLLCDGCDDSYHTFCLIPPLPDVPKGDWRCPKCVAEECSKPREAFGFEQAVREYTLQSFGEMADNFKSDYFNMPVHMVPTELVEKEFWRLVSSIEEDVIVEYGADISSKDFGSGFPVKDGRRKILPEEEEYALSGWNLNNMPVLEQSVLAHINVDISGMKVPWLYVGMCFSSFCWHIEDHWSYSINYLHWGEPKTWYGVPSHAAEQLEEVMRELAPELFESQPDLLHQLVTIMNPNVLMEHGVPVYRTNQCAGEFVVTFPRAYHSGFNQGYNFAEAVNFCTADWLPIGRQCVNHYRRLRRHCVFSHEELIFKMAADPECLDVGLAAMVCKELTLMTEEETRLRESVVQMGVLMSEEEVFELVPDDERQCSACRTTCFLSALTCSCNPERLVCLYHPTDLCPCPMQKKCLRYRYPLEDLPSLLYGVKVRAQSYDTWVSRVTEALSANFNHKKDLIELRVMLEDAEDRKYPENDLFRKLRDAVKEAETCASVAQLLLSKKQKHRQSPDSGRTRTKLTVEELKAFVQQLFSLPCVISQARQVKNLLDDVEEFHERAQEAMMDETPDSSKLQMLIDMGSSLYVELPELPRLKQELQQARWLDEVRLTLSDPQQVTLDVMKKLIDSGVGLAPHHAVEKAMAELQELLTVSERWEEKAKVCLQARPRHSVASLESIVNEAKNIPAFLPNVLSLKEALQKAREWTAKVEAIQSGSNYAYLEQLESLSAKGRPIPVRLEALPQVESQVAAARAWRERTGRTFLKKNSSHTLLQVLSPRTDIGVYGSGKNRRKKVKELIEKEKEKDLDLEPLSDLEEGLEETRDTAMVVAVFKEREQKEIEAMHSLRAANLAKMTMVDRIEEVKFCICRKTASGFMLQCELCKDWFHNSCVPLPKSSSQKKGSSWQAKEVKFLCPLCMRSRRPRLETILSLLVSLQKLPVRLPEGEALQCLTERAMSWQDRARQALATDELSSALAKLSVLSQRMVEQAAREKTEKIISAELQKAAANPDLQGHLPSFQQSAFNRVVSSVSSSPRQTMDYDDEETDSDEDIRETYGYDMKDTASVKSSSSLEPNLFCDEEIPIKSEEVVTHMWTAPSFCAEHAYSSASKSCSQGSSTPRKQPRKSPLVPRSLEPPVLELSPGAKAQLEELMMVGDLLEVSLDETQHIWRILQATHPPSEDRFLHIMEDDSMEEKPLKVKGKDSSEKKRKRKLEKVEQLFGEGKQKSKELKKMDKPRKKKLKLGADKSKELNKLAKKLAKEEERKKKKEKAAAAKVELVKESTEKKREKKVLDIPSKYDWSGAEESDDENAVCAAQNCQRPCKDKVDWVQCDGGCDEWFHQVCVGVSPEMAENEDYICINCAKKQGPVSPGPAPPPSFIMSYKLPMEDLKETS

SEQ ID NO: 12341 - protein, 356 aa, Homo sapiens
MPEGEDFGPGKSWEVINSKPDERPRLSHCIAESWMNFSIFLQEMSLFKQQSPGKFCLLVCSVCTFFTILGSYIPGVILSYLLLLCAFLCPLFKCNDIGQKIYSKIKSVLLKLDFGIGEYINQKKRERSEADKEKSHKDDSELDFSALCPKISLTVAAKELSVSDTDVSEVSWTDNGTFNLSEGYTPQTDTSDDLDRPSEEVFSRDLSDFPSLENGMGTNDEDELSLGLPTELKRKKEQLDSGHRPSKETQSAAGLTLPLNSDQTFHLMSNLAGDVITAAVTAAIKDQLEGVQQALSQAAPIPEEDTDTEEGDDFELLDQSELDQIESELGLTQDQEAEAQQNKKSSGFLSNLLGGH

SEQ ID NO: 12342 - protein, 1354 aa, Homo sapiens
MSTGDSFETRFEKMDNLLRDPKSEVNSDCLLDGLDALVYDLDFPALRKNKNIDNFLSRYKDTINKIRDLRMKAEDYEVVKVIGRGAFGEVQLVRHKSTRKVYAMKLLSKFEMIKRSDSAFFWEERDIMAFANSPWVVQLFYAFQDDRYLYMVMEYMPGGDLVNLMSNYDVPEKWARFYTAEVVLALDAIHSMGFIHRDVKPDNMLLDKSGHLKLADFGTCMKMNKEGMVRCDTAVGTPDYISPEVLKSQGGDGYYGRECDWWSVGVFLYEMLVGDTPFYADSLVGTYSKIMNHKNSLTFPDDNDISKEAKNLICAFLTDREVRLGRNGVEEIKRHLFFKNDQWAWETLRDTVAPVVPDLSSDIDTSNFDDLEEDKGEEETFPIPKAFVGNQLPFVGFTYYSNRRYLSSANPNDNRTSSNADKSLQESLQKTIYKLEEQLHNEMQLKDEMEQKCRTSNIKLDKIMKELDEEGNQRRNLESTVSQIEKEKMLLQHRINEYQRKAEQENEKRRNVENEVSTLKDQLEDLKKVSQNSQLANEKLSQLQKQLEEANDLLRTESDTAVRLRKSHTEMSKSISQLESLNRELQERNRILENSKSQTDKDYYQLQAILEAERRDRGHDSEMIGDLQARITSLQEEVKHLKHNLEKVEGERKEAQDMLNHSEKEKNNLEIDLNYKLKSLQQRLEQEVNEHKVTKARLTDKHQSIEEAKSVAMCEMEKKLKEEREAREKAENRVVQIEKQCSMLDVDLKQSQQKLEHLTGNKERMEDEVKNLTLQLEQESNKRLLLQNELKTQAFEADNLKGLEKQMKQEINTLLEAKRLLEFELAQLTKQYRGNEGQMRELQDQLEAEQYFSTLYKTQVKELKEEIEEKNRENLKKIQELQNEKETLATQLDLAETKAESEQLARGLLEEQYFELTQESKKAASRNRQEITDKDHTVSRLEEANSMLTKDIEILRRENEELTEKMKKAEEEYKLEKEEEISNLKAAFEKNINTERTLKTQAVNKLAEIMNRKDFKIDRKKANTQDLRKKEKENRKLQLELNQEREKFNQMVVKHQKELNDMQAQLVEECAHRNELQMQLASKESDIEQLRAKLLDLSDSTSVASFPSADETDGNLPESRIEGWLSVPNRGNIKRYGWKKQYVVVSSKKILFYNDEQDKEQSNPSMVLDIDKLFHVRPVTQGDVYRAETEEIPKIFQILYANEGECRKDVEMEPVQQAEKTNFQNHKGHEFIPTLYHFPANCDACAKPLWHVFKPPPALECRRCHVKCHRDHLDKKEDLICPCKVSYDVTSARDMLLLACSQDEQKKWVTHLVKKIPKNPPSGFVRASPRTLSTRSTANQSFRKVVKNTSGKTS

SEQ ID NO: 12343 - protein, 1125 aa, Homo sapiens
MDAVNAFNQELFSLMDMKPPISRAKMILITKAAIKAIKLYKHVVQIVEKFIKKCKPEYKVPGLYVIDSIVRQSRHQFGTDKDVFGPRFSKNITATFQYLYLCPSEDKSKIVRVLNLWQKNGVFKIEIIQPLLDMAAGTSNAAPVAENVTNNEGSPPPPVKVSSEPPTQATPNSVPAVPQLPSSDAFAAVAQLFQTTQGQQLQQILQTFQQPPKPQSPALDNAVMAQVQAITAQLKTTPTQPSEQKAAFPPPEQKTAFDKKLLDRFDYDDEPEAVEESKKEDTTAVTTTAPAAAVPPAPTATVPAAAAPAAASPPPPQAPFGFPGDGMQQPAYTQHQNMDQFQPRMMGIQQDPMHHQVPLPPNGQMPGFGLLPTPPFPPMAQPVIPPTPPVQQPFQASFQAQNEPLTQKPHQQEMEVEQPCIQEVKRHMSDNRKSRSRSASRSPKRRRSRSGSRSRRSRHRRSRSRSRDRRRHSPRSRSQERRDREKERERRQKGLPQVKPETASVCSTTLWVGQLDKRTTQQDVASLLEEFGPIESINMIPPRGCAYIVMVHRQDAYRALQKLSRGNYKVNQKSIKIAWALNKGIKADYKQYWDVELGVTYIPWDKVKPEELESFCEGGMLDSDTLNPDWKGIPKKPENEVAQNGGAETSHTEPVSPIPKPLPVPVPPIPVPAPITVPPPQVPPHQPGPPVVGALQPPAFTPPLGIPPPGFGPGVPPPPPPPPFLRPGFNPMHLPPGFLPPGPPPPITPPVSIPPPHTPPISIPNLVSGARGNAESGDSVKMYGSAVPPAAPTNLPTPPVTQPVSLLGTQGVAPGPVIGLQAPSTGLLGARPGLIPLQRPPGMPPPHLQRFPLMPPRPMPPHMMHRGPPPGPGGFAMPPPHGMKGPFPPHGPFVRPGGMPGLGGPGPGPGGPEDRDGRQQPPQQPQQQPQPQAPQQPQQQQQQQPPPSQQPPPTQQQPQQFRNDNRQQFNSGRDQERFGRRSFGNRVENDRERYGNRNDDRDNSNRDRREWGRRSPDRDRHRDLEERNRRSSGHRDRERDSRDRESRREKEEARGKEKPEVTDRAGGNKTVEPPISQVGNVDTASELEKGVSEAAVLKPSEELPAEATSSVEPEKDSGSAAEAPR

SEQ ID NO: 12344 - protein, 132 aa, Homo sapiens
MNHIVQTFSPVNSGQPPNYEMLKEEQEVAMLGVPHNPAPPMSTVIHIRSETSVPDHVVWSLFNTLFMNTCCLGFIAFAYSVKSRDRKMVGDVTGAQAYASTAKCLNIWALILGIFMTILLIIIPVLVVQAQR

SEQ ID NO: 12345 - protein, 1342 aa, Homo sapiens
MKRIFSLLEKTWLGAPIQFAWQKTSGNYLAVTGADYIVKIFDRHGQKRSEINLPGNCVAMDWDKDGDVLAVIAEKSSCIYLWDANTNKTSQLDNGMRDQMSFLLWSKVGSFLAVGTVKGNLLIYNHQTSRKIPVLGKHTKRITCGCWNAENLLALGGEDKMITVSNQEGDTIRQTQVRSEPSNMQFFLMKMDDRTSAAESMISVVLGKKTLFFLNLNEPDNPADLEFQQDFGNIVCYNWYGDGRIMIGFSCGHFVVISTHTGELGQEIFQARNHKDNLTSIAVSQTLNKVATCGDNCIKIQDLVDLKDMYVILNLDEENKGLGTLSWTDDGQLLALSTQRGSLHVFLTKLPILGDACSTRIAYLTSLLEVTVANPVEGELPITVSVDVEPNFVAVGLYHLAVGMNNRAWFYVLGENAVKKLKDMEYLGTVASICLHSDYAAALFEGKVQLHLIESEILDAQEERETRLFPAVDDKCRILCHALTSDFLIYGTDTGVVQYFYIEDWQFVNDYRHPVSVKKIFPDPNGTRLVFIDEKSDGFVYCPVNDATYEIPDFSPTIKGVLWENWPMDKGVFIAYDDDKVYTYVFHKDTIQGAKVILAGSTKVPFAHKPLLLYNGELTCQTQSGKVNNIYLSTHGFLSNLKDTGPDELRPMLAQNLMLKRFSDAWEMCRILNDEAAWNELARACLHHMEVEFAIRVYRRIGNVGIVMSLEQIKGIEDYNLLAGHLAMFTNDYNLAQDLYLASSCPIAALEMRRDLQHWDSALQLAKHLAPDQIPFISKEYAIQLEFAGDYVNALAHYEKGITGDNKEHDEACLAGVAQMSIRMGDIRRGVNQALKHPSRVLKRDCGAILENMKQFSEAAQLYEKGLYYDKAASVYIRSKNWAKVGDLLPHVSSPKIHLQYAKAKEADGRYKEAVVAYENAKQWQSVIRIYLDHLNNPEKAVNIVRETQSLDGAKMVARFFLQLGDYGSAIQFLVMSKCNNEAFTLAQQHNKMEIYADIIGSEDTTNEDYQSIALYFEGEKRYLQAGKFFLLCGQYSRALKHFLKCPSSEDNVAIEMAIETVGQAKDELLTNQLIDHLLGENDGMPKDAKYLFRLYMALKQYREAAQTAIIIAREEQSAGNYRNAHDVLFSMYAELKSQKIKIPSEMATNLMILHSYILVKIHVKNGDHMKGARMLIRVANNISKFPSHIVPILTSTVIECHRAGLKNSAFSFAAMLMRPEYRSKIDAKYKKKIEGMVRRPDISEIEEATTPCPFCKFLLPECELLCPGCKNSIPYCIATGRHMLKDDWTVCPHCDFPALYSELKIMLNTESTCPMCSERLNAAQLKKISDCTQYLRTEEEL

SEQ ID NO: 12346 - protein, 288 aa, Homo sapiens
MPEAGFQATNAFTECKFTCTSGKCLYLGSLVCNQQNDCGDNSDEENCLLVTEHPPPGIFNSELEFAQIIIIVVVVTVMVVVIVCLLNHYKVSTRSFINRPNQSRRREDGLPQIMHAPRSRDRFTAPSFIQRDRFSRFQPTYPYVQHEIDLPPTISLSDGEEPPPYQGPCTLQLRDPEQQMELNRESVRAPPNRTIFDSDLIDIAMYSGGPCPPSSNSGISASTCSSNGRMEGPPPTYSEVMGHHPGASFLHHQRSNAHRGSRLQFQQNNAESTIVPIKGKDRKPGNLV

SEQ ID NO: 12347 - protein, 714 aa, Homo sapiens
MLDTMEAPGHSRQLLLQLNNQRTKGFLCDVIIVVQNALFRAHKNVLAASSAYLKSLVVHDNLLNLDHDMVSPAVFRLVLDFIYTGRLADGAEAAAAAAVAPGAEPSLGAVLAAASYLQIPDLVALCKKRLKRHGKYCHLRGGGGGGGGYAPYGRPGRGLRAATPVIQACYPSPVGPPPPPAAEPPSGPEAAVNTHCAELYASGPGPAAALCASERRCSPLCGLDLSKKSPPGSAAPERPLAERELPPRPDSPPSAGPAAYKEPPLALPSLPPLPFQKLEEAAPPSDPFRGGSGSPGPEPPGRPDGPSLLYRWMKHEPGLGSYGDELGRERGSPSERCEERGGDAAVSPGGPPLGLAPPPRYPGSLDGPGAGGDGDDYKSSSEETGSSEDPSPPGGHLEGYPCPHLAYGEPESFGDNLYVCIPCGKGFPSSEQLNAHVEAHVEEEEALYGRAEAAEVAAGAAGLGPPFGGGGDKVAGAPGGLGELLRPYRCASCDKSYKDPATLRQHEKTHWLTRPYPCTICGKKFTQRGTMTRHMRSHLGLKPFACDACGMRFTRQYRLTEHMRIHSGEKPYECQVCGGKFAQQRNLISHMKMHAVGGAAGAAGALAGLGGLPGVPGPDGKGKLDFPEGVFAVARLTAEQLSLKQQDKAAAAELLAQTTHFLHDPKVALESLYPLAKFTAELGLSPDKAAEVLSQGAHLAAGPDGRTIDRFSPT

SEQ ID NO: 12348 - protein, 1132 aa, Homo sapiens
MQRRGAGLGWPRQQQQQPPPLAVGPRAAAMVPSGGVPQGLGGRSACALLLLCYLNVVPSLGRQTSLTTSVIPKAEQSVAYKDFIYFTVFEGNVRNVSEVSVEYLCSQPCVVNLEAVVSSEFRSSIPVYKKRWKNEKHLHTSRTQIVHVKFPSIMVYRDDYFIRHSISVSAVIVRAWITHKYSGRDWNVKWEENLLHAVAKNYTLLQTIPPFERPFKDHQVCLEWNMGYIWNLRANRIPQCPLENDVVALLGFPYASSGENTGIVKKFPRFRNRELEATRRQRMDYPVFTVSLWLYLLHYCKANLCGILYFVDSNEMYGTPSVFLTEEGYLHIQMHLVKGEDLAVKTKFIIPLKEWFRLDISFNGGQIVVTTSIGQDLKSYHNQTISFREDFHYNDTAGYFIIGGSRYVAGIEGFFGPLKYYRLRSLHPAQIFNPLLEKQLAEQIKLYYERCAEVQEIVSVYASAAKHGGERQEACHLHNSYLDLQRRYGRPSMCRAFPWEKELKDKHPSLFQALLEMDLLTVPRNQNESVSEIGGKIFEKAVKRLSSIDGLHQISSIVPFLTDSSCCGYHKASYYLAVFYETGLNVPRDQLQGMLYSLVGGQGSERLSSMNLGYKHYQGIDNYPLDWELSYAYYSNIATKTPLDQHTLQGDQAYVETIRLKDDEILKVQTKEDGDVFMWLKHEATRGNAAAQQRLAQMLFWGQQGVAKNPEAAIEWYAKGALETEDPALIYDYAIVLFKGQGVKKNRRLALELMKKAASKGLHQAVNGLGWYYHKFKKNYAKAAKYWLKAEEMGNPDASYNLGVLHLDGIFPGVPGRNQTLAGEYFHKAAQGGHMEGTLWCSLYYITGNLETFPRDPEKAVVWAKHVAEKNGYLGHVIRKGLNAYLEGSWHEALLYYVLAAETGIEVSQTNLAHICEERPDLARRYLGVNCVWRYYNFSVFQIDAPSFAYLKMGDLYYYGHQNQSQDLELSVQMYAQAALDGDSQGFFNLALLIEEGTIIPHHILDFLEIDSTLHSNNISILQELYERCWSHSNEESFSPCSLAWLYLHLRLLWGAILHSALIYFLGTFLLSILIAWTVQYFQSVSASDPPPRPSQASPDTATSTASPAVTPAADASDQDQPTVTNNPEPRG

SEQ ID NO: 12349 - protein, 1149 aa, Homo sapiens
MFQTKLRNETWEDLPKMSCTTEIQAAFILSSFVTFFSGLIILLIFRLIWRSVKKWQIIKGTGIILELFTSGTIARSHVRSLHFQGQFRDHIEMLLSAQTFVGQVLVILVFVLSIGSLIIYFINSADPVGSCSSYEDKTIPIDLVFNAFFSFYFGLRFMAADDKIKFWLEMNSIVDIFTIPPTFISYYLKSNWLGLRFLRALRLLELPQILQILRAIKTSNSVKFSKLLSIILSTWFTAAGFIHLVENSGDPWLKGRNSQNISYFESIYLVMATTSTVGFGDVVAKTSLGRTFIMFFTLGSLILFANYIPEMVELFANKRKYTSSYEALKGKKFIVVCGNITVDSVTAFLRNFLRDKSGEINTEIVFLGETPPSLELETIFKCYLAYTTFISGSAMKWEDLRRVAVESAEACLIIANPLCSDSHAEDISNIMRVLSIKNYDSTTRIIIQILQSHNKVYLPKIPSWNWDTGDNIICFAELKLGFIAQGCLVPGLCTFLTSLFVEQNKKVMPKQTWKKHFLNSMKNKILTQRLSDDFAGMSFPEVARLCFLKMHLLLIAIEYKSLFTDGFCGLILNPPPQVRIRKNTLGFFIAETPKDVRRALFYCSVCHDDVFIPELITNCGCKSRSRQHITVPSVKRMKKCLKGISSRISGQDSPPRVSASTSSISNFTTRTLQHDVEQDSDQLDSSGMFHWCKPTSLDKVTLKRTGKSKYKFRNHIVACVFGDAHSAPMGLRNFVMPLRASNYTRKELKDIVFIGSLDYLQREWRFLWNFPQIYILPGCALYSGDLHAANIEQCSMCAVLSPPPQPSSNQTLVDTEAIMATLTIGSLQIDSSSDPSPSVSEETPGYTNGHNEKSNCRKVPILTELKNPSNIHFIEQLGGLEGSLQETNLHLSTAFSTGTVFSGSFLDSLLATAFYNYHVLELLQMLVTGGVSSQLEQHLDKDKVYGVADSCTSLLSGRNRCKLGLLSLHETILSDVNPRNTFGQLFCGSLDLFGILCVGLYRIIDEEELNPENKRFVITRPANEFKLLPSDLVFCAIPFSTACYKRNEEFSLQKSYEIVNKASQTTETHSDTNCPPTIDSVTETLYSPVYSYQPRTNSLSFPKQIAWNQSRTNSIISSQIPLGDNAKENERKTSDEVYDEDPFAYSEPL

SEQ ID NO: 12350 - protein, 175 aa, Homo sapiens
MSYNCCSGNFSSRSCGDYLRYPASSRGFSYPSNLVYSTDLCSPSTCQLGSSLYRGCQEICWEPTSCQTSYVESSPCQTSCYRPRTSLLCSPCKTTYSGSLGFGSSSCRSLGYGSRSCYSVGCGSSGVRSLGYGSCGFPSLGYGSGFCRPTYLASRSCQSPCYRPAYGSTFCRSTC

SEQ ID NO: 12351 - protein, 918 aa, Homo sapiens
MEHGTLLAQPGLWTRDTSWALLYFLCYILPQTAPQVLRIGGIFETVENEPVNVEELAFKFAVTSINRNRTLMPNTTLTYDIQRINLFDSFEASRRACDQLALGVAALFGPSHSSSVSAVQSICNALEVPHIQTRWKHPSVDNKDLFYINLYPDYAAISRAILDLVLYYNWKTVTVVYEDSTGLIRLQELIKAPSRYNIKIKIRQLPSGNKDAKPLLKEMKKGKEFYVIFDCSHETAAEILKQILFMGMMTEYYHYFFTTLDLFALDLELYRYSGVNMTGFRLLNIDNPHVSSIIEKWSMERLQAPPRPETGLLDGMMTTEAALMYDAVYMVAIASHRASQLTVSSLQCHRHKPWRLGPRFMNLIKEARWDGLTGHITFNKTNGLRKDFDLDIISLKEEGTEKAAGEVSKHLYKVWKKIGIWNSNSGLNMTDSNKDKSSNITDSLANRTLIVTTILEEPYVMYRKSDKPLYGNDRFEGYCLDLLKELSNILGFIYDVKLVPDGKYGAQNDKGEWNGMVKELIDHRADLAVAPLTITYVREKVIDFSKPFMTLGISILYRKPNGTNPGVFSFLNPLSPDIWMYVLLACLGVSCVLFVIARFTPYEWYNPHPCNPDSDVVENNFTLLNSFWFGVGALMQQGSELMPKALSTRIVGGIWWFFTLIIISSYTANLAAFLTVERMESPIDSADDLAKQTKIEYGAVRDGSTMTFFKKSKISTYEKMWAFMSSRQQTALVRNSDEGIQRVLTTDYALLMESTSIEYVTQRNCNLTQIGGLIDSKGYGVGTPIGSPYRDKITIAILQLQEEGKLHMMKEKWWRGNGCPEEDNKEASALGVENIGGIFIVLAAGLVLSVFVAIGEFIYKSRKNNDIEQAFCFFYGLQCKQTHPTNSTSGTTLSTDLECGKLIREERGIRKQSSVHTV

SEQ ID NO: 12352 - protein, 903 aa, Homo sapiens
MEHGTLLAQPGLWTRDTSWALLYFLCYILPQTAPQVLRIGGIFETVENEPVNVEELAFKFAVTSINRNRTLMPNTTLTYDIQRINLFDSFEASRRACDQLALGVAALFGPSHSSSVSAVQSICNALEVPHIQTRWKHPSVDNKDLFYINLYPDYAAISRAILDLVLYYNWKTVTVVYEDSTGLIRLQELIKAPSRYNIKIKIRQLPSGNKDAKPLLKEMKKGKEFYVIFDCSHETAAEILKQILFMGMMTEYYHYFFTTLDLFALDLELYRYSGVNMTGFRLLNIDNPHVSSIIEKWSMERLQAPPRPETGLLDGMMTTEAALMYDAVYMVAIASHRASQLTVSSLQCHRHKPWRLGPRFMNLIKEARWDGLTGHITFNKTNGLRKDFDLDIISLKEEGTEKIGIWNSNSGLNMTDSNKDKSSNITDSLANRTLIVTTILEEPYVMYRKSDKPLYGNDRFEGYCLDLLKELSNILGFIYDVKLVPDGKYGAQNDKGEWNGMVKELIDHRADLAVAPLTITYVREKVIDFSKPFMTLGISILYRKPNGTNPGVFSFLNPLSPDIWMYVLLACLGVSCVLFVIARFTPYEWYNPHPCNPDSDVVENNFTLLNSFWFGVGALMQQGSELMPKALSTRIVGGIWWFFTLIIISSYTANLAAFLTVERMESPIDSADDLAKQTKIEYGAVRDGSTMTFFKKSKISTYEKMWAFMSSRQQTALVRNSDEGIQRVLTTDYALLMESTSIEYVTQRNCNLTQIGGLIDSKGYGVGTPIGSPYRDKITIAILQLQEEGKLHMMKEKWWRGNGCPEEDNKEASALGVENIGGIFIVLAAGLVLSVFVAIGEFIYKSRKNNDIEQAFCFFYGLQCKQTHPTNSTSGTTLSTDLECGKLIREERGIRKQSSVHTV

SEQ ID NO: 12353 - protein, 300 aa, Homo sapiens
MDWFHCNQCFRKDGAHFFVTSCGHIFCKKCVTLEKCAVCGTACKHLALSDNLKPQEKMFFKSPVETALQYFSHISQVWSFQKKQTDLLIAFYKHRITKLETAMQEAQQALVSQDKELSVLRKENGELKKFLAILKESPSRYQGSRSITPRPVGITSPSQSVTPRPSFQHSSQVVSRSSSAESIPYREAGFGSLGQGGRGLQGRRTPRDSYNETPSPASTHSLSYRTSSASSGQGIFSFRPSPNGHSGHTRVLTPNNFAQRESTTTLESLPSFQLPVLQTLYQQRRHMGLPSGREAWTTSR

SEQ ID NO: 12354 - protein, 920 aa, Homo sapiens
MEHGTLLAQPGLWTRDTSWALLYFLCYILPQTAPQVLRIGGIFETVENEPVNVEELAFKFAVTSINRNRTLMPNTTLTYDIQRINLFDSFEASRRACDQLALGVAALFGPSHSSSVSAVQSICNALEVPHIQTRWKHPSVDNKDLFYINLYPDYAAISRAILDLVLYYNWKTVTVVYEDSTGLIRLQELIKAPSRYNIKIKIRQLPSGNKDAKPLLKEMKKGKEFYVIFDCSHETAAEILKQILFMGMMTEYYHYFFTTLDLFALDLELYRYSGVNMTGFRLLNIDNPHVSSIIEKWSMERLQAPPRPETGLLDGMMTTEAALMYDAVYMVAIASHRASQLTVSSLQCHRHKPWRLGPRFMNLIKEARWDGLTGHITFNKTNGLRKDFDLDIISLKEEGTEKAAGEVSKHLYKVWKKIGIWNSNSGLNMTDSNKDKSSNITDSLANRTLIVTTILEEPYVMYRKSDKPLYGNDRFEGYCLDLLKELSNILGFIYDVKLVPDGKYGAQNDKGEWNGMVKELIDHRADLAVAPLTITYVREKVIDFSKPFMTLGISILYRKPNGTNPGVFSFLNPLSPDIWMYVLLACLGVSCVLFVIARFTPYEWYNPHPCNPDSDVVENNFTLLNSFWFGVGALMQQGSELMPKALSTRIVGGIWWFFTLIIISSYTANLAAFLTVERMESPIDSADDLAKQTKIEYGAVRDGSTMTFFKKSKISTYEKMWAFMSSRQQTALVRNSDEGIQRVLTTDYALLMESTSIEYVTQRNCNLTQIGGLIDSKGYGVGTPIGSPYRDKITIAILQLQEEGKLHMMKEKWWRGNGCPEEDNKEASALGVENIGGIFIVLAAGLVLSVFVAIGEFIYKSRKNNDIEQCLSFNAIMEELGISLKNQKKIKKKSRTKGKSSFTSILTCHQRRTQRKETVA

SEQ ID NO: 12355 - protein, 934 aa, Homo sapiens
MEHGTLLAQPGLWTRDTSWALLYFLCYILPQTAPQVLRIGGIFETVENEPVNVEELAFKFAVTSINRNRTLMPNTTLTYDIQRINLFDSFEASRRACDQLALGVAALFGPSHSSSVSAVQSICNALEVPHIQTRWKHPSVDNKDLFYINLYPDYAAISRAILDLVLYYNWKTVTVVYEDSTGLIRLQELIKAPSRYNIKIKIRQLPSGNKDAKPLLKEMKKGKEFYVIFDCSHETAAEILKQILFMGMMTEYYHYFFTTLDLFALDLELYRYSGVNMTGFRLLNIDNPHVSSIIEKWSMERLQAPPRPETGLLDGMMTTEAALMYDAVYMVAIASHRASQLTVSSLQCHRHKPWRLGPRFMNLIKEARWDGLTGHITFNKTNGLRKDFDLDIISLKEEGTEKIGIWNSNSGLNMTDSNKDKSSNITDSLANRTLIVTTILEEPYVMYRKSDKPLYGNDRFEGYCLDLLKELSNILGFIYDVKLVPDGKYGAQNDKGEWNGMVKELIDHRADLAVAPLTITYVREKVIDFSKPFMTLGISILYRKPNGTNPGVFSFLNPLSPDIWMYVLLACLGVSCVLFVIARFTPYEWYNPHPCNPDSDVVENNFTLLNSFWFGVGALMQQGSELMPKALSTRIVGGIWWFFTLIIISSYTANLAAFLTVERMESPIDSADDLAKQTKIEYGAVRDGSTMTFFKKSKISTYEKMWAFMSSRQQTALVRNSDEGIQRVLTTDYALLMESTSIEYVTQRNCNLTQIGGLIDSKGYGVGTPIGSPYRDKITIAILQLQEEGKLHMMKEKWWRGNGCPEEDNKEASALGVENIGGIFIVLAAGLVLSVFVAIGEFIYKSRKNNDIEQKGKSSRIRFYFRNKVRFHGRKKQSLGVEKCLSFNAIMEELGISLKNQKKIKKKSRTKGKSSFTSILTCHQRRTQRKETVA

SEQ ID NO: 12356 - protein, 2103 aa, Homo sapiens
MSVPGTPGAMEPAGEEERPPPAAEGEDDEEEVAAAAQTSGPAHGRSASSLEDADDQEEEMEAMVIGGGCCKEQELTYELQQGYRILGEFLQEKHRGLTAPFLQPLGGVATAEEEVAEGPRSGGRGGRAFPQQPGQGMCLLQMEEKFASGQYGGITEFVADFRLMLETCYRLHGVDHWISKQGQKLEMMLEQKLALLSRHLREKTTIAVTSRGYYGLEDEKGTACTSTRRRSTPRSLAGLTSGVFESIMVQVLRQEEQLRAKEEKRLREQERKEAEEASQKEIEEWERKLLAQAAPTCMETMWEIPAIGHFLCLAQQILNLPEIVFYELERCLLMPQCNAFLSKIMTSLLSPPHRRPTLHRRPTLPYRTWEAALRQKVQQWYTAVGQTENPDNCAEKLGLCPQFFKVLGEVNPLEEKPFHELPFYQKVWLLKGLCDFVYETQKEVQDAVLGQPIHECREVILGYDYLENAYVHFPQFCGADVRIYKQRPFQAPEFPIPPIKIQRVPRIKLEKLKCDYVSTSNGEHRCSRDSLPSSFKKEQENNFDPACCPAKMILDNHDISVEMGVKSNYEIRIRRPCEIKKTDCCKENLEKPRSPGEVTGFGEPLSPGEIRFIENQEKYGEASRIKIEPSPLKENTLKSCQIHVNGSHSDHPEINCHKVVRDILLEQSLQSHKKLKLTKMRAKKKKKKKKKLKDVLNENLQRKREGLHSLAFKSYKPEIQNKLLIIKKKAKHKKHKSGKKSVSKKAITKKRKTVIKSPTVPEFQLICTNLDELRELITKIENELKDLENSRKKSGKWYHRRQAVKELHSTLIRLLNELLPWEPKLMKAFQRNRSRLKKDYDDFRRQPDHDTFNRELWTTDEGEGDLGKDSPKGEISKSIDSTEPLDILEKDHFDSDDMKLSEIDFPMARSKLLKKELPSKDLPKTLLKTLKRQSKQTDYVDDSTKELSPRKKAKLSTNETTVENLESDVQIDCFSESKHTEPSFPESFASLDSVPVSTLQKGTKPIQALLAKNIGNKVTLTNQLPPSTGRNALAVEKPVLSPPEASPIKPALTCHTNTKGPLQMVYKMPCGQWLPIDLQNSSVKIQVQPMVDPKTGEKIMQQVLILPKNFVIQHKEGKAVAKEVPPLQQKGTEQHCSSFPQTTNINSSLASVFVNSPGTVSTQLPNTAFNKTITPLSNISSARPQPLSPVTSVSNLLTPSVKTSQSEAGKAKNAVSAATFSLPSASPTISSTGQPLSSTTTLNGSTNPGSSFNCFAQQTADSSEAKQELKTVCIRDSQSILVRTRGGNTGVVKVQTNPDQNSPNTVSSSSVFTFAPQLQAFLVPKSTTSSSAFSPVAGTTTTSSLSPFSQTPTSVSIPASFAPSMGKNLKLTLGHTTGSGDLGHVIDKTSHMPSSPLKSSICSSTLLPSTTSSSVSVISISAANFGQNNANIIHTPTKQQQVDYITKSYPVTRSEATAATNGDVISGTPVQKLMLVSAPSILSSGNGTAINMTPALTSTGVSAQKLVFINAPVPSGTSTPTLVAESLKQTLPPPLHKAYVKTPEQPQIVLIPSTVGTPIKINSSPAVSQIKDVKIGLNIGQAIVNTSGTVPAIPSINILQNVTPKGEDKSSKGYILPLSTSGNSVPVSSNFVSQNITPVNESVVSSARAVNVLSVTGANLSLGSFPVTSASASAGAQPPVLVSGNDTSSRIMPILSNRLCSSSLGNTVAISTVKTGHLASSVLISTTQPVVSPKCLTSALQIPVTVALPTPATTSPKIINTVPHSAAVPGATRSVSISKRQSRTSLQFHSPGISTTVPTNVNTNKPQTELSSLSTSPGKITNTSNFASLPNQQALVKTPSYSSAPGGTTIHTASAPSNVTSLVGSQFSEPCIQQKIVINTSTPLAPGTQIMINGTRFIVPPQGLGAGSHVLLISTNPKYGAPLVLNSGQGIQSTPIDNSAQKITLASNNSLSGQPLQHPLRSPTKFINSFGNASSIPTVHTSPQLINTTAKVPVPPPVPTVSLTSVIKSPATLLAKTSLVSAICPSNPPLPSSTSVFHLDPPVKKLLVSPEGAILNTINTPASKVSSLSPSLSQIVVSASRSPASVFPAFQSSGLEKPDRAAS

SEQ ID NO: 12357 - protein, 544 aa, Homo sapiens
MRDNTSPISVILVSSGSRGNKLLFRYPFQRSQEHPASQTSKPRSRYAASNTGDHADEQDGDSRFSDVILATILATKSEMCGQKFELKIDNVRFVGHPTLLQHALGQANADPSVINCLHNLSRRIATVLQHEERRCQYLTREAKLILALQDEVSAMADGNEGPQSPFHHILPKCKLARDLKEAYDSLCTSGVVRLHINSWLEVSFCLPHKIHYAASSLIPPEAIERSLKAIRPYHALLLLSDEKSLLGELPIDCSPALVRVIKTTSAVKNLQQLAQDADLALLQVFQLAAHLVYWGKAIIIYPLCENNVYMLSPNASVCLYSPLAEQFSHQFPSHDLPSVLAKFSLPVSLSEFRNPLAPAVQETQLIQMVVWMLQRRLLIQLHTYVCLMASPSEEEPRPREDDVPFTARVGGRSLSTPNALSFGSPTSSDDMTLTSPSMDNSSAELLPSGDSPLNQRMTENLLASLSEHERAAILSVPAAQNPEDLRMFARLLHYFRGRHHLEEIMYNENTRRSQLLMLFDKFRSVLVVTTHEDPVIAVFQALLP

SEQ ID NO: 12358 - protein, 661 aa, Homo sapiens
MSHVAVENALGLDQQFAGLDLNSSDNQSGGSTASRRYIPPHLRNREATKGFYDKDSSGWSSSKDKDAYSSFGSRSDSRGKSSFFSDRGSGSRGRFDDRGRSDYDGIGSRGDRSGFGKFERGGNSRWCDKSDEDDWSKPLPPSERLEQELFSGGNTGINFEKYDDIPVEATGNNCPPHIESFSDVEMGEIIMGNIELTRYTRPTPVQKHAIPIIKEKRDLMACAQTGSGKTAAFLLPILSQIYSDGPGEALRAMKENGRYGRRKQYPISLVLAPTRELAVQIYEEARKFSYRSRVRPCVVYGGADIGQQIRDLERGCHLLVATPGRLVDMMERGKIGLDFCKYLVLDEADRMLDMGFEPQIRRIVEQDTMPPKGVRHTMMFSATFPKEIQMLARDFLDEYIFLAVGRVGSTSENITQKVVWVEESDKRSFLLDLLNATGKDSLTLVFVETKKGADSLEDFLYHEGYACTSIHGDRSQRDREEALHQFRSGKSPILVATAVAARGLDISNVKHVINFDLPSDIEEYVHRIGRTGRVGNLGLATSFFNERNINITKDLLDLLVEAKQEVPSWLENMAYEHHYKGSSRGRSKSSRFSGGFGARDYRQSSGASSSSFSSSRASSSRSGGGGHGSSRGFGGGGYGGFYNSDGYGGNYNSQGVDWWGN

SEQ ID NO: 12359 - protein, 822 aa, Homo sapiens
MGKKRTKGKTVPIDDSSETLEPVCRHIRKGLEQGNLKKALVNVEWNICQDCKTDNKVKDKAEEETEEKPSVWLCLKCGHQGCGRNSQEQHALKHYLTPRSEPHCLVLSLDNWSVWCYVCDNEVQYCSSNQLGQVVDYVRKQASITTPKPEKDNGNIELENKKLEKESKNEQEREKKENMAKENPPMNSPCQITVKGLSNLGNTCFFNAVMQNLSQTPVLRELLKEVKMSGTIVKIEPPDLALTEPLEINLEPPGPLTLAMSQFLNEMQETKKGVVTPKELFSQVCKKAVRFKGYQQQDSQELLRYLLDGMRAEEHQRVSKGILKAFGNSTEKLDEELKNKVKDYEKKKSMPSFVDRIFGGELTSMIMCDQCRTVSLVHESFLDLSLPVLDDQSGKKSVNDKNLKKTVEDEDQDSEEEKDNDSYIKERSDIPSGTSKHLQKKAKKQAKKQAKNQRRQQKIQGKVLHLNDICTIDHPEDSEYEAEMSLQGEVNIKSNHISQEGVMHKEYCVNQKDLNGQAKMIESVTDNQKSTEEVDMKNINMDNDLEVLTSSPTRNLNGAYLTEGSNGEVDISNGFKNLNLNAALHPDEINIEILNDSHTPGTKVYEVVNEDPETAFCTLANREVFNTDECSIQHCLYQFTRNEKLRDANKLLCEVCTRRQCNGPKANIKGERKHVYTNAKKQMLISLAPPVLTLHLKRFQQAGFNLRKVNKHIKFPEILDLAPFCTLKCKNVAEENTRVLYSLYGVVEHSGTMRSGHYTAYAKARTANSHLSNLVLHGDIPQDFEMESKGQWFHISDTHVQAVPTTKVLNSQAYLLFYERIL

SEQ ID NO: 12360 - protein, 2581 aa, Homo sapiens
MADPIMDLFDDPNLFGLDSLTDDSFNQVTQDPIEEALGLPSSLDSLDQMNQDGGGGDVGNSSASELVPPPEETAPTELSKESTAPAPESITLHDYTTQPASQEQPAQPVLQTSTPTSGLLQVSKSQEILSQGNPFMGVSATAVSSSSAGGQPPQSAPKIVILKAPPSSSVTGAHVAQIQAQGITSTAQPLVAGTANGGKVTFTKVLTGTPLRPGVSIVSGNTVLAAKVPGNQAAVQRIVQPSRPVKQLVLQPVKGSAPAGNPGATGPPLKPAVTLTSTPTQGESKRITLVLQQPQSGGPQGHRHVVLGSLPGKIVLQGNQLAALTQAKNAQGQPAKVVTIQLQVQQPQQKIQIVPQPPSSQPQPQQPPSTQPVTLSSVQQAQIMGPGQSPGQRLSVPVKVVLQPQAGSSQGASSGLSVVKVLSASEVAALSSPASSAPHSGGKTGMEENRRLEHQKKQEKANRIVAEAIARARARGEQNIPRVLNEDELPSVRPEEEGEKKRRKKSAGERLKEEKPKKSKTSGASKTKGKSKLNTITPVVGKKRKRNTSSDNSDVEVMPAQSPREDEESSIQKRRSNRQVKRKKYTEDLDIKITDDEEEEEVDVTGPIKPEPILPEPVQEPDGETLPSMQFFVENPSEEDAAIVDKVLSMRIVKKELPSGQYTEAEEFFVKYKNYSYLHCEWATISQLEKDKRIHQKLKRFKTKMAQMRHFFHEDEEPFNPDYVEVDRILDESHSIDKDNGEPVIYYLVKWCSLPYEDSTWELKEDVDEGKIREFKRIQSRHPELKRVNRPQASAWKKLELSHEYKNRNQLREYQLEGVNWLLFNWYNRQNCILADEMGLGKTIQSIAFLQEVYNVGIHGPFLVIAPLSTITNWEREFNTWTEMNTIVYHGSLASRQMIQQYEMYCKDSRGRLIPGAYKFDALITTFEMILSDCPELREIEWRCVIIDEAHRLKNRNCKLLDSLKHMDLEHKVLLTGTPLQNTVEELFSLLHFLEPSQFPSESEFLKDFGDLKTEEQVQKLQAILKPMMLRRLKEDVEKNLAPKQETIIEVELTNIQKKYYRAILEKNFSFLSKGAGHTNMPNLLNTMMELRKCCNHPYLINGAEEKILTEFREACHIIPHDFHLQAMVRSAGKLVLIDKLLPKLKAGGHKVLIFSQMVRCLDILEDYLIQRRYLYERIDGRVRGNLRQAAIDRFSKPDSDRFVFLLCTRAGGLGINLTAADTCIIFDSDWNPQNDLQAQARCHRIGQSKAVKVYRLITRNSYEREMFDKASLKLGLDKAVLQSMSGRDGNITGIQQFSKKEIEDLLRKGAYAAIMEEDDEGSKFCEEDIDQILLRRTTTITIESEGKGSTFAKASFVASENRTDISLDDPNFWQKWAKKADLDMDLLNSKNNLVIDTPRVRKQTRHFSTLKDDDLVEFSDLESEDDERPRSRRHDRHHAYGRTDCFRVEKHLLVYGWGRWRDILSHGRFKRRMTERDVETICRAILVYCLLHYRGDENIKGFIWDLISPAENGKTKELQNHSGLSIPVPRGRKGKKVKSQSTFDIHKADWIRKYNPDTLFQDESYKKHLKHQCNKVLLRVRMLYYLRQEVIGDQAEKVLGGAIASEIDIWFPVVDQLEVPTTWWDSEADKSLLIGVFKHGYEKYNTMRADPALCFLEKAGRPDDKAIAAEHRVLDNFSDIVEGVDFDKDCEDPEYKPLQGPPKDQDDEGDPLMMMDEEISVIDGDEAQVTQQPGHLFWPPGSALTARLRRLVTAYQRSYKREQMKIEAAERGDRRRRRCEAAFKLKEIARREKQQRWTRREQTDFYRVVSTFGVEYDPDTMQFHWDRFRTFARLDKKTDESLTKYFHGFVAMCRQVCRLPPAAGDEPPDPNLFIEPITEERASRTLYRIELLRRLREQVLCHPLLEDRLALCQPPGPELPKWWEPVRHDGELLRGAARHGVSQTDCNIMQDPDFSFLAARMNYMQNHQAGAPAPSLSRCSTPLLHQQYTSRTASPLPLRPDAPVEKSPEETATQVPSLESLTLKLEHEVVARSRPTPQDYEMRVSPSDTTPLVSRSVPPVKLEDEDDSDSELDLSKLSPSSSSSSSSSSSSSSTDESEDEKEEKLTDQSRSKLYDEESLLSLTMSQDGFPNEDGEQMTPELLLLQERQRASEWPKDRVLINRIDLVCQAVLSGKWPSSRRSQEMVTGGILGPGNHLLDSPSLTPGEYGDSPVPTPRSSSAASMAEEEASAVSTAAAQFTKLRRGMDEKEFTVQIKDEEGLKLTFQKHKLMANGVMGDGHPLFHKKKGNRKKLVELEVECMEEPNHLDVDLETRIPVINKVDGTLLVGEDAPRRAELEMWLQGHPEFAVDPRFLAYMEDRRKQKWQRCKKNNKAELNCLGMEPVQTANSRNGKKGHHTETVFNRVLPGPIAPESSKKRARRMRPDLSKMMALMQGGSTGSLSLHNTFQHSSSGLQSVSSLGHSSATSASLPFMPFVMGGAPSSPHVDSSTMLHHHHHHPHPHHHHHHHPGLRAPGYPSSPVTTASGTTLRLPPLQPEEDDDEDEEDDDDLSQGYDSSERDFSLIDDPMMPANSDSSEDADD

SEQ ID NO: 12361 - protein, 324 aa, Homo sapiens
MSQDQESPRCTHDQHLQTFSETQSLEVAQVSKALEKTLLSSSHPLVPGKLKEAPAAKAESPLEVPQSFCSSSIAVTTTSSSESDEASSNQEEEDSPSSSEDTSDPRNVPADALDQKVAFLVNFMLHKCQMKKPITKADMLKIIIKDDESHFSEILLRASEHLEMIFGLDVVEVDPTTHCYGLFIKLGLTYDGMLSGEKGVPKTGLLIIVLGVIFMKGNRATEEEVWEVLNLTGVYSGKKHFIFGEPRMLITKDFVKEKYLEYQQVANSDPARYEFLWGPRAKAETSKMKVLEFVAKVHGSYPHSFPSQYAEALKEEEERARARI

SEQ ID NO: 12362 - protein, 356 aa, Homo sapiens
MGTEAQPVVKAVILHCLPSCPHSCLLPPTRVIMSQDQESPRCTHDQHLQTFSETQSLEVAQVSKALEKTLLSSSHPLVPGKLKEAPAAKAESPLEVPQSFCSSSIAVTTTSSSESDEASSNQEEEDSPSSSEDTSDPRNVPADALDQKVAFLVNFMLHKCQMKKPITKADMLKIIIKDDESHFSEILLRASEHLEMIFGLDVVEVDPTTHCYGLFIKLGLTYDGMLSGEKGVPKTGLLIIVLGVIFMKGNRATEEEVWEVLNLTGVYSGKKHFIFGEPRMLITKDFVKEKYLEYQQVANSDPARYEFLWGPRAKAETSKMKVLEFVAKVHGSYPHSFPSQYAEALKEEEERARARI

SEQ ID NO: 12363 - protein, 1692 aa, Homo sapiens
MERNTFSMDCHSKSTAMEETAIWEQHTVTLHRAPGFGFGIAISGGRDNPHFQSGETSIVISDVLKGGPAEGQLQENDRVAMVNGVSMDNVEHAFAVQQLRKSGKNAKITIRRKKKVQIPVSRPDPEPVSDNEEDSYDEEIHDPRSGRSGVVNRRSEKIWPRDRSASRERSLSPRSDRRSVASSQPAKPTKVTLVKSRKNEEYGLRLASHIFVKEISQDSLAARDGNIQEGDVVLKINGTVTENMSLTDAKTLIERSKGKLKMVVQRDERATLLNVPDLSDSIHSANASERDDISEIQSLASDHSGRSHDRPPRRSRSRSPDQRSEPSDHSRHSPQQPSNGSLRSRDEERISKPGAVSTPVKHADDHTPKTVEEVTVERNEKQTPSLPEPKPVYAQVGQPDVDLPVSPSDGVLPNSTHEDGILRPSMKLVKFRKGDSVGLRLAGGNDVGIFVAGVLEDSPAAKEGLEEGDQILRVNNVDFTNIIREEAVLFLLDLPKGEEVTILAQKKKDVYRRIVESDVGDSFYIRTHFEYEKESPYGLSFNKGEVFRVVDTLYNGKLGSWLAIRIGKNHKEVERGIIPNKNRAEQLASVQYTLPKTAGGDRADFWRFRGLRSSKRNLRKSREDLSAQPVQTKFPAYERVVLREAGFLRPVTIFGPIADVAREKLAREEPDIYQIAKSEPRDAGTDQRSSGIIRLHTIKQIIDQDKHALLDVTPNAVDRLNYAQWYPIVVFLNPDSKQGVKTMRMRLCPESRKSARKLYERSHKLRKNNHHLFTTTINLNSMNDGWYGALKEAIQQQQNQLVWVSEGKADGATSDDLDLHDDRLSYLSAPGSEYSMYSTDSRHTSDYEDTDTEGGAYTDQELDETLNDEVGTPPESAITRSSEPVREDSSGMHHENQTYPPYSPQAQPQPIHRIDSPGFKPASQQVYRKDPYPEEMMRQNHVLKQPAVSHPGHRPDKEPNLTYEPQLPYVEKQASRDLEQPTYRYESSSYTDQFSRNYEHRLRYEDRVPMYEEQWSYYDDKQPYPSRPPFDNQHSQDLDSRQHPEESSERGYFPRFEEPAPLSYDSRPRYEQAPRASALRHEEQPAPGYDTHGRLRPEAQPHPSAGPKPAESKQYFEQYSRSYEQVPPQGFTSRAGHFEPLHGAAAVPPLIPSSQHKPEALPSNTKPLPPPPTQTEEEEDPAMKPQSVLTRVKMFENKRSASLETKKDVNDTGSFKPPEVASKPSGAPIIGPKPTSQNQFSEHDKTLYRIPEPQKPQLKPPEDIVRSNHYDPEEDEEYYRKQLSYFDRRSFENKPPAHIAASHLSEPAKPAHSQNQSNFSSYSSKGKPPEADGVDRSFGEKRYEPIQATPPPPPLPSQYAQPSQPVTSASLHIHSKGAHGEGNSVSLDFQNSLVSKPDPPPSQNKPATFRPPNREDTAQAAFYPQKSFPDKAPVNGTEQTQKTVTPAYNRFTPKPYTSSARPFERKFESPKFNHNLLPSETAHKPDLSSKTPTSPKTLVKSHSLAQPPEFDSGVETFSIHAEKPKYQINNISTVPKAIPVSPSAVEEDEDEDGHTVVATARGIFNSNGGVLSSIETGVSIIIPQGAIPEGVEQEIYFKVCRDNSILPPLDKEKGETLLSPLVMCGPHGLKFLKPVELRLPHCASMTPDGWSFALKSSDSSSGDPKTWQNKCLPGDPNYLVGANCVSVLIDHF

SEQ ID NO: 12364 - protein, 1286 aa, Homo sapiens
MSHLVDPTSGDLPVRDIDAIPLVLPASKGKNMKTQPPLSRMNREELEDSFFRLREDHMLVKELSWKQQDEIKRLRTTLLRLTAAGRDLRVAEEAAPLSETARRGQKAGWRQRLSMHQRPQMHRLQGHFHCVGPASPRRAQPRVQVGHRQLHTAGAPVPEKPKRGPRDRLSYTAPPSFKEHATNENRGEVASKPSELVSGSNSIISFSSVISMAKPIGLCMPNSAHIMASNTMQVEEPPKSPEKMWPKDENFEQRSSLECAQKAAELRASIKEKVELIRLKKLLHERNASLVMTKAQLTEVQEAYETLLQKNQGILSAAHEALLKQVNELRAELKEESKKAVSLKSQLEDVSILQMTLKEFQERVEDLEKERKLLNDNYDKLLESMLDSSDSSSQPHWSNELIAEQLQQQVSQLQDQLDAELEDKRKVLLELSREKAQNEDLKLEVTNILQKHKQEVELLQNAATISQPPDRQSEPATHPAVLQENTQIEPSEPKNQEEKKLSQVLNELQVSHAETTLELEKTRDMLILQRKINVCYQEELEAMMTKADNDNRDHKEKLERLTRLLDLKNNRIKQLEGILRSHDLPTSEQLKDVAYGTRPLSLCLETLPAHGDEDKVDISLLHQGENLFELHIHQAFLTSAALAQAGDTQPTTFCTYSFYDFETHCTPLSVGPQPLYDFTSQYVMETDSLFLHYLQEASARLDIHQAMASEHSTLAAGWICFDRVLETVEKVHGLATLIGAGGEEFGVLEYWMRLRFPIKPSLQACNKRKKAQVYLSTDVLGGRKAQEEEFRSESWEPQNELWIEITKCCGLRSRWLGTQPSPYAVYRFFTFSDHDTAIIPASNNPYFRDQARFPVLVTSDLDHYLRREALSIHVFDDEDLEPGSYLGRARVPLLPLAKNESIKGDFNLTDPAEKPNGSIQVQLDWKFPYIPPESFLKPEAQTKGKDTKDSSKISSEEEKASFPSQDQMASPEVPIEAGQYRSKRKPPHGGERKEKEHQVVSYSRRKHGKRIGVQGKNRMEYLSLNILNGNTPEQVNYTEWKFSETNSFIGDGFKNQHEEEEMTLSHSALKQKEPLHPVNDKESSEQGSEVSEAQTTDSDDVIVPPMSQKYPKADSEKMCIEIVSLAFYPEAEVMSDENIKQVYVEYKFYDLPLSETETPVSLRKPRAGEEIHFHFSKVIDLDPQEQQGRRRFLFDMLNGQDPDQGHLKFTVVSDPLDEEKKECEEVGYAYLQLWQILESGRDILEQELDIVSPEDLATPIGRLKVSLQAAAVLHAIYKEMTEDLFS

SEQ ID NO: 12365 - protein, 2039 aa, Homo sapiens
MPKSGFTKPIQSENSDSDSNMVEKPYGRKSKDKIASYSKTPKIERSDVSKEMKEKSSMKRKLPFTISPSRNEERDSDTEKEGPEKKKTKKEAGNKKSTPVSILFGYPLSERKQMALLMQMTARDNSPDSTPNHPSQTTPAQKKTPSSSSRQKDKVNKRNERGETPLHMAAIRGDVKQVKELISLGANVNVKDFAGWTPLHEACNVGYYDVAKILIAAGADVNTQGLDDDTPLHDSASSGHRDIVKLLLRHGGNPFQANKHGERPVDVAETEELELLLKREVPLSDDDESYTDSEEAQSVNPSSVDENIDSETEKDSLICESKQILPSKTPLPSALDEYEFKDDDDEEINKMIDDRHILRKEQRKENEPEAEKTHLFAKQEKAFYPKSFKSKKQKPSRVLYSSTESSDEEALQNKKISTSCSVIPETSNSDMQTKKEYVVSGEHKQKGKVKRKLKNQNKNKENQELKQEKEGKENTRITNLTVNTGLDCSEKTREEGNFRKSFSPKDDTSLHLFHISTGKSPKHSCGLSEKQSTPLKQEHTKTCLSPGSSEMSLQPDLVRYDNTESEFLPESSSVKSCKHKEKSKHQKDFHLEFGEKSNAKIKDEDHSPTFENSDCTLKKMDKEGKTLKKHKLKHKEREKEKHKKEIEGEKEKYKTKDSAKELQRSVEFDREFWKENFFKSDETEDLFLNMEHESLTLEKKSKLEKNIKDDKSTKEKHVSKERNFKEERDKIKKESEKSFREEKIKDLKEERENIPTDKDSEFTSLGMSAIEESIGLHLVEKEIDIEKQEKHIKESKEKPEKRSQIKEKDIEKMERKTFEKEKKIKHEHKSEKDKLDLSECVDKIKEKDKLYSHHTEKCHKEGEKSKNTAAIKKTDDREKSREKMDRKHDKEKPEKERHLAESKEKHLMEKKNKQSDNSEYSKSEKGKNKEKDRELDKKEKSRDKESINITNSKHIQEEKKSSIVDGNKAQHEKPLSLKEKTKDEPLKTPDGKEKDKKDKDIDRYKERDKHKDKIQINSLLKLKSEADKPKPKSSPASKDTRPKEKRLVNDDLMQTSFERMLSLKDLEIEQWHKKHKEKIKQKEKERLRNRNCLELKIKDKEKTKHTPTESKNKELTRSKSSEVTDAYTKEKQPKDAVSNRSQSVDTKNVMTLGKSSFVSDNSLNRSPRSENEKPGLSSRSVSMISVASSEDSCHTTVTTPRPPVEYDSDFMLESSESQMSFSQSPFLSIAKSPALHERELDSLADLPERIKPPYANRLSTSHLRSSSVEDVKLIISEGRPTIEVRRCSMPSVICEHTKQFQTISEESNQGSLLTVPGDTSPSPKPEVFSNVPERDLSNVSNIHSSFATSPTGASNSKYVSADRNLIKNTAPVNTVMDSPVHLEPSSQVGVIQNKSWEMPVDRLETLSTRDFICPNSNIPDQESSLQSFCNSENKVLKENADFLSLRQTELPGNSCAQDPASFMPPQQPCSFPSQSLSDAESISKHMSLSYVANQEPGILQQKNAVQIISSALDTDNESTKDTENTFVLGDVQKTDAFVPVYSDSTIQEASPNFEKAYTLPVLPSEKDFNGSDASTQLNTHYAFSKLTYKSSSGHEVENSTTDTQVISHEKENKLESLVLTHLSRCDSDLCEMNAGMPKGNLNEQDPKHCPESEKCLLSIEDEESQQSILSSLENHSQQSTQPEMHKYGQLVKVELEENAEDDKTENQIPQRMTRNKANTMANQSKQILASCTLLSEKDSESSSPRGRIRLTEDDDPQIHHPRKRKVSRVPQPVQVSPSLLQAKEKTQQSLAAIVDSLKLDEIQPYSSERANPYFEYLHIRKKIEEKRKLLCSVIPQAPQYYDEYVTFNGSYLLDGNPLSKICIPTITPPPSLSDPLKELFRQQEVVRMKLRLQHSIEREKLIVSNEQEVLRVHYRAARTLANQTLPFSACTVLLDAEVYNVPLDSQSDDSKTSVRDRFNARQFMSWLQDVDDKFDKLKTCLLMRQQHEAAALNAVQRLEWQLKLQELDPATYKSISIYEIQEFYVPLVDVNDDFELTPI

SEQ ID NO: 12366 - protein, 1390 aa, Homo sapiens
MPSGSFMLVNASGRPEGQRAHLLLPQLKENDTHCIDFHYFVSSKSNSPPGLLNVYVKVNNGPLGNPIWNISGDPTRTWNRAELAISTFWPNFYQVIFEVITSGHQGYLAIDEVKVLGHPCTRTPHFLRIQNVEVNAGQFATFQCSAIGRTVAGDRLWLQGIDVRDAPLKEIKVTSSRRFIASFNVVNTTKRDAGKYRCMIRTEGGVGISNYAELVVKEPPVPIAPPQLASVGATYLWIQLNANSINGDGPIVAREVEYCTASGSWNDRQPVDSTSYKIGHLDPDTEYEISVLLTRPGEGGTGSPGPALRTRTKCADPMRGPRKLEVVEVKSRQITIRWEPFGYNVTRCHSYNLTVHYCYQVGGQEQVREEVSWDTENSHPQHTITNLSPYTNVSVKLILMNPEGRKESQELIVQTDEDLPGAVPTESIQGSTFEEKIFLQWREPTQTYGVITLYEITYKAVSSFDPEIDLSNQSGRVSKLGNETHFLFFGLYPGTTYSFTIRASTAKGFGPPATNQFTTKISAPSMPAYELETPLNQTDNTVTVMLKPAHSRGAPVSVYQIVVEEERPRRTKKTTEILKCYPVPIHFQNASLLNSQYYFAAEFPADSLQAAQPFTIGDNKTYNGYWNTPLLPYKSYRIYFQAASRANGETKIDCVQVATKGAATPKPVPEPEKQTDHTVKIAGVIAGILLFVIIFLGVVLVMKKRKLAKKRKETMSSTRQEMTVMVNSMDKSYAEQGTNCDEAFSFMDTHNLNGRSVSSPSSFTMKTNTLSTSVPNSYYPDETHTMASDTSSLVQSHTYKKREPADVPYQTGQLHPAIRVADLLQHITQMKCAEGYGFKEEYESFFEGQSAPWDSAKKDENRMKNRYGNIIAYDHSRVRLQTIEGDTNSDYINGNYIDGYHRPNHYIATQGPMQETIYDFWRMVWHENTASIIMVTNLVEVGRVKCCKYWPDDTEIYKDIKVTLIETELLAEYVIRTFAVEKRGVHEIREIRQFHFTGWPDHGVPYHATGLLGFVRQVKSKSPPSAGPLVVHCSAGAGRTGCFIVIDIMLDMAEREGVVDIYNCVRELRSRRVNMVQTEEQYVFIHDAILEACLCGDTSVPASQVRSLYYDMNKLDPQTNSSQIKEEFRTLNMVTPTLRVEDCSIALLPRNHEKNRCMDILPPDRCLPFLITIDGESSNYINAALMDSYKQPSAFIVTQHPLPNTVKDFWRLVLDYHCTSVVMLNDVDPAQLCPQYWPENGVHRHGPIQVEFVSADLEEDIISRIFRIYNAARPQDGYRMVQQFQFLGWPMYRDTPVSKRSFLKLIRQVDKWQEEYNGGEGRTVVHCLNGGGRSGTFCAISIVCEMLRHQRTVDVFHAVKTLRNNKPNMVDLLDQYKFCYEVALEYLNSG

SEQ ID NO: 12367 - protein, 279 aa, Homo sapiens
MNKLDPQTNSSQIKEEFRTLNMVTPTLRVEDCSIALLPRNHEKNRCMDILPPDRCLPFLITIDGESSNYINAALMDSYKQPSAFIVTQHPLPNTVKDFWRLVLDYHCTSVVMLNDVDPAQLCPQYWPENGVHRHGPIQVEFVSADLEEDIISRIFRIYNAARPQDGYRMVQQFQFLGWPMYRDTPVSKRSFLKLIRQVDKWQEEYNGGEGRTVVHCLNGGGRSGTFCAISIVCEMLRHQRTVDVFHAVKTLRNNKPNMVDLLDQYKFCYEVALEYLNSG

SEQ ID NO: 12368 - protein, 411 aa, Homo sapiens
MNESPQTNEFKGTTEEAPAKESPHTSEFKGAALVSPISKSMLERLSKFEVEDAENVASYEWTHLVRLLRLIILIRIFHLLHQKRQLEKLMRRLVSENKRRYTRDGFDLDLTYVTERIIAMSFPSSGRQSFYRNPIEEVVRFLDKKHRNHYRVYNLCSERAYDPKHFHNRVSRIMIDDHNVPTLHEMVVFTKEVNEWMAQDLENIVAIHCKGGKGRTGTMVCALLIASEIFLTAEESLYYFGERRTNKTHSNKFQGVETPSQNRYVGYFAQVKHLYNWNLPPRRILFIKRFIIYSIRGDVCDLKVQVVMEKKVVFSSTSLGNCSILHDIETDKILINVYDGPPLYDDVKVQFFSSNLPKYYDNCPFFFWFNTSFIQNNRLCLPRNELDNPHKQKAWKIYPPEFAVEILFGEK

SEQ ID NO: 12369 - protein, 534 aa, Homo sapiens
MKQPNRKRKLNMDSKERLDQDGRLEQAEEEKKPKDSTTPLSHVPSAAAQGAWSWEWYLKEQKAVAAPVELFSKDQSFPEHENGFQIGMRLEGIDPRHPSVFCVLSVAEVCGYRLRLHFDGYLSCYDFWTNAGSPDIHPVGWCEKTKHELHIPKGYRKDKFVWMDYLKACKLQNAPKKLFRNRSPNGPMSKEFQVGMKLEAVDRKNPSLVCVATIADIVEDRLLVHFDNWDDSYDYWCDVNSPYVQPVGWCQENGRTLIAPQGYPNPENFSWTEYLEATQTNAVPAKVFKMRLPHGFLPNMKLEVVDKRNPRLIRVATIVDVDDQRVKVHFDGWDHKYDYWVEADSPDIHPIGWCDVTGHPLEVPQRTNDLKILPGQAVCPTPGCRGIGHIRGPRYSGHHSAFGCPYSDMNLKKEATLHDRLREQTQANLESDSSHSKSKSLCSLNFNGKHEKVNSQPRLVQQAKCLKIKGKEDIDLDNLFRGRVRWLMPVIPALWEAEAGRSRDQEIKTILANAVKPRLYQKYKKLARRGGGCL

SEQ ID NO: 12370 - protein, 623 aa, Homo sapiens
MKQPNRKRKLNMDSKERLDQDGRLEQAEEEKKPKDSTTPLSHVPSAAAQGAWSWEWYLKEQKAVAAPVELFSKDQSFPEHENGFQIGMRLEGIDPRHPSVFCVLSVAEVCGYRLRLHFDGYLSCYDFWTNAGSPDIHPVGWCEKTKHELHIPKGYRKDKFVWMDYLKACKLQNAPKKLFRNRSPNGPMSKEFQVGMKLEAVDRKNPSLVCVATIADIVEDRLLVHFDNWDDSYDYWCDVNSPYVQPVGWCQENGRTLIAPQGYPNPENFSWTEYLEATQTNAVPAKVFKMRLPHGFLPNMKLEVVDKRNPRLIRVATIVDVDDQRVKVHFDGWDHKYDYWVEADSPDIHPIGWCDVTGHPLEVPQRTNDLKILPGQAVCPTPGCRGIGHIRGPRYSGHHSAFGCPYSDMNLKKEATLHDRLREQTQANLESDSSHSKSKSLCSLNFNGKHEKVNSQPRLVQQAKCLKIKGKEDIDLDNLFRVLVLHPRGLEYSVEQAQQVLHQSVSMSTVSAHPFRDLPLGREQHCKLLPGVADIRASQVARWTVDEVAEFVQSLLGCEEHAKCFKKEQIDGKAFLLLTQTDIVKVMKIKLGPALKIYNSILMFRHSQELPEEDIASGQEVRG

SEQ ID NO: 12371 - protein, 1046 aa, Homo sapiens
MTTESGSDSESKPDQEAEPQEAAGAQGRAGAPVPEPPKEEQQQALEQFAAAAAHSTPVRREVTDKEQEFAARAAKQLEYQQLEDDKLSQKSSSSKLSRSPLKIVKKPKSMQCKVILLDGSEYTCDVEKRSRGQVLFDKVCEHLNLLEKDYFGLTYRDAENQKDSEGVEIMLGVCASGLLIYRDRLRINRFAWPKVLKISYKRNNFYIKIRPGEFEQFESTIGFKLPNHRAAKRLWKVCVEHHTFFRLLLPEAPPKKFLTLGSKFRYSGRTQAQTRRASALIDRPAPYFERSSSKRYTMSRSLDGASVNENHEIYMKDSMSAAEVGTGQYATTKGISQTNLITTVTPEKKAEEERDEEEDKRRKGEEVTPISAIRHEGKTDSERTDTAADGETTATESDQEEDAELKAQELEKTQDDLMKHQTNISELKRTFLETSTDTAVTNEWEKRLSTSPVRLAARQEDAPMIEPLVPEETKEETEISEKVIFLQQGSAPFLESQGTEDWVIVDRIPTEVVDGDLKKIVTYKVVTVSSKTGDLPADMLKSGTIKMQSFEELAREMQLKEDSKQKIYTLGKSYDTVSGRIVTMTGKAKEGEKVEQPSTTEALQKMEKEIPESMKIIPGLAEYEVLETLADEKSKRGPEVQTTQRKLSESLAPIKEAESRRQSPEEDDLKKAPQLEKDVAVLPGLEGRRFSKTEQVPESEVLKVGLFGPRRKSLSEWRYSQEPAFTVATAHYVTESSASRVVTKQSSGEKLMDGSEIFSLLESARKPTEFIGGVTSTSQSWVQKMETKTESSGIETEPTVHHLPLSTEKVVQETVLVEERRVVHASGDASYSAGDSGDAAAQPAFTGIKGKEGSALTEGAKEEGGEEVAKAVLEQEETAAASRERQEEQSAAIHISETLEQKPHFESSTVKTETISFGSVSPGGVKLEISTKEVPVVHTETKTITYESSQVDPGTDLEPGVLMSAQTITSETTSTTTTTHITKTVKGGISETRIEKRIVITGDADIDHDQALAQAIKEAKEQHPDMSVTKVVVHKETEITPEDGED

SEQ ID NO: 12372 - protein, 450 aa, Homo sapiens
MRECISIHVGQAGVQIGNACWELYCLEHGIQPDGQMPSDKTIGGGDDSFNTFFSETGAGKHVPRAVFVDLEPTVVDEVRTGTYRQLFHPEQLITGKEDAANNYARGHYTIGKEIVDLVLDRIRKLADLCTGLQGFLIFHSFGGGTGSGFASLLMERLSVDYGKKSKLEFAIYPAPQVSTAVVEPYNSILTTHTTLEHSDCAFMVDNEAIYDICRRNLDIERPTYTNLNRLIGQIVSSITASLRFDGALNVDLTEFQTNLVPYPRIHFPLATYAPVISAEKAYHEQLSVAEITNACFEPANQMVKCDPRHGKYMACCMLYRGDVVPKDVNAAIATIKTKRTIQFVDWCPTGFKVGINYQPPTVVPGGDLAKVQRAVCMLSNTTAIAEAWARLDHKFDLMYAKRAFVHWYVGEGMEEGEFSEAREDLAALEKDYEEVGVDSVEAEAEEGEEY

SEQ ID NO: 12373 - protein, 627 aa, Homo sapiens
MNLIFHKDILFGIPANKVPQDEWTGYTPRGKDDEIPCRRMRSGSYIKAMGDEDSGDSDTSPKPSPKVAARRESYLKATQPSLTELTTLKISNEHSPKLQIRSHSYLRAVSEVSINRSLDSLDPAGLLTSPKFRSRNESYMRAMSTISQVSEMEVNGQFESVCESVFSELESQAVEALDLPMPGCFRMRSHSYVRAIEKGCSQDDECVSLRSSSPPRTTTTVRTIQSSTVSSCITTYKKTPPPVPPRTTTKPFISITAQSSTESAQDAYMDGQGQRGDIISQSGLSNSTESLDSMKALTAAIEAANAQIHGPASQHMGNNTATVTTTTTIATVTTEDRKKDHFKKNRCLSIGIQVDDAEEPDKTGENKAPSKFQSVGVQVEEEKCFRRFTRSNSVTTAVQADLDFHDNLENSLESIEDNSCPGPMARQFSRDASTSTVSIQGSGNHYHACAADDDFDTDFDPSILPPPDPWIDSITEDPLEAVQRSVCHRDGHWFLKLLQAERDRMEGWCQQMEREERENNLPEDILGKIRTAVGSAQLLMAQKFYQFRELCEENLNPNAHPRPTSQDLAGFWDMLQLSIENISMKFDELHQLKANNWKQMDPLDKKVEQCRFCMVHLKTCTNTGQSK

SEQ ID NO: 12374 - protein, 675 aa, Homo sapiens
MNLIFHKDILFGIPANKVPQDEWTGYTPRGKDDEIPCRRMRSGSYIKAMGDEDSGDSDTSPKPSPKVAARRESYLKATQPSLTELTTLKISNEHSPKLQIRSHSYLRAVSEVSINRSLDSLDPAGLLTSPKFRSRNESYMRAMSTISQVSEMEVNGQFESVCESVFSELESQAVEALDLPMPGCFRMRSHSYVRAIEKGCSQDDECVSLRSSSPPRTTTTVRTIQSSTVSSCITTYKKTPPPVPPRTTTKPFISITAQSSTESAQDAYMDGQGQRGDIISQSGLSNSTESLDSMKALTAAIEAANAQIHGPASQHMGNNTATVTTTTTIATVTTEDRKKDHFKKNRCLSIGIQVDDAEEPDKTGENKAPSKFQSVGVQVEEEKCFRRFTRSNSVTTAVQADLDFHDNLENSLESIEDNSCPGPMARQFSRDASTSTVSIQGSGNHYHACAADDDFDTDFDPSILPPPDPWIDSITEDPLEAVQRSVCHRDGHWFLKLLQAERDRMEGWCQQMEREERENNLPEDILGKIRTAVGSAQLLMAQKFYQFRELCEENLNPNAHPRPTSQDLAGFWDMLQLSIENISMKFDELHQLKANNWKQMDPLDKKERRAPPPVPKKPAKGPAPLIRERSLESSQRQEARKRLMAAKRAASVRQNSATESAESIEIYIPEAQTRL

SEQ ID NO: 12375 - protein, 667 aa, Homo sapiens
MIDLFKAEWVSSVCVQVSRNGRTDQVWVPQDEWTGYTPRGKDDEIPCRRMRSGSYIKAMGDEDSGDSDTSPKPSPKVAARRESYLKATQPSLTELTTLKISNEHSPKLQIRSHSYLRAVSEVSINRSLDSLDPAGLLTSPKFRSRNESYMRAMSTISQVSEMEVNGQFESVCESVFSELESQAVEALDLPMPGCFRMRSHSYVRAIEKGCSQDDECVSLRSSSPPRTTTTVRTIQSSTGVIKLSSAVEAQSSTESAQDAYMDGQGQRGDIISQSGLSNSTESLDSMKALTAAIEAANAQIHGPASQHMGNNTATVTTTTTIATVTTEDRKKDHFKKNRCLSIGIQVDDAEEPDKTGENKAPSKFQSVGVQVEEEKCFRRFTRSNSVTTAVQADLDFHDNLENSLESIEDNSCPGPMARQFSRDASTSTVSIQGSGNHYHACAADDDFDTDFDPSILPPPDPWIDSITEDPLEAVQRSVCHRDGHWFLKLLQAERDRMEGWCQQMEREERENNLPEDILGKIRTAVGSAQLLMAQKFYQFRELCEENLNPNAHPRPTSQDLAGFWDMLQLSIENISMKFDELHQLKANNWKQMDPLDKKERRAPPPVPKKPAKGPAPLIRERSLESSQRQEARKRLMAAKRAASVRQNSATESAESIEIYIPEAQTRL

SEQ ID NO: 12376 - protein, 693 aa, Homo sapiens
MIDLFKAEWVSSVCVQVSRNGRTDQVPQDEWTGYTPRGKDDEIPCRRMRSGSYIKAMGDEDSGDSDTSPKPSPKVAARRESYLKATQPSLTELTTLKISNEHSPKLQIRSHSYLRAVSEVSINRSLDSLDPAGLLTSPKFRSRNESYMRAMSTISQVSEMEVNGQFESVCESVFSELESQAVEALDLPMPGCFRMRSHSYVRAIEKGCSQDDECVSLRSSSPPRTTTTVRTIQSSTGVIKLSSAVEVSSCITTYKKTPPPVPPRTTTKPFISITAQSSTESAQDAYMDGQGQRGDIISQSGLSNSTESLDSMKALTAAIEAANAQIHGPASQHMGNNTATVTTTTTIATVTTEDRKKDHFKKNRCLSIGIQVDDAEEPDKTGENKAPSKFQSVGVQVEEEKCFRRFTRSNSVTTAVQADLDFHDNLENSLESIEDNSCPGPMARQFSRDASTSTVSIQGSGNHYHACAADDDFDTDFDPSILPPPDPWIDSITEDPLEAVQRSVCHRDGHWFLKLLQAERDRMEGWCQQMEREERENNLPEDILGKIRTAVGSAQLLMAQKFYQFRELCEENLNPNAHPRPTSQDLAGFWDMLQLSIENISMKFDELHQLKANNWKQMDPLDKKERRAPPPVPKKPAKGPAPLIRERSLESSQRQEARKRLMAAKRAASVRQNSATESAESIEIYIPEAQTRL

SEQ ID NO: 12377 - protein, 173 aa, Homo sapiens
MLTRKIKLWDINAHITCRLCSGYLIDATTVTECLHTCTCPARATQGGRALPSSVLFRTLAFVLPHAFSSSPTKAGTRTRGRDDLEDKSEKSFHAKGPVGGVRADEASLRRAKHRRDPTFLPRSSKASSRCDSAHCWQFPNLQRSSLDPSKGNLPVCSSHLMCVLTPDESVLWC

SEQ ID NO: 12378 - protein, 683 aa, Homo sapiens
MIDLFKAEWVSSVCVQVSRNGRTDQVPQDEWTGYTPRGKDDEIPCRRMRSGSYIKAMGDEDSGDSDTSPKPSPKVAARRESYLKATQPSLTELTTLKISNEHSPKLQIRSHSYLRAVSEVSINRSLDSLDPAGLLTSPKFRSRNESYMRAMSTISQVSEMEVNGQFESVCESVFSELESQAVEALDLPMPGCFRMRSHSYVRAIEKGCSQDDECVSLRSSSPPRTTTTVRTIQSSTVSSCITTYKKTPPPVPPRTTTKPFISITAQSSTESAQDAYMDGQGQRGDIISQSGLSNSTESLDSMKALTAAIEAANAQIHGPASQHMGNNTATVTTTTTIATVTTEDRKKDHFKKNRCLSIGIQVDDAEEPDKTGENKAPSKFQSVGVQVEEEKCFRRFTRSNSVTTAVQADLDFHDNLENSLESIEDNSCPGPMARQFSRDASTSTVSIQGSGNHYHACAADDDFDTDFDPSILPPPDPWIDSITEDPLEAVQRSVCHRDGHWFLKLLQAERDRMEGWCQQMEREERENNLPEDILGKIRTAVGSAQLLMAQKFYQFRELCEENLNPNAHPRPTSQDLAGFWDMLQLSIENISMKFDELHQLKANNWKQMDPLDKKERRAPPPVPKKPAKGPAPLIRERSLESSQRQEARKRLMAAKRAASVRQNSATESAESIEIYIPEAQTRL

SEQ ID NO: 12379 - protein, 173 aa, Homo sapiens
MASRKTKKKEGGALRAQRASSNVFSNFEQTQIQEFKEAFTLMDQNRDGFIDKEDLKDTYASLGKTNVKDDELDAMLKEASGPINFTMFLNLFGEKLSGTDAEETILNAFKMLDPDGKGKINKEYIKRLLMSQADKMTAEEVDQMFQFASIDVAGNLDYKALSYVITHGEEKEE

SEQ ID NO: 12380 - protein, 876 aa, Homo sapiens
MLSGKKAAAAAAAAAAAATGTEAGPGTAGGSENGSEVAAQPAGLSGPAEVGPGAVGERTPRKKEPPRASPPGGLAEPPGSAGPQAGPTVVPGSATPMETGIAETPEGRRTSRRKRAKVEYREMDESLANLSEDEYYSEEERNAKAEKEKKLPPPPPQAPPEEENESEPEEPSGQAGGLQDDSSGGYGDGQASGVEGAAFQSRLPHDRMTSQEAACFPDIISGPQQTQKVFLFIRNRTLQLWLDNPKIQLTFEATLQQLEAPYNSDTVLVHRVHSYLERHGLINFGIYKRIKPLPTKKTGKVIIIGSGVSGLAAARQLQSFGMDVTLLEARDRVGGRVATFRKGNYVADLGAMVVTGLGGNPMAVVSKQVNMELAKIKQKCPLYEANGQADTVKVPKEKDEMVEQEFNRLLEATSYLSHQLDFNVLNNKPVSLGQALEVVIQLQEKHVKDEQIEHWKKIVKTQEELKELLNKMVNLKEKIKELHQQYKEASEVKPPRDITAEFLVKSKHRDLTALCKEYDELAETQGKLEEKLQELEANPPSDVYLSSRDRQILDWHFANLEFANATPLSTLSLKHWDQDDDFEFTGSHLTVRNGYSCVPVALAEGLDIKLNTAVRQVRYTASGCEVIAVNTRSTSQTFIYKCDAVLCTLPLGVLKQQPPAVQFVPPLPEWKTSAVQRMGFGNLNKVVLCFDRVFWDPSVNLFGHVGSTTASRGELFLFWNLYKAPILLALVAGEAAGIMENISDDVIVGRCLAILKGIFGSSAVPQPKETVVSRWRADPWARGSYSYVAAGSSGNDYDLMAQPITPGPSIPGAPQPIPRLFFAGEHTIRNYPATVHGALLSGLREAGRIADQFLGAMYTLPRQATPGVPAQQSPSM

SEQ ID NO: 12381 - protein, 1125 aa, Homo sapiens
MTVEQNVLQQSAAQKHQQTFLNQLREITGINDTQILQQALKDSNGNLELAVAFLTAKNAKTPQQEETTYYQTALPGNDRYISVGSQADTNVIDLTGDDKDDLQRAIALSLAESNRAFRETGITDEEQAISRVLEASIAENKACLKRTPTEVWRDSRNPYDRKRQDKAPVGLKNVGNTCWFSAVIQSLFNLLEFRRLVLNYKPPSNAQDLPRNQKEHRNLPFMRELRYLFALLVGTKRKYVDPSRAVEILKDAFKSNDSQQQDVSEFTHKLLDWLEDAFQMKAEEETDEEKPKNPMVELFYGRFLAVGVLEGKKFENTEMFGQYPLQVNGFKDLHECLEAAMIEGEIESLHSENSGKSGQEHWFTELPPVLTFELSRFEFNQALGRPEKIHNKLEFPQVLYLDRYMHRNREITRIKREEIKRLKDYLTVLQQRLERYLSYGSGPKRFPLVDVLQYALEFASSKPVCTSPVDDIDASSPPSGSIPSQTLPSTTEQQGALSSELPSTSPSSVAAISSRSVIHKPFTQSRIPPDLPMHPAPRHITEEELSVLESCLHRWRTEIENDTRDLQESISRIHRTIELMYSDKSMIQVPYRLHAVLVHEGQANAGHYWAYIFDHRESRWMKYNDIAVTKSSWEELVRDSFGGYRNASAYCLMYINDKAQFLIQEEFNKETGQPLVGIETLPPDLRDFVEEDNQRFEKELEEWDAQLAQKALQEKLLASQKLRESETSVTTAQAAGDPEYLEQPSRSDFSKHLKEETIQIITKASHEHEDKSPETVLQSKPENTTSQPLSNQRVVEVAIPHVGKFMIESKEGGYDDEIMMTPNMQGIIMAIGKSRSVYDRCGPEAGFFKAIKLEYARLVKLAQEDTPPETDYRLHHVVVYFIQNQAPKKIIEKTLLEQFGDRNLSFDERCHNIMKVAQAKLEMIKPEEVNLEEYEEWHQDYRKFRETTMYLIIGLENFQRESYIDSLLFLICAYQNNKELLSKGLYRGHDEELISHYRRECLLKLNEQAAELFESGEDREVNNGLIIMNEFIVPFLPLLLVDEMEEKDILAVEDMRNRWCSYLGQEMEPHLQEKLTDFLPKLLDCSMEIKSFHEPPKLPSYSTHELCERFARIMLSLSRTPADGR

SEQ ID NO: 12382 - protein, 3388 aa, Homo sapiens
MTAWRRFQSLLLLLGLLVLCARLLTAAKGQNCGGLVQGPNGTIESPGFPHGYPNYANCTWIIITGERNRIQLSFHTFALEEDFDILSVYDGQPQQGNLKVRLSGFQLPSSIVSTGSILTLWFTTDFAVSAQGFKALYEVLPSHTCGNPGEILKGVLHGTRFNIGDKIRYSCLPGYILEGHAILTCIVSPGNGASWDFPAPFCRAEGACGGTLRGTSSSISSPHFPSEYENNADCTWTILAEPGDTIALVFTDFQLEEGYDFLEISGTEAPSIWLTGMNLPSPVISSKNWLRLHFTSDSNHRRKGFNAQFQVKKAIELKSRGVKMLPSKDGSHKNSVLSQGGVALVSDMCPDPGIPENGRRAGSDFSRVGANVQFSCEDNYVLQGSKSITCQRVTETLAAWSDHRPICRARTCGSNLRGPSGVITSPNYPVQYEDNAHCVWVITTTDPDKVIKLAFEEFELERGYDTLTVGDAGKVGDTRSVLYVLTGSSVPDLIVSMSNQMWLHLQSDDSIGSPGFKAVYQEIEKGGCGDPGIPAYGKRTGSSFLHGDTLTFECPAAFELVGERVITCQQNNQWSGNKPSCVFSCFFNFTASSGIILSPNYPEEYGNNMNCVWLIISEPGSRIHLIFNDFDVEPQFDFLAVKDDGISDITVLGTFSGNEVPSQLASSGHIVRLEFQSDHSTTGRGFNITYTTFGQNECHDPGIPINGRRFGDRFLLGSSVSFHCDDGFVKTQGSESITCILQDGNVVWSSTVPRCEAPCGGHLTASSGVILPPGWPGYYKDSLHCEWIIEAKPGHSIKITFDRFQTEVNYDTLEVRDGPASSSPLIGEYHGTQAPQFLISTGNFMYLLFTTDNSRSSIGFLIHYESVTLESDSCLDPGIPVNGHRHGGDFGIRSTVTFSCDPGYTLSDDEPLVCERNHQWNHALPSCDALCGGYIQGKSGTVLSPGFPDFYPNSLNCTWTIEVSHGKGVQMIFHTFHLESSHDYLLITEDGSFSEPVARLTGSVLPHTIKAGLFGNFTAQLRFISDFSISYEGFNITFSEYDLEPCDDPGVPAFSRRIGFHFGVGDSLTFSCFLGYRLEGATKLTCLGGGRRVWSAPLPRCVAECGASVKGNEGTLLSPNFPSNYDNNHECIYKIETEAGKGIHLRTRSFQLFEGDTLKVYDGKDSSSRPLGTFTKNELLGLILNSTSNHLWLEFNTNGSDTDQGFQLTYTSFDLVKCEDPGIPNYGYRIRDEGHFTDTVVLYSCNPGYAMHGSNTLTCLSGDRRVWDKPLPSCIAECGGQIHAATSGRILSPGYPAPYDNNLHCTWIIEADPGKTISLHFIVFDTEMAHDILKVWDGPVDSDILLKEWSGSALPEDIHSTFNSLTLQFDSDFFISKSGFSIQFSTSIAATCNDPGMPQNGTRYGDSREAGDTVTFQCDPGYQLQGQAKITCVQLNNRFFWQPDPPTCIAACGGNLTGPAGVILSPNYPQPYPPGKECDWRVKVNPDFVIALIFKSFNMEPSYDFLHIYEGEDSNSPLIGSYQGSQAPERIESSGNSLFLAFRSDASVGLSGFAIEFKEKPREACFDPGNIMNGTRVGTDFKLGSTITYQCDSGYKILDPSSITCVIGADGKPSWDQVLPSCNAPCGGQYTGSEGVVLSPNYPHNYTAGQICLYSITVPKEFVVFGQFAYFQTALNDLAELFDGTHAQARLLSSLSGSHSGETLPLATSNQILLRFSAKSGASARGFHFVYQAVPRTSDTQCSSVPEPRYGRRIGSEFSAGSIVRFECNPGYLLQGSTALHCQSVPNALAQWNDTIPSCVVPCSGNFTQRRGTILSPGYPEPYGNNLNCIWKIIVTEGSGIQIQVISFATEQNWDSLEIHDGGDVTAPRLGSFSGTTVPALLNSTSNQLYLHFQSDISVAAAGFHLEYKTVGLAACQEPALPSNSIKIGDRYMVNDVLSFQCEPGYTLQGRSHISCMPGTVRRWNYPSPLCIATCGGTLSTLGGVILSPGFPGSYPNNLDCTWRISLPIGYGAHIQFLNFSTEANHDFLEIQNGPYHTSPMIGQFSGTDLPAALLSTTHETLIHFYSDHSQNRQGFKLAYQAYELQNCPDPPPFQNGYMINSDYSVGQSVSFECYPGYILIGHPVLTCQHGINRNWNYPFPRCDAPCGYNVTSQNGTIYSPGFPDEYPILKDCIWLITVPPGHGVYINFTLLQTEAVNDYIAVWDGPDQNSPQLGVFSGNTALETAYSSTNQVLLKFHSDFSNGGFFVLNFHAFQLKKCQPPPAVPQAEMLTEDDDFEIGDFVKYQCHPGYTLVGTDILTCKLSSQLQFEGSLPTCEAQCPANEVRTGSSGVILSPGYPGNYFNSQTCSWSIKVEPNYNITIFVDTFQSEKQFDALEVFDGSSGQSPLLVVLSGNHTEQSNFTSRSNQLYLRWSTDHATSKKGFKIRYAAPYCSLTHPLKNGGILNRTAGAVGSKVHYFCKPGYRMVGHSNATCRRNPLGMYQWDSLTPLCQAVSCGIPESPGNGSFTGNEFTLDSKVVYECHEGFKLESSQQATAVCQEDGLWSNKGKPPTCKPVACPSIEAQLSEHVIWRLVSGSLNEYGAQVLLSCSPGYYLEGWRLLRCQANGTWNIGDERPSCRAGHCGSPDPIVNGHISGDGFSYRDTVVYQCNPGFRLVGTSVRICLQDHKWSGQTPVCVPITCGHPGNPAHGFTNGSEFNLNDVVNFTCNTGYLLQGVSRAQCRSNGQWSSPLPTCRVVNCSDPGFVENAIRHGQQNFPESFEYGMSILYHCKKGFYLLGSSALTCMANGLWDRSLPKCLAISCGHPGVPANAVLTGELFTYGAVVHYSCRGSESLIGNDTRVCQEDSHWSGALPHCTGNNPGFCGDPGTPAHGSRLGDDFKTKSLLRFSCEMGHQLRGSPERTCLLNGSWSGLQPVCEAVLCPQPPPVQNGTVEGSDFRWGSSISYSCMDGYQLSHSAILSCEGRGVWKGEIPQCLPVFCGDPGIPAEGRLSGKSFTYKSEVFFQCKSPFILVGSSRRVCQADGTWSGIQPTCIDPAHNTCPDPGTPHFGIQNSSRGYEVGSTVFFRCRKGYHIQGSTTRTCLANLTWSGIQTECIPHACRQPETPAHADVRAIDLPTFGYTLVYTCHPGFFLAGGSEHRTCKADMKWTGKSPVCKSKGVREVNETVTKTPVPSDVFFVNSLWKGYYEYLGKRQPATLTVDWFNATSSKVNATFSEASPVELKLTGIYKKEEAHLLLKAFQIKGQADIFVSKFENDNWGLDGYVSSGLERGGFTFQGDIHGKDFGKFKLERQDPLNPDQDSSSHYHGTSSGSVAAAILVPFFALILSGFAFYLYKHRTRPKVQYNGYAGHENSNGQASFENPMYDTNLKPTEAKAVRFDTTLNTVCTVV

SEQ ID NO: 12383 - protein, 402 aa, Homo sapiens
MWATYQTEEDYTLTMYFQQYWRDKRLAYSGIPLNLTLDNRVADQLWVPDTYFLNDKKSFVHGVTVKNRMIRLHPDGTVLYGLRITTTAACMMDLRRYPLDEQNCTLEIESYGYTTDDIEFYWRGGDKAVTGVERIELPQFSIVEHRLVSRNVVFATGAYPRLSLSFRLKRNIGYFILQTYMPSILITILSWVSFWINYDASAARVALGITTVLTMTTINTHLRETLPKIPYVKAIDMYLMGCFVFVFLALLEYAFVNYIFFGRGPQRQKKLAEKTAKAKNDRSKSESNRVDAHGNILLTSLEVHNEMNEVSGGIGDTRNSAISFDNSGIQYRKQSMPREGHGRFLGDRSLPHKKTHLRRRSSQLKIKIPDLTDVNAIDRWSRIVFPFTFSLFNLVYWLYYVN

SEQ ID NO: 12384 - protein, 1055 aa, Homo sapiens
MALRRLGAALLLLPLLAAVEETLMDSTTATAELGWMVHPPSGWEEVSGYDENMNTIRTYQVCNVFESSQNNWLRTKFIRRRGAHRIHVEMKFSVRDCSSIPSVPGSCKETFNLYYYEADFDSATKTFPNWMENPWVKVDTIAADESFSQVDLGGRVMKINTEVRSFGPVSRSGFYLAFQDYGGCMSLIAVRVFYRKCPRIIQNGAIFQETLSGAESTSLVAARGSCIANAEEVDVPIKLYCNGDGEWLVPIGRCMCKAGFEAVENGTVCRGCPSGTFKANQGDEACTHCPINSRTTSEGATNCVCRNGYYRADLDPLDMPCTTIPSAPQAVISSVNETSLMLEWTPPRDSGGREDLVYNIICKSCGSGRGACTRCGDNVQYAPRQLGLTEPRIYISDLLAHTQYTFEIQAVNGVTDQSPFSPQFASVNITTNQAAPSAVSIMHQVSRTVDSITLSWSQPDQPNGVILDYELQYYEKELSEYNATAIKSPTNTVTVQGLKAGAIYVFQVRARTVAGYGRYSGKMYFQTMTEAEYQTSIQEKLPLIIGSSAAGLVFLIAVVVIAIVCNRRGFERADSEYTDKLQHYTSGHMTPGMKIYIDPFTYEDPNEAVREFAKEIDISCVKIEQVIGAGEFGEVCSGHLKLPGKREIFVAIKTLKSGYTEKQRRDFLSEASIMGQFDHPNVIHLEGVVTKSTPVMIITEFMENGSLDSFLRQNDGQFTVIQLVGMLRGIAAGMKYLADMNYVHRDLAARNILVNSNLVCKVSDFGLSRFLEDDTSDPTYTSALGGKIPIRWTAPEAIQYRKFTSASDVWSYGIVMWEVMSYGERPYWDMTNQDVINAIEQDYRLPPPMDCPSALHQLMLDCWQKDRNHRPKFGQIVNTLDKMIRNPNSLKAMAPLSSGINLPLLDRTIPDYTSFNTVDEWLEAIKMGQYKESFANAGFTSFDVVSQMMMEDILRVGVTLAGHQKKILNSIQVMRAQMNQIQSVEGQPLARRPRATGRTKRCQPRDVTKKTCNSNDGKKKGMGKKKTDPGRGREIQGIFFKEDSHKESNDCSCGG

SEQ ID NO: 12385 - protein, 140 aa, Homo sapiens
YNRAVKNTRKVAVSLSVHIKNLLKHGASLDNFHFIGVSLGAHISGFVGKIFHGQLGRITGLDPAGPRFSRKPPYSRLDYTDAKFVDVIHSDSNGIQFIKCNHQRAVHLFMASLETNCNFISFPCRSYKDYKTSLCVDCDC

SEQ ID NO: 12386 - protein, 668 aa, Homo sapiens
FKNQLLADHGHNPLMKKVFDVYLCFLQKHQSETALKNVFTALRSLIYKFPSTFYEGRADMCAALCYEILKCCNSKLSSIRTEASQLLYFLMRNNFDYTGKKSFVRTHLQVIISVSQLIADVVGIGGTRFQQSLSIINNCANSDRLIKHTSFSSDVKDLTKRIRTVLMATAQMKEHENDPEMLVDLQYSLAKSYASTPELRKTWLDSMARIHVKNGDLSEAAMCYVHVTALVAEYLTRKGVFRQGCTAFRVITPNIDEEASMMEDVGMQDVHFNEDVLMELLEQCADGLWKAERYELIADIYKLIIPIYEKRRDFERLAHLYDTLHRAYSKVTEVMHSGRRLLGTYFRVAFFGQQYQFTDSETDVEGFFEDEDGKEYIYKEPKLTPLSEISQRLLKLYSDKFGSENVKMIQDSGKVNPKDLDSKYAYIQVTHVIPFFDEKELQERKTEFERSHNIRRFMFEMPFTQTGKRQGGVEEQCKRRTILTAIHCFPYVKKRIPVMYQHHTDLNPIEVAIDEMSKKVAELRQLCSSAEVDMIKLQLKLQGSVSVQVNAGPLAYARAFLDDTNTKRYPDNKVKLLKEVFRQFVEACGQALAVNERLIKEDQLEYQEEMKANYREMAKELSEIMHEQICPLEEKTSVLPNSLHIFNAISGTPTSTMVHGMTSSSSVV

SEQ ID NO: 12387 - protein, 522 aa, Homo sapiens [sequence omitted]

SEQ ID NO: 12388 - protein, 559 aa, Homo sapiens
MRTTKVYKLVIHKKGFGGSDDELVVNPKVFPHIKLGDIVEIAHPNDEYSPLLLQVKSLKEDLQKETISVDQTVTQVFRLRPYQDVYVNVVDPKDVTLDLVELTFKDQYIGRGDMWRLKKSLVSTCAYITQKVEFAGIRAQAGELWVKNEKVMCGYISEDTRVVFRSTSAMVYIFIQMSCEMWDFDIYGDLYFEKAVNGFLADLFTKWKEKNCSHEVTVVLFSRTFYDAKSVDEFPEINRASIRQDHKGRFYEDFYKVVVQNERREEWTSLLVTIKKLFIQYPVLVRLEQAEGFPQGDNSTSAQGNYLEAINLSFNVFDKHYINRNFDRTGQMSVVITPGVGVFEVDRLLMILTKQRMIDNGIGVDLVCMGEQPLHAVPLFKLHNRSAPRDSRLGDDYNIPHWINHSFYTSKSQLFCNSFTPRIKLAGKKPASEKAKNGRDTSLGSPKESENALPIQVDYDAYDAQVFRLPGPSRAQCLTTCRSVRERESHSRKSASSCDVSSSPSLPSRTLPTEEVRSQASDDSSLGKSANILMIPHPHLHQYEVSSSLGYTSTREHLG

SEQ ID NO: 12389 - protein, 1343 aa, Homo sapiens
MRTTKVYKLVIHKKGFGGSDDELVVNPKVFPHIKLGDIVEIAHPNDEYSPLLLQVKSLKEDLQKETISVDQTVTQVFRLRPYQDVYVNVVDPKDVTLDLVELTFKDQYIGRGDMWRLKKSLVSTCAYITQKVEFAGIRAQAGELWVKNEKVMCGYISEDTRVVFRSTSAMVYIFIQMSCEMWDFDIYGDLYFEKAVNGFLADLFTKWKEKNCSHEVTVVLFSRTFYDAKSVDEFPEINRASIRQDHKGRFYEDFYKVVVQNERREEWTSLLVTIKKLFIQYPVLVRLEQAEGFPQGDNSTSAQGNYLEAINLSFNVFDKHYINRNFDRTGQMSVVITPGVGVFEVDRLLMILTKQRMIDNGIGVDLVCMGEQPLHAVPLFKLHNRSAPRDSRLGDDYNIPHWINHSFYTSKSQLFCNSFTPRIKLAGKKPASEKAKNGRDTSLGSPKESENALPIQVDYDAYDAQVFRLPGPSRAQCLTTCRSVRERESHSRKSASSCDVSSSPSLPSRTLPTEEVRSQASDDSSLGKSANILMIPHPHLHQYEVSSSLGYTSTRDVLENMMEPPQRDSSAPGRFHVGSAESMLHVRPGGYTPQRALINPFAPSRMPMKLTSNRRRWMHTFPVGMNPRTQNKDSLEDSVSTSPDPILTLSAPPVVPGFCCTVGVDWKSLTTPACLPLTTDYFPDRQGLQNDYTEGCYDLLPEADIDRRDEDGVQMTAQQVFEEFICQRLMQGYQIIVQPKTQKPNPAVPPPLSSSPLYSRGLVSRNRPEEEDQYWLSMGRTFHKVTLKDKMITVTRYLPKYPYESAQIHYTYSLCPSHSDSEFVSCWVEFSHERLEEYKWNYLDQYICSAGSEDFSLIESLKFWRTRFLLLPACVTATKRITEGEAHCDIYGDRPRADEDEWQLLDGFVRFVEGLNRIRRRHRSDRMMRKGTAMKGLQMTGPISTHSLESTAPPVGKKGTSALSALLEMEASQKCLGEQQAAVHGGKSSAQSAESSSVAMTPTYMDSPRKVSVDQTATPMLDGTSLGICTGQSMDRGNSQTFGNSQNIGEQGYSSTNSSDSSSQQLVASSLTSSSTLTEILEAMKHPSTGVQLLSEQKGLSPYCFISAEVVHWLVNHVEGIQTQAMAIDIMQKMLEEQLITHASGEAWRTFIYGFYFYKIVTDKEPDRVAMQQPATTWHTAGVDDFASFQRKWFEVAFVAEELVHSEIPAFLLPWLPSRPASYASRHSSFSRSFGGRSQAAALLAATVPEQRTVTLDVDVNNRTDRLEWCSCYYHGNFSLNAAFEIKLHWMAVTAAVLFEMFILACICNQAIHCSYTKKPYLTIPHRSAHSLAKLSVSSRTAP

SEQ ID NO: 12390 - protein, 1572 aa, Homo sapiens
MRTTKVYKLVIHKKGFGGSDDELVVNPKVFPHIKLGDIVEIAHPNDEYSPLLLQVKSLKEDLQKETISVDQTVTQVFRLRPYQDVYVNVVDPKDVTLDLVELTFKDQYIGRGDMWRLKKSLVSTCAYITQKVEFAGIRAQAGELWVKNEKVMCGYISEDTRVVFRSTSAMVYIFIQMSCEMWDFDIYGDLYFEKAVNGFLADLFTKWKEKNCSHEVTVVLFSRTFYDAKSVDEFPEINRASIRQDHKGRFYEDFYKVVVQNERREEWTSLLVTIKKLFIQYPVLVRLEQAEGFPQGDNSTSAQGNYLEAINLSFNVFDKHYINRNFDRTGQMSVVITPGVGVFEVDRLLMILTKQRMIDNGIGVDLVCMGEQPLHAVPLFKLHNRSAPRDSRLGDDYNIPHWINHSFYTSKSQLFCNSFTPRIKLAGKKPASEKAKNGRDTSLGSPKESENALPIQVDYDAYDAQVFRLPGPSRAQCLTTCRSVRERESHSRKSASSCDVSSSPSLPSRTLPTEEVRSQASDDSSLGKSANILMIPHPHLHQYEVSSSLGYTSTRDVLENMMEPPQRDSSAPGRFHVGSAESMLHVRPGGYTPQRALINPFAPSRMPMKLTSNRRRWMHTFPVGPSGEAIQIHHQTRQNMAELQGSGQRDPTHSSAELLELAYHEAAGRHSNSRQPGDGMSFLNFSGTEELSVGLLSNSGAGMNPRTQNKDSLEDSVSTSPDPMPGFCCTVGVDWKSLTTPACLPLTTDYFPDRQGLQNDYTEGCYDLLPEADIDRRDEDGVQMTAQQVFEEFICQRLMQGYQIIVQPKTQKPNPAVPPPLSSSPLYSRGLVSRNRPEEEDQYWLSMGRTFHKVTLKDKMITVTRYLPKYPYESAQIHYTYSLCPSHSDSEFVSCWVEFSHERLEEYKWNYLDQYICSAGSEDFSLIESLKFWRTRFLLLPACVTATKRITEGEAHCDIYGDRPRADEDEWQLLDGFVRFVEGLNRIRRRHRSDRMMRKGTAMKGLQMTGPISTHSLESTAPPVGKKGTSALSALLEMEASQKCLGEQQAAVHGGKSSAQSAESSSVAMTPTYMDSPRKVSVDQTATPMLDGTSLGICTGQSMDRGNSQTFGNSQNIGEQGYSSTNSSDSSSQQLVASSLTSSSTLTEILEAMKHPSTGVQLLSEQKGLSPYCFISAEVVHWLVNHVEGIQTQAMAIDIMQKMLEEQLITHASGEAWRTFIYGFYFYKIVTDKEPDRVAMQQPATTWHTAGVDDFASFQRKWFEVAFVAEELVHSEIPAFLLPWLPSRPASYASRHSSFSRSFGGRSQAAALLAATVPEQRTVTLDVDVNNRTDRLEWCSCYYHGNFSLNAAFEIKLHWMAVTAAVLFEMVQGWHRKATSCGFLLVPVLEGPFALPSYLYGDPLRAQLFIPLNISCLLKEGSEHLFDSFEPETYWDRMHLFQEAIAHRFGFVQDKYSASAFNFPAENKPQYIHVTGTVFLQLPYSKRKFSGQQRRRRNSTSSTNQNMFCEERVGYNWAYNTMLTKTWRSSATGDEKFADRLLKDFTDFCINRDNRLVTFWTSCLEKMHASAP

SEQ ID NO: 12391 - protein, 1581 aa, Homo sapiens
MRTTKVYKLVIHKKGFGGSDDELVVNPKVFPHIKLGDIVEIAHPNDEYSPLLLQVKSLKEDLQKETISVDQTVTQVFRLRPYQDVYVNVVDPKDVTLDLVELTFKDQYIGRGDMWRLKKSLVSTCAYITQKVEFAGIRAQAGELWVKNEKVMCGYISEDTRVVFRSTSAMVYIFIQMSCEMWDFDIYGDLYFEKAVNGFLADLFTKWKEKNCSHEVTVVLFSRTFYDAKSVDEFPEINRASIRQDHKGRFYEDFYKVVVQNERREEWTSLLVTIKKLFIQYPVLVRLEQAEGFPQGDNSTSAQGNYLEAINLSFNVFDKHYINRNFDRTGQMSVVITPGVGVFEVDRLLMILTKQRMIDNGIGVDLVCMGEQPLHAVPLFKLHNRSAPRDSRLGDDYNIPHWINHSFYTSKSQLFCNSFTPRIKLAGKKPASEKAKNGRDTSLGSPKESENALPIQVDYDAYDAQVFRLPGPSRAQCLTTCRSVRERESHSRKSASSCDVSSSPSLPSRTLPTEEVRSQASDDSSLGKSANILMIPHPHLHQYEVSSSLGYTSTRDVLENMMEPPQRDSSAPGRFHVGSAESMLHVRPGGYTPQRALINPFAPSRMPMKLTSNRRRWMHTFPVGPSGEAIQIHHQTRQNMAELQGSGQRDPTHSSAELLELAYHEAAGRHSNSRQPGDGMSFLNFSGTEELSVGLLSNSGAGMNPRTQNKDSLEDSVSTSPDPILTLSAPPVVPGFCCTVGVDWKSLTTPACLPLTTDYFPDRQGLQNDYTEGCYDLLPEADIDRRDEDGVQMTAQQVFEEFICQRLMQGYQIIVQPKTQKPNPAVPPPLSSSPLYSRGLVSRNRPEEEDQYWLSMGRTFHKVTLKDKMITVTRYLPKYPYESAQIHYTYSLCPSHSDSEFVSCWVEFSHERLEEYKWNYLDQYICSAGSEDFSLIESLKFWRTRFLLLPACVTATKRITEGEAHCDIYGDRPRADEDEWQLLDGFVRFVEGLNRIRRRHRSDRMMRKGTAMKGLQMTGPISTHSLESTAPPVGKKGTSALSALLEMEASQKCLGEQQAAVHGGKSSAQSAESSSVAMTPTYMDSPRKVSVDQTATPMLDGTSLGICTGQSMDRGNSQTFGNSQNIGEQGYSSTNSSDSSSQQLVASSLTSSSTLTEILEAMKHPSTGVQLLSEQKGLSPYCFISAEVVHWLVNHVEGIQTQAMAIDIMQKMLEEQLITHASGEAWRTFIYGFYFYKIVTDKEPDRVAMQQPATTWHTAGVDDFASFQRKWFEVAFVAEELVHSEIPAFLLPWLPSRPASYASRHSSFSRSFGGRSQAAALLAATVPEQRTVTLDVDVNNRTDRLEWCSCYYHGNFSLNAAFEIKLHWMAVTAAVLFEMVQGWHRKATSCGFLLVPVLEGPFALPSYLYGDPLRAQLFIPLNISCLLKEGSEHLFDSFEPETYWDRMHLFQEAIAHRFGFVQDKYSASAFNFPAENKPQYIHVTGTVFLQLPYSKRKFSGQQRRRRNSTSSTNQNMFCEERVGYNWAYNTMLTKTWRSSATGDEKFADRLLKDFTDFCINRDNRLVTFWTSCLEKMHASAP

SEQ ID NO: 12392 - protein, 742 aa, Homo sapiens
MKDDFAEEEEVQSFGYKRFGIQEGTQCTKCKNNWALKFSIILLYILCALLTITVAILGYKVVEKMDNVTGGMETSRQTYDDKLTAVESDLKKLGDQTGKKAISTNSELSTFRSDILDLRQQLREITEKTSKNKDTLEKLQASGDALVDRQSQLKETLENNSFLITTVNKTLQAYNGYVTNLQQDTSVLQGNLQNQMYSHNVVIMNLNNLNLTQVQQRNLITNLQRSVDDTSQAIQRIKNDFQNLQQVFLQAKKDTDWLKEKVQSLQTLAANNSALAKANNDTLEDMNSQLNSFTGQMENITTISQANEQNLKDLQDLHKDAENRTAIKFNQLEERFQLFETDIVNIISNISYTAHHLRTLTSNLNEVRTTCTDTLTKHTDDLTSLNNTLANIRLDSVSLRMQQDLMRSRLDTEVANLSVIMEEMKLVDSKHGQLIKNFTILQGPPGPRGPRGDRGSQGPPGPTGNKGQKGEKGEPGPPGPAGERGPIGPAGPPGERGGKGSKGSQGPKGSRGSPGKPGPQGSSGDPGPPGPPGKEGLPGPQGPPGFQGLQGTVGEPGVPGPRGLPGLPGVPGMPGPKGPPGPPGPSGAVVPLALQNEPTPAPEDNGCPPHWKNFTDKCYYFSVEKEIFEDAKLFCEDKSSHLVFINTREEQQWIKKQMVGRESHWIGLTDSERENEWKWLDGTSPDYKNWKAGQPDNWGHGHGPGEDCAGLIYAGQWNDFQCEDVNNFICEKDRETVLSSAL

SEQ ID NO: 12393 - protein, 1567 aa, Homo sapiens
MADRGCPLEAAPLPAEVRESLAELELELSEGDITQKGYEKKRAKLLARYIPLIQGIDPSLQAENRIPGPSQTTAAAPKQQKSRPTASRDERFRSDVHTEAVQAALAKYKERKMPMPSKRRSVLVHSSVETYTPPDTSSASEDEGSLRRPGRLTSTPLQSHSSVEPWLDRVIQGSSTSSSASSTSSHPGGRPTTAPSAAATPGAAATTALAGLEAHTHIDLHSAPPDVTTGLVEHSYFERPQVASVRSVPRGCSGSMLETADGVPVNSRVSSKIQQLLNTLKRPKRPPLKEFFVDDFEELLEDPNQPKPEGSETSVLRGEPLTAGVPRPPSLLATLQRWGTTQPKSPCLTALDTTGKAVYTLTYGKLWSRSLKLAYTLLNKLTSKNEPLLKPGDRVALVFPNSDPVMFMVAFYGCLLAELVPVPIEVPLTRKDAGSQQVGFLLGSCGVFLALTTDACQKGLPKAQTGEVAAFKGWPPLSWLVIDGKHLAKPPKDWHPLAQDTGTGTAYIEYKTSKEGSTVGVTVSHASLLAQCRALTQACGYSEAETLTNVLDFKRDAGLWHGVLTSVMNRMHVVSVPYALMKANPLSWIQKVCFYKARAALVKSRDMHWSLLAQRGQRDVSLSSLRMLIVADGANPWSISSCDAFLNVFQSRGLRPEVICPCASSPEALTVAIRRPPDLGGPPPRKAVLSMNGLSYGVIRVDTEEKLSVLTVQDVGQVMPGANVCVVKLEGTPYLCKTDEVGEICVSSSATGTAYYGLLGITKNVFEAVPVTTGGAPIFDRPFTRTGLLGFIGPDNLVFIVGKLDGLMVTGVRRHNADDVVATALAVEPMKFVYRGRIAVFSVTVLHDDRIVLVAEQRPDASEEDSFQWMSRVLQAIDSIHQVGVYCLALVPANTLPKAPLGGIHISETKQRFLEGTLHPCNVLMCPHTCVTNLPKPRQKQPEVGPASMIVGNLVAGKRIAQASGRELAHLEDSDQARKFLFLADVLQWRAHTTPDHPLFLLLNAKGTVTSTATCVQLHKRAERVAAALMEKGRLSVGDHVALVYPPGVDLIAAFYGCLYCGCVPVTVRPPHPQNLGTTLPTVKMIVEVSKSACVLTTQAVTRLLRSKEAAAAVDIRTWPTILDTDDIPKKKIASVFRPPSPDVLAYLDFSVSTTGILAGVKMSHAATSALCRSIKLQCELYPSRQIAICLDPYCGLGFALWCLCSVYSGHQSVLVPPLELESNVSLWLSAVSQYKARVTFCSYSVMEMCTKGLGAQTGVLRMKGVNLSCVRTCMVVAEERPRIALTQSFSKLFKDLGLPARAVSTTFGCRVNVAICLQGTAGPDPTTVYVDMRALRHDRVRLVERGSPHSLPLMESGKILPGVKVIIAHTETKGPLGDSHLGEIWVSSPHNATGYYTVYGEEALHADHFSARLSFGDTQTIWARTGYLGFLRRTELTDASGGRHDALYVVGSLDETLELRGMRYHPIDIETSVIRAHRSIAECAVFTWTNLLVVVVELDGLEQDALDLVALVTNVVLEEHYLVVGVVVIVDPGVIPINSRGEKQRMHLRDGFLADQLDPIYVAYNM

SEQ ID NO: 12394 - protein, 1242 aa, Homo sapiens
MKNLLTEKCISSHNFHQKVIKQRMEKKVDSRYFKDGAVKKPYSAKTLSNKKSSASFGIRRELPSTSHLVQYRGTHTCTRQGRLRELRIRCVARKFLYLWIRMTFGRVFPSKARFYYEQRLLRKVFEEWKEEWWVFQHEWKLCVRADCHYRYYLYNLMFQTWKTYVRQQQEMRNKYIRAEVHDAKQKMRQAWKSWLIYVVVRRTKLQMQTTALEFRQRIILRVWWSTWRQRLGQVRVSRALHASALKHRALSLQVQAWSQWREQLLYVQKEKQKVVSAVKHHQHWQKRRFLKAWLEYLQVRRVKRQQNEMAERFHHVTVLQIYFCDWQQAWERRESLYAHHAQVEKLARKMALRRAFTHWKHYMLLCAEEAAQFEMAEEHHRHSQLYFCFRALKDNVTHAHLQQIRRNLAHQQHGVTLLHRFWNLWRSQIEQKKERELLPLLHAAWDHYRIALLCKCIELWLQYTQKRRYKQLLQARADGHFQQRALPAAFHTWNRLWRWRHQENVLSARATRFHRETLEKQVFSLWRQKMFQHRENRLAERMAILHAERQLLYRSWFMWHQQAAARHQEQEWQTVACAHHRHGRLKKAFCLWRESAQGLRTERTGRVRAAEFHMAQLLRWAWSQWRECLALRGAERQKLMRADLHHQHSVLHRALQAWVTYQGRVRSILREVAARESQHNRQLLRGALRRWKENTMARVDEAKKTFQASTHYRRTICSKVLVQWREAVSVQMYYRQQEDCAIWEAQKVLDRGCLRTWFQRWWDCSRRSAQQRLQLERAVQHHHRQLLLEGLARWKTHHLQCVRKRLLHRQSTQLLAQRLSRTCFRQWRQQLAARRQEQRATVRALWFWAFSLQAKVWATWLAFVLERRRKKARLQWALQAYQGQLLQEGATRLLRFAASMKASRQQLQAQQQVQAAHSLHRAVRRCATLWKQKVLGRGGKPQPLAAIAPSRKVTFEGPLLNRIAAGAGDGTLETKRPQASRPLGALGRLAAEEPHALELNTAHSARKQPRRPHFLLEPAQSQRPQKPQEHGLGMAQPAAPSLTRPFLAEAPTALVPHSPLPGALSSAPGPKQPPTASTGPELLLLPLSSFMPCGAAAPARVSAQRATPRDKPPVPSSLASVPDPHLLLPGDFSATRAGPGLSTAGSLDLEAELEEIQQQLLHYQTTKQNLWSCRRQASSLRRWLELNREEPGPEDQEVEQQVQKELEQVEMQIQLLAEELQAQRQPIGACVARIQALRQALC

SEQ ID NO: 12395 - protein, 1160 aa, Homo sapiens
MKNLLTEKCISSHNFHQKVIKQRMEKKVDSRFYYEQRLLRKVFEEWKEEWWVFQHEWKLCVRADCHYRYYLYNLMFQTWKTYVRQQQEMRNKYIRAEVHDAKQKMRQAWKSWLIYVVVRRTKLQMQTTALEFRQRIILRVWWSTWRQRLGQVRVSRALHASALKHRALSLQVQAWSQWREQLLYVQKEKQKVVSAVKHHQHWQKRRFLKAWLEYLQVRRVKRQQNEMAERFHHVTVLQIYFCDWQQAWERRESLYAHHAQVEKLARKMALRRAFTHWKHYMLLCAEEAAQFEMAEEHHRHSQLYFCFRALKDNVTHAHLQQIRRNLAHQQHGVTLLHRFWNLWRSQIEQKKERELLPLLHAAWDHYRIALLCKCIELWLQYTQKRRYKQLLQARADGHFQQRALPAAFHTWNRLWRWRHQENVLSARATRFHRETLEKQVFSLWRQKMFQHRENRLAERMAILHAERQLLYRSWFMWHQQAAARHQEQEWQTVACAHHRHGRLKKAFCLWRESAQGLRTERTGRVRAAEFHMAQLLRWAWSQWRECLALRGAERQKLMRADLHHQHSVLHRALQAWVTYQGRVRSILREVAARESQHNRQLLRGALRRWKENTMARVDEAKKTFQASTHYRRTICSKVLVQWREAVSVQMYYRQQEDCAIWEAQKVLDRGCLRTWFQRWWDCSRRSAQQRLQLERAVQHHHRQLLLEGLARWKTHHLQCVRKRLLHRQSTQLLAQRLSRTCFRQWRQQLAARRQEQRATVRALWFWAFSLQAKVWATWLAFVLERRRKKARLQWALQAYQGQLLQEGATRLLRFAASMKASRQQLQAQQQVQAAHSLHRAVRRCATLWKQKVLGRGGKPQPLAAIAPSRKVTFEGPLLNRIAAGAGDGTLETKRPQASRPLGALGRLAAEEPHALELNTAHSARKQPRRPHFLLEPAQSQRPQKPQEHGLGMAQPAAPSLTRPFLAEAPTALVPHSPLPGALSSAPGPKQPPTASTGPELLLLPLSSFMPCGAAAPARVSAQRATPRDKPPVPSSLASVPDPHLLLPGDFSATRAGPGLSTAGSLDLEAELEEIQQQLLHYQTTKQNLWSCRRQASSLRRWLELNREEPGPEDQEVEQQVQKELEQVEMQIQLLAEELQAQRQPIGACVARIQALRQALC

SEQ ID NO: 12396 - protein, 639 aa, Homo sapiens
MALPRLGTQSTGPGRCLSPNLQAQEAPAPVTTSSSTSTLSSSPWSAQPTWKSDPGFRITVVTWNVGTAMPPDDVTSLLHLGGGDDSDGADMIAIGLQEVNSMLNKRLKDALFTDQWSELFMDALGPFNFVLVSSVRMQGVILLLFAKYYHLPFLRDVQTDCTRTGLGGYWGNKGGVSVRLAAFGHMLCFLNCHLPAHMDKAEQRKDNFQTILSLQQFQGPGAQGILDHDLVFWFGDLNFRIESYDLHFVKFAIDSDQLHQLWEKDQLNMAKNTWPILKGFQEGPLNFAPTFKFDVGTNKYDTSAKKRKPAWTDRILWKVKAPGGGPSPSGRKSHRLQVTQHSYRSHMEYTVSDHKPVAAQFLLQFAFRDDMPLVRLEVADEWVRPEQAVVRYRMETVFARSSWDWIGLYRVGFRHCKDYVAYVWAKHEDVDGNTYQVTFSEESLPKGHGDFILGYYSHNHSILIGITEPFQISLPSSELASSSTDSSGTSSEGEDDSTLELLAPKSRSPSPGKSKRHRSRSPGLARFPGLALRPSSRERRGASRSPSPQSRRLSRVAPDRSSNGSSRGSSEEGPSGLPGPWAFPPAVPRSLGLLPALRLETVDPGGGGSWGPDREALAPNSLSPSPQGHRGLEEGGLGP

SEQ ID NO: 12397 - protein, 983 aa, Homo sapiens
MAPRLQLEKAAWRWAETVRPEEVSQEHIETAYRIWLEPCIRGVCRRNCKGNPNCLVGIGEHIWLGEIDENSFHNIDDPNCERRKKNSFVGLTNLGATCYVNTFLQVWFLNLELRQALYLCPSTCSDYMLGDGIQEEKDYEPQTICEHLQYLFALLQNSNRRYIDPSGFVKALGLDTGQQQDAQEFSKLFMSLLEDTLSKQKNPDVRNIVQQQFCGEYAYVTVCNQCGRESKLLSKFYELELNIQGHKQLTDCISEFLKEEKLEGDNRYFCENCQSKQNATRKIRLLSLPCTLNLQLMRFVFDRQTGHKKKLNTYIGFSEILDMEPYVEHKGGSYVYELSAVLIHRGVSAYSGHYIAHVKDPQSGEWYKFNDEDIEKMEGKKLQLGIEEDLAEPSKSQTRKPKCGKGTHCSRNAYMLVYRLQTQEKPNTTVQVPAFLQELVDRDNSKFEEWCIEMAEMRKQSVDKGKAKHEEVKELYQRLPAGAEPYEFVSLEWLQKWLDESTPTKPIDNHACLCSHDKLHPDKISIMKRISEYAADIFYSRYGGGPRLTVKALCKECVVERCRILRLKNQLNEDYKTVNNLLKAAVKGSDGFWVGKSSLRSWRQLALEQLDEQDGDAEQSNGKMNGSTLNKDESKEERKEEEELNFNEDILCPHGELCISENERRLVSKEAWSKLQQYFPKAPEFPSYKECCSQCKILEREGEENEALHKMIANEQKTSLPNLFQDKNRPCLSNWPEDTDVLYIVSQFFVEEWRKFVRKPTRCSPVSSVGNSALLCPHGGLMFTFASMTKEDSKLIALIWPSEWQMIQKLFVVDHVIKITRIEVGDVNPSETQYISEPKLCPECREGLLCQQQRDLREYTQATIYVHKVVDNKKVMKDSAPELNVSSSETEEDKEEAKPDGEKDPDFNQIMHAFSVAPFDQNLSIDGKILSDDCATLGTLGVIPESVILLKADEPIADYAAMDDVMQVCMPEEGFKGTGLLGH

SEQ ID NO: 12398 - protein, 361 aa, Homo sapiens
MESKVSEGGLNVTLTIRLLMHGKEVGSIIGKKGETVKKMREESGARINISEGNCPERIVTITGPTDAIFKAFAMIAYKFEEDIINSMSNSPATSKPPVTLRLVVPASQCGSLIGKGGSKIKEIRESTGAQVQVAGDMLPNSTERAVTISGTPDAIIQCVKQICVVMLESPPKGATIPYRPKPASTPVIFAGGQVRADPLAASTANLSLLLQHPPLPAYTIQGQYAIPHPDLTKLHQLAMQQTPFPPLGQTNPAFPGEKLPLHSSEEAQNLMGQSSGLDASPPASTHELTIPNDLIGCIIGRQGTKINEIRQMSGAQIKIANATEGSSERQITITGTPANISLAQYLINARLTSEVTGMGTL

SEQ ID NO: 12399 - protein, 1123 aa, Homo sapiens
MERHQPRLHHPAQGSAAGTPYPSSASLRGCRESKMPRRKGPQHPPPPSGPEEPGEKRPKFEDMNLNEDKKAPLREKDFSIKKEMVMQYINTASKTGSLKRSRQISPQEFIHELKMGSADERLVTCLESLRVSLTSNPVSWVESFGHEGLGLLLDILEKLISGKIQEKVVKKNQHKVIQCLKALMNTQYGLERIMSEERSLSLLAKAVDPRHPNMMTDVVKLLSAVCIVGEESILEEVLEALTSAGEEKKIDRFFCIVEGLRHNSVQLQVACMQLINALVTSPDDLDFRLHIRNEFMRCGLKEILPNLKCIKNDGLDIQLKVFDEHKEEDLFELSHRLEDIRAELDEAYDVYNMVWSTVKETRAEGYFISILQHLLLIRNDYFIRQQYFKLIDECVSQIVLHRDGMDPDFTYRKRLDLDLTQFVDICIDQAKLEEFEEKASELYKKFEKEFTDHQETQAELQKKEAKINELQAELQAFKSQFGALPADCNIPLPPSKEGGTGHSALPPPPPLPSGGGVPPPPPPPPPPPLPGMRMPFSGPVPPPPPLGFLGGQNSPPLPILPFGLKPKKEFKPEISMRRLNWLKIRPHEMTENCFWIKVNENKYENVDLLCKLENTFCCQQKERREEEDIEEKKSIKKKIKELKFLDSKIAQNLSIFLSSFRVPYEEIRMMILEVDETRLAESMIQNLIKHLPDQEQLNSLSQFKSEYSNLCEPEQFVVVMSNVKRLRPRLSAILFKLQFEEQVNNIKPDIMAVSTACEEIKKSKSFSKLLELVLLMGNYMNAGSRNAQTFGFNLSSLCKLKDTKSADQKTTLLHFLVEICEEKYPDILNFVDDLEPLDKASKVSVETLEKNLRQMGRQLQQLEKELETFPPPEDLHDKFVTKMSRFVISAKEQYETLSKLHENMEKLYQSIIGYYAIDVKKVSVEDFLTDLNNFRTTFMQAIKENIKKREAEEKEKRVRIAKELAERERLERQQKKKRLLEMKTEGDETGVMDNLLEALQSGAAFRDRRKRTPMPKDVRQSLSPMSQRPVLKVCNHENQKVQLTEGSRSHYNINCNSTRTPVAKELNYNLDTHTSTGRIKAAEKKEACNVESNRKKETELLGSFSKNESVPEVEALLARLRAL

SEQ ID NO: 12400 - protein, 1147 aa, Homo sapiens
MERHQPRLHHPAQGSAAGTPYPSSASLRGCRESKMPRRKGPQHPPPPSGPEEPGEKRPKFLDKFASIRIPGSKKERPPLPNLKTAFASSDCSAAPLEMMENFPKPLSENELLELFEKMMGSLKRSRQISPQEFIHELKMGSADERLVTCLESLRVSLTSNPVSWVESFGHEGLGLLLDILEKLISGKIQEKVVKKNQHKVIQCLKALMNTQYGLERIMSEERSLSLLAKAVDPRHPNMMTDVVKLLSAVCIVGEESILEEVLEALTSAGEEKKIDRFFCIVEGLRHNSVQLQVACMQLINALVTSPDDLDFRLHIRNEFMRCGLKEILPNLKCIKNDGLDIQLKVFDEHKEEDLFELSHRLEDIRAELDEAYDVYNMVWSTVKETRAEGYFISILQHLLLIRNDYFIRQQYFKLIDECVSQIVLHRDGMDPDFTYRKRLDLDLTQFVDICIDQAKLEEFEEKASELYKKFEKEFTDHQETQAELQKKEAKINELQAELQAFKSQFGALPADCNIPLPPSKEGGTGHSALPPPPPLPSGGGVPPPPPPPPPPPLPGMRMPFSGPVPPPPPLGFLGGQNSPPLPILPFGLKPKKEFKPEISMRRLNWLKIRPHEMTENCFWIKVNENKYENVDLLCKLENTFCCQQKERREEEDIEEKKSIKKKIKELKFLDSKIAQNLSIFLSSFRVPYEEIRMMILEVDETRLAESMIQNLIKHLPDQEQLNSLSQFKSEYSNLCEPEQFVVVMSNVKRLRPRLSAILFKLQFEEQVNNIKPDIMAVSTACEEIKKSKSFSKLLELVLLMGNYMNAGSRNAQTFGFNLSSLCKLKDTKSADQKTTLLHFLVEICEEKYPDILNFVDDLEPLDKASKVSVETLEKNLRQMGRQLQQLEKELETFPPPEDLHDKFVTKMSRFVISAKEQYETLSKLHENMEKLYQSIIGYYAIDVKKVSVEDFLTDLNNFRTTFMQAIKENIKKREAEEKEKRVRIAKELAERERLERQQKKKRLLEMKTEGDETGVMDNLLEALQSGAAFRDRRKRTPMPKDVRQSLSPMSQRPVLKVCNHENQKVQLTEGSRSHYNINCNSTRTPVAKELNYNLDTHTSTGRIKAAEKKEACNVESNRKKETELLGSFSKNESVPEVEALLARLRAL

SEQ ID NO: 12401 - protein, 1193 aa, Homo sapiens
MERHQPRLHHPAQGSAAGTPYPSSASLRGCRESKMPRRKGPQHPPPPSGPEEPGEKRPKFHLNIRTLTDDMLDKFASIRIPGSKKERPPLPNLKTAFASSDCSAAPLEMMENFPKPLSENELLELFEKMMEDMNLNEDKKAPLREKDFSIKKEMVMQYINTASKTGSLKRSRQISPQEFIHELKMGSADERLVTCLESLRVSLTSNPVSWVESFGHEGLGLLLDILEKLISGKIQEKVVKKNQHKVIQCLKALMNTQYGLERIMSEERSLSLLAKAVDPRHPNMMTDVVKLLSAVCIVGEESILEEVLEALTSAGEEKKIDRFFCIVEGLRHNSVQLQVACMQLINALVTSPDDLDFRLHIRNEFMRCGLKEILPNLKCIKNDGLDIQLKVFDEHKEEDLFELSHRLEDIRAELDEAYDVYNMVWSTVKETRAEGYFISILQHLLLIRNDYFIRQQYFKLIDECVSQIVLHRDGMDPDFTYRKRLDLDLTQFVDICIDQAKLEEFEEKASELYKKFEKEFTDHQETQAELQKKEAKINELQAELQAFKSQFGALPADCNIPLPPSKEGGTGHSALPPPPPLPSGGGVPPPPPPPPPPPLPGMRMPFSGPVPPPPPLGFLGGQNSPPLPILPFGLKPKKEFKPEISMRRLNWLKIRPHEMTENCFWIKVNENKYENVDLLCKLENTFCCQQKERREEEDIEEKKSIKKKIKELKFLDSKIAQNLSIFLSSFRVPYEEIRMMILEVDETRLAESMIQNLIKHLPDQEQLNSLSQFKSEYSNLCEPEQFVVVMSNVKRLRPRLSAILFKLQFEEQVNNIKPDIMAVSTACEEIKKSKSFSKLLELVLLMGNYMNAGSRNAQTFGFNLSSLCKLKDTKSADQKTTLLHFLVEICEEKYPDILNFVDDLEPLDKASKVSVETLEKNLRQMGRQLQQLEKELETFPPPEDLHDKFVTKMSRFVISAKEQYETLSKLHENMEKLYQSIIGYYAIDVKKVSVEDFLTDLNNFRTTFMQAIKENIKKREAEEKEKRVRIAKELAERERLERQQKKKRLLEMKTEGDETGVMDNLLEALQSGAAFRDRRKRTPMPKDVRQSLSPMSQRPVLKVCNHENQKVQLTEGSRSHYNINCNSTRTPVAKELNYNLDTHTSTGRIKAAEKKEACNVESNRKKETELLGSFSKNESVPEVEALLARLRAL

SEQ ID NO: 12402 - protein, 1093 aa, Homo sapiens
MASAPAEAETRQRLLRTVKKEVKQIMEEAVTRKFVHEDSSHIISFCAAVEACVLHGLRRRAAGFLRSNKIAALFMKVGKNFPPAEDLSRKVQDLEQLIESARNQIQGLQENVRKLPKLPNLSPLAIKHLWIRTALFEKVLDKIVHYLVENSSKYYEKEALLMDPVDGPILASLLVGPCALEYTKMKTADHFWTDPSADELVQRHRIHSSHVRQDSPTKRPALCIQKRHSSGSMDDRPSLSARDYVESLHQNSRATLLYGKNNVLVQPRDDMEAVPGYLSLHQTADVMTLKWTPNQLMNGSVGDLDYEKSVYWDYAMTIRLEEIVYLHCHQQVDSGGTVVLVSQDGIQRPPFRFPKGGHLLQFLSCLENGLLPHGQLDPPLWSQRGKGKVFPKLRKRSPQGSAESTSSDKDDDEATDYVFRIIYPGMQSEFVPQDLMDVSVSNLPSLWQPSPRKSSCSSCSQSGSADGSSTNGCNHERAPLKLLCDNMKYQILSRAFYGWLAYCRHLSTVRTHLSALVNHMIVSPDLPCDAGQGLTARIWEQYLHDSTSYEEQELLRLIYYGGIQPEIRKAVWPFLLGHYQFGMTETERKEVDEQIHACYAQTMAEWLGCEAIVRQRERESHAAALAKCSSGASLDSHLHRMLHRDSTISNESSQSCSSGRQNIRLHSDSSSSTQVFESVDEVEQVEAEGRLEEKQPKIPNGNLVNGTCSPDSGHPSSHNFSSGLSEHSEPSLSTEDSVLDAQRNTPTVLRPRDGSVDDRQSSEATTSQDEAPREELAVQDSLESDLLANESMDEFMSITGSLDMALPEKDDVVMEGWRSSETEKHGQADSEDNLSEEPEMESLFPALASLAVTTSANEVSPVSSSGVTYSPELLDLYTVNLHRIEKDVQRCDRNYWYFTPANLEKLRNIMCSYIWQHIEIGYVQGMCDLLAPLLVILDDEALAFSCFTELMKRMNQNFPHGGAMDTHFANMRSLIQILDSELFELMHQNGDYTHFYFCYRWFLLDFKRELVYDDVFLVWETIWAAKHVSSAHYVLFIALALVEVYRDIILENNMDFTDIIKFFNEMAERHNTKQVLKLARDLVYKVQTLIENK

SEQ ID NO: 12403 - protein, 1148 aa, Homo sapiens
MASAPAEAETRQRLLRTVKKEVKQIMEEAVTRKFVHEDSSHIISFCAAVEACVLHGLRRRAAGFLRSNKIAALFMKVGKNFPPAEDLSRKVQDLEQLIESARNQIQGLQENVRKLPKLPNLSPLAIKHLWIRTALFEKVLDKIVHYLVENSSKYYEKEALLMDPVDGPILASLLVGPCALEYTKMKTADHFWTDPSADELVQRHRIHSSHVRQDSPTKRPALCIQKRHSSGSMDDRPSLSARDYVESLHQNSRATLLYGKNNVLVQPRDDMEAVPGYLSLHQTADVMTLKWTPNQLMNGSVGDLDYEKSVYWDYAMTIRLEEIVYLHCHQQVDSGGTVVLVSQDGIQRPPFRFPKGGHLLQFLSCLENGLLPHGQLDPPLWSQRGKGKVFPKLRKRSPQGSAESTSSDKDDDEATDYVFRIIYPGMQSEFVAPDFLGSTSSVSVGPAWMMVPAGRSMLVVARGSQWEPARWDTTLPTPSPKEQPPMPQDLMDVSVSNLPSLWQPSPRKSSCSSCSQSGSADGSSTNGCNHERAPLKLLCDNMKYQILSRAFYGWLAYCRHLSTVRTHLSALVNHMIVSPDLPCDAGQGLTARIWEQYLHDSTSYEEQELLRLIYYGGIQPEIRKAVWPFLLGHYQFGMTETERKEVDEQIHACYAQTMAEWLGCEAIVRQRERESHAAALAKCSSGASLDSHLHRMLHRDSTISNESSQSCSSGRQNIRLHSDSSSSTQVFESVDEVEQVEAEGRLEEKQPKIPNGNLVNGTCSPDSGHPSSHNFSSGLSEHSEPSLSTEDSVLDAQRNTPTVLRPRDGSVDDRQSSEATTSQDEAPREELAVQDSLESDLLANESMDEFMSITGSLDMALPEKDDVVMEGWRSSETEKHGQADSEDNLSEEPEMESLFPALASLAVTTSANEVSPVSSSGVTYSPELLDLYTVNLHRIEKDVQRCDRNYWYFTPANLEKLRNIMCSYIWQHIEIGYVQGMCDLLAPLLVILDDEALAFSCFTELMKRMNQNFPHGGAMDTHFANMRSLIQILDSELFELMHQNGDYTHFYFCYRWFLLDFKRELVYDDVFLVWETIWAAKHVSSAHYVLFIALALVEVYRDIILENNMDFTDIIKFFNEMAERHNTKQVLKLARDLVYKVQTLIENK

SEQ ID NO: 12404 - protein, 245 aa, Homo sapiens
MSVCSSDLSYGSRVCLPGSCDSCSDSWQVDDCPESCCEPPCCAPAPCLSLVCTPVSRVSSPCCRVTCEPSPCQSGCTSSCTPSCCQQSSCQPACCTSSPCQQACCVPVCCKTVCCKPVCCMPVCCGPSSSCCQQSSCQPACCISSPCQQSCCVPVCCKPICCVPVCSGASSLCCQQSSCQPACCTTSCCRPSSSVSLLCRPVCRPARRVPVPSCCVPTSSCQPSCGRLASCGSLLCRPTCSRLAC

SEQ ID NO: 12405 - protein, 1354 aa, Homo sapiens
MPEQERQITAREGASRKILSKLSLPTRAWEPAMKKSFAFDNVGYEGGLDGLGPSSQVATSTVRILGMTCQSCVKSIEDRISNLKGIISMKVSLEQGSATVKYVPSVVCLQQVCHQIGDMGFEASIAEGKAASWPSRSLPAQEAVVKLRVEGMTCQSCVSSIEGKVRKLQGVVRVKVSLSNQEAVITYQPYLIQPEDLRDHVNDMGFEAAIKSKVAPLSLGPIDIERLQSTNPKRPLSSANQNFNNSETLGHQGSHVVTLQLRIDGMHCMISQLEGVQQISVSLAEGTATVLYNPSVISPEELRAAIEDMGFEASVVSESCSTNPLGNHSAGNSMVQTTDGTPTSVQEVAPHTGRLPANHAPDILAKSPQSTRAVAPQKCFLQIKGMTCASCVSNIERNLQKEAGVLSVLVALMAGKAEIKYDPEVIQPLEIAQFIQDLGFEAAVMEDYAGSDGNIELTITGMTCASCVHNIESKLTRTNGITYASVALATSKALVKFDPEIIGPRDIIKIIEEIGFHASLAQRNPNAHHLDHKMEIKQWKKSFLCSLVFGIPVMALMIYMLIPSNEPHQSMVLDHNIIPGLSILNLIFFILCTFVQLLGGWYFYVQAYKSLRHRSANMDVLIVLATSIAYVYSLVILVVAVAEKAERSPVTFFDTPPMLFVFIALGRWLEHLAKSKTSEALAKLMSLQATEATVVTLGEDNLIIREEQVPMELVQRGDIVKVVPGGKFPVDGKVLEGNTMADESLITGEAMPVTKKPGSTVIAGSINAHGSVLIKATHVGNDTTLAQIVKLVEEAQMSKAPIQQLADRFSGYFVPFIIIMSTLTLVVWIVIGFIDFGVVQRYFPNPNKHISQTEVIIRFAFQTSITVLCIACPCSLGLATPTAVMVGTGVAAQNGILIKGGKPLEMAHKIKTVMFDKTGTITHGVPRVMRVLLLGDVATLPLRKVLAVVGTAEASSEHPLGVAVTKYCKEELGTETLGYCTDFQAVPGCGIGCKVSNVEGILAHSERPLSAPASHLNEAGSLPAEKDAVPQTFSVLIGNREWLRRNGLTISSDVSDAMTDHEMKGQTAILVAIDGVLCGMIAIADAVKQEAALAVHTLQSMGVDVVLITGDNRKTARAIATQVGINKVFAEVLPSHKVAKVQELQNKGKKVAMVGDGVNDSPALAQADMGVAIGTGTDVAIEAADVVLIRNDLLDVVASIHLSKRTVRRIRINLVLALIYNLVGIPIAAGVFMPIGIVLQPWMGSAAMAASSVSVVLSSLQLKCYKKPDLERYEAQAHGHMKPLTASQVSVHIGMDDRWRDSPRATPWDQVSYVSQVSLSSLTSDKPSRHSAAADDDGDKWSLLLNGRDEEQYI

SEQ ID NO: 12406 - protein, 271 aa, Homo sapiens
MAACTMSVCSSACSDSWRVDDCPESCCEPPCGTAPCLTLVCTPVSCVSSPCCQAACEPSPCQSGCTSSCTPSCCQPACCASSPCQQACCVPVCCKPVCCLPTCSKDSSSCCQQSSCQPTCCASSSCQQSCCVPVCCKPVCCVPTCSEDSSSCCQHSSCQPTCCTSSPCQQSCYVPVCCKPVCCKPICCVPVCSGASTSCCQQSSCQPACCTTSCCRPSSSVSLLCRPICRPACCLPISSCCAPASSYQASCCRPASCVSLLCRPACSPLAC

SEQ ID NO: 12407 - protein, 282 aa, Homo sapiens
MAASTMSVCSSACSDSWQVDACPESCCEPHCCALSCCAPAPCLTLVCTPVSRVSSPCCQAACEPSPCQSGCTSSCTPSCCQQSSCQPACCTSSPCQQACCVPVCCKPVCCLPTCSKDSSSCCQQSSCQPTCCASSSSQQSCCVPVCCKPVCYVPTCSEDSSSCCQQSSCHPACCTSSPCQQACCVPVRCKPVCCKPICCVPVCSGASTSCCQQSSCQPACCTTSCCRPSSSVSLLCRPVCRPACCMPVSSCCAPASSCQASCCRPASCVSLLCRPACSRPAC

SEQ ID NO: 12408 - protein, 587 aa, Homo sapiens
MAEKGDCIASVYGYDLGGRFVDFQPLGFGVNGLVLSAVDSRACRKVAVKKIALSDARSMKHALREIKIIRRLDHDNIVKVYEVLGPKGTDLQGELFKFSVAYIVQEYMETDLARLLEQGTLAEEHAKLFMYQLLRGLKYIHSANVLHRDLKPANIFISTEDLVLKIGDFGLARIVDQHYSHKGYLSEGLVTKWYRSPRLLLSPNNYTKAIDMWAAGCILAEMLTGRMLFAGAHELEQMQLILETIPVIREEDKDELLRVMPSFVSSTWEVKRPLRKLLPEVNSEAIDFLEKILTFNPMDRLTAEMGLQHPYMSPYSCPEDEPTSQHPFRIEDEIDDIVLMAANQSQLSNWDTCSSRYPVSLSSDLEWRPDRCQDASEVQRDPRAGSAPLAEDVQVDPRKDSHSSSERFLEQSHSSMERAFEADYGRSCDYKVGSPSYLDKLLWRDNKPHHYSEPKLILDLSHWKQAAGAPPTATGLADTGAREDEPASLFLEIAQWVKSTQGGPEHASPPADDPERRLSASPPGRPAPVDGGASPQFDLDVFISRALKLCTKPEDLPDNKLGDLNGACIPEHPGDLVQTEAFSKERW

SEQ ID NO: 12409 - protein, 296 aa, Homo sapiens
MASSPLPGPNDILLASPSSAFQPDTLSQPRPGHANLKPNQVGQVILYGIPIVSLVIDGQERLCLAQISNTLLKNFSYNEIHNRRVALGITCVQCTPVQLEILRRAGAMPISSRRCGMITKREAERLCKSFLGENRPPKLPDNFAFDVSHECAWGCRGSFIPARYNSSRAKCIKCSYCNMYFSPNKFIFHSHRTPDAKYTQPDAANFNSWRRHLKLTDKSPQDELVFAWEDVKAMFNGGSRKRALPQPGAHPACHPLSSIRTRSIAFSSQTLMLLEEIFGEKDQEDYMRINEDNIWL

SEQ ID NO: 12410 - protein, 1621 aa, Homo sapiens
MNSQPQTRSPFFQRPQIQPPRATIPNSSPSIRPGAQTPTAVYQANQHIMMVNHLPMPYPVPQGPQYCIPQYRHSGPPYVGPPQQYPVQPPGPGPFYPGPGPGDFPNAYGTPFYPSQPVYQSAPIIVPTQQQPPPAKREKKTIRIRDPNQGGKDITEEIMSGGGSRNPTPPIGRPTSTPTPPQLPSQVPEHSPVVYGTVESAHLAASTPVTAASDQKQEEKPKPDPVLKSPSPVLRLVLSGEKKEQEGQTSETTAIVSIAELPLPPSPTTVSSVARSTIAAPTSSALSSQPIFTTAIDDRCELSSPREDTIPIPSLTSCTETSDPLPTNENDDDICKKPCSVAPNDIPLVSSTNLINEINGVSEKLSATESIVEIVKQEVLPLTLELEILENPPEEMKLECIPAPITPSTVPSFPPTPPTPPASPPHTPVIVPAAATTVSSPSAAITVQRVLEEDESIRTCLSEDAKEIQNKIEVEADGQTEEILDSQNLNSRRSPVPAQIAITVPKTWKKPKDRTRTTEEMLEAELELKAEEELSIDKVLESEQDKMSQGFHPERDPSDLKKVKAVEENGEEAEPVRNGAESVSEGEGIDANSGSTDSSGDGVTFPFKPESWKPTDTEGKKQYDREFLLDFQFMPACIQKPEGLPPISDVVLDKINQPKLPMRTLDPRILPRGPDFTPAFADFGRQTPGGRGVPICKVQSRHGLPILEQSKAPTCPPLVMSHPPMKSLPLGLLNVGSRRSQPGQRREPRKIITVSVKEDVHLKKAENAWKPSQKRDSQADDPENIKTQELFRKVRSILNKLTPQMFNQLMKQVSGLTVDTEERLKGVIDLVFEKAIDEPSFSVAYANMCRCLVTLKVPMADKPGNTVNFRKLLLNRCQKEFEKDKADDDVFEKKQKELEAASAPEERTRLHDELEEAKDKARRRSIGNIKFIGELFKLKMLTEAIMHDCVVKLLKNHDEESLECLCRLLTTIGKDLDFEKAKPRMDQYFNQMEKIVKERKTSSRIRFMLQDVIDLRLCNWVSRRADQGPKTIEQIHKEAKIEEQEEQRKVQQLMTKEKRRPGVQRVDEGGWNTVQGAKNSRVLDPSKFLKITKPTIDEKIQLVPKAQLGSWGKGSSGGAKASETDALRSSASSLNRFSALQPPAPSGSTPSTPVEFDSRRTLTSRGSMGREKNDKPLPSATARPNTFMRGGSSKDLLDNQSQEEQRREMLETVKQLTGGVDVERNSTEAERNKTRESAKPEISAMSAHDKAALSEEELERKSKSIIDEFLHINDFKEAMQCVEELNAQGLLHVFVRVGVESTLERSQITRDHMGQLLYQLVQSEKLSKQDFFKGFSETLELADDMAIDIPHIWLYLAELVTPMLKEGGISMRELTIEFSKPLLPVGRAGVLLSEILHLLCKQMSHKKVGALWREADLSWKDFLPEGEDVHNFLLEQKLDFIESDSPCSSEALSKKELSAEELYKRLEKLIIEDKANDEQIFDWVEANLDEIQMSSPTFLRALMTAVCKAAIIADSSTFRVDTAVIKQRVPILLKYLDSDTEKELQALYALQASIVKLDQPANLLRMFFDCLYDEEVISEDAFYKWESSKDPAEQNGKGVALKSVTAFFTWLREAEEESEDN

SEQ ID NO: 12411 - protein, 1246 aa, Homo sapiens
MVYRTQYLVVEVPESRNVTDCCEGYEQLGLYCVLPLNQSGQFTSRPGACPAEGPEPSTSPCSLDIDCPGLEKCCPWSGGRYCMAPAPQAPERDPVGSWYNVTILVKMDFKELQQVDPRLLNHMRLLHSLVTSALQPMASTVHHLHSAPGNASTTVSRLLLGLPRPLPVADVSTLLGDIAKRVYEVISVQVQDVNECFYEELNACSGRELCANLEGSYWCVCHQEAPATSPRKLNLEWEDCPPVSDYVVLNVTSDSFQVSWRLNSTQNHTFHVRVYRGMELLRSARTQSQALAVAGLEAGVLYRVKTSYQGCGADVSTTLTIKTNAQVFEVTIKIVNHNLTEKLLNRSSVEYQDFSRQLLHEVESSFPPVVSDLYRSGKLRMQIVSLQAGSVVVRLKLTVQDPGFPMGISTLAPILQPLLASTVFQIDRQGTRVQDWDECVDSAEHDCSPAAWCINLEGSYTCQCRTTRDATPSRAGRACEGDLVSPMGGGLSAATGVTVPGLGTGTAALGLENFTLSPSPGYPQGTPAAGQAWTPEPSPRRGGSNVVGYDRNNTGKGVEQELQGNSIMEPPSWPSPTEDPTGHFLWHATRSTRETLLNPTWLRNEDSGPSGSVDLPLTSTLTALKTPACVPVSIGRIMVSNVTSTGFHLAWEADLAMDSTFQLTLTSMWSPAVVLETWNTSVTLSGLEPGVLHLVEIMAKACGKEGARAHLKVRTAARKLIGKVRIKNVRYSESFRNASSQEYRDFLELFFRMVRGSLPATMCQHMDAGGVRMEVVSVTNGSIVVEFHLLIIADVDVQEVSAAFLTAFQTVPLLEVIRGDTFIQDYDECERKEDDCVPGTSCRNTLGSFTCSCEGGAPDFPVEYSERPCEGDSPGNETWATSPERPLTTAGTKAAFVQGTSPTPQGLPQRLNLTGAVRVLCEIEKVVVAIQKRFLQQESIPESSLYLSHPSCNVSHSNGTHVLLEAGWSECGTLMQSNMTNTVVRTTLRNDLSQEGIIHHLKILSPIYCAFQNDLLTSSGFTLEWGVYTIIEDLHGAGNFVTEMQLFIGDSPIPQNYSVSASDDVRIEVGLYRQKSNLKVVLTECWATPSSNARDPITFSFINNSCPVPNTYTNVIENGNSNKAQFKLRIFSFINDSIVYLHCKLRVCMESPGATCKINCNNFRLLQNSETSATHQMSWGPLIRSEGEPPHAEAGLGAGYVVLIVVAIFVLVAGTATLLIVRYQRMNGRYNFKIQSNNFSYQVFYE

SEQ ID NO: 12412 - protein, 1374 aa, Homo sapiens
MVYRTQYLVVEVPESRNVTDCCEGYEQLGLYCVLPLNQSGQFTSRPGACPAEGPEPSTSPCSLDIDCPGLEKCCPWSGGRYCMAPAPQAPERDPVGSWYNVTILVKMDFKELQQVDPRLLNHMRLLHSLVTSALQPMASTVHHLHSAPGNASTTVSRLLLGLPRPLPVADVSTLLGDIAKRVYEVISVQVQDVNECFYEELNACSGRELCANLEGSYWCVCHQEAPATSPRKLNLEWEDCPPVSDYVVLNVTSDSFQVSWRLNSTQNHTFHVRVYRGMELLRSARTQSQALAVAGLEAGVLYRVKTSYQGCGADVSTTLTIKTNAQVFEVTIKIVNHNLTEKLLNRSSVEYQDFSRQLLHEVESSFPPVVSDLYRSGKLRMQIVSLQAGSVVVRLKLTVQDPGFPMGISTLAPILQPLLASTVFQIDRQGTRVQDWDECVDSAEHDCSPAAWCINLEGSYTCQCRTTRDATPSRAGRACEGDLVSPMGGGLSAATGVTVPGLGTGTAALGLENFTLSPSPGYPQGTPAAGQAWTPEPSPRRGGSNVVGYDRNNTGKGVEQEVPSTAPGLGMDQGSPSQVNPSQGSPSQGSLRQESTSQASPSQRSTSQGSPSQVNPSQRSTSHANSSQGSPSQGSPSQESPSQGSTSQASPSHRNTIGVIGTTSSPKATGSTHSFPPGATDGPLALPGQLQGNSIMEPPSWPSPTEDPTGHFLWHATRSTRETLLNPTWLRNEDSGPSGSVDLPLTSTLTALKTPACVPVSIGRIMVSNVTSTGFHLAWEADLAMDSTFQLTLTSMWSPAVVLETWNTSVTLSGLEPGVLHLVEIMAKACGKEGARAHLKVRTAARKLIGKVRIKNVRYSESFRNASSQEYRDFLELFFRMVRGSLPATMCQHMDAGGVRMEVVSVTNGSIVVEFHLLIIADVDVQEVSAAFLTAFQTVPLLEVIRGDTFIQDYDECERKEDDCVPGTSCRNTLGSFTCSCEGGAPDFPVEYSERPCEGDSPGNETWATSPERPLTTAGTKAAFVQGTSPTPQGLPQRLNLTGAVRVLCEIEKVVVAIQKRFLQQESIPESSLYLSHPSCNVSHSNGTHVLLEAGWSECGTLMQSNMTNTVVRTTLRNDLSQEGIIHHLKILSPIYCAFQNDLLTSSGFTLEWGVYTIIEDLHGAGNFVTEMQLFIGDSPIPQNYSVSASDDVRIEVGLYRQKSNLKVVLTECWATPSSNARDPITFSFINNSCPVPNTYTNVIENGNSNKAQFKLRIFSFINDSIVYLHCKLRVCMESPGATCKINCNNFRLLQNSETSATHQMSWGPLIRSEGEPPHAEAGLGAGYVVLIVVAIFVLVAGTATLLIVRYQRMNGRYNFKIQSNNFSYQVFYE

SEQ ID NO: 12413 - protein, 628 aa, Homo sapiens
QPRQVAGTPTSSQPSFGPSIRERPSQSLCPCPCPAGEGDPAWPALERRLVTSRGRQPSPQSHAQLLTRRRHSSEQVPPESEPRADFRSGKWLQEPATGDARDSRQALRARMSSKHRICSQEEVVIPCAYDSDSESVDLELSNLEIIKKGSSSIELTDLDIPDIPGLHCEPLSHSPRHLTQQDPLSEAIVEKLIQSIQKVFNGELKGELEKLKFLGDLSSLSQALPYDETAKSFIHSHIADIVHTLNVLVQEERPHSLSSSMRQEVFVTIADLSYQDVHLLLGSEDRAELFSLTIKSIITLPSVRTLTQIQEIMPNGTCNTECLYRQTFQAFSEMLQSLVVKDPHLENLDTIIKHLVPWLQSVKDHERERATASMAQVLKCLSKHLNLKLPLRFQRLGHLVALMALLCGDPQEKVAEEAAEGIHSLLHITLRLKYITHDKKDQQNLKRALTKCREFLELHSSAAKCFYNCPFRIAQVFEGFLDSNELCQFIMTTFDTLKTLKHPCIQRSAGELLLTLAKNTESQFEKVPEIMGVICAQLSIISQPRVRQQIINTVSLFISRPKYTDIVLSFLLCHPVPYNRHLAEVWRMLSVELPSTTWILWRLLRKLQKCHNEPAQEKMAYVAVAVSP

SEQ ID NO: 12414 - protein, 946 aa, Homo sapiens
MPLSRRGRGSRLAGSRAATSNLPRATALSPKHAQLLTRRRHSSEQVPPESEPRADFRSGKWLQEPATGDARDSRQALRARMSSKHRICSQEEVVIPCAYDSDSESVDLELSNLEIIKKGSSSIELTDLDIPDIPGLHCEPLSHSPRHLTQQDPLSEAIVEKLIQSIQKVFNGELKGELEKLKFLGDLSSLSQALPYDETAKSFIHSHIADIVHTLNVLVQEERPHSLSSSMRQEVFVTIADLSYQDVHLLLGSEDRAELFSLTIKSIITLPSVRTLTQIQEIMPNGTCNTECLYRQTFQAFSEMLQSLVVKDPHLENLDTIIKHLVPWLQSVKDHERERATASMAQVLKCLSKHLNLKLPLRFQRLGHLVALMALLCGDPQEKVAEEAAEGIHSLLHITLRLKYITHDKKDQQNLKRALTKCREFLELHSSAAKCFYNCPFRIAQVFEGFLDSNELCQFIMTTFDTLKTLKHPCIQRSAGELLLTLAKNTESQFEKVPEIMGVICAQLSIISQPRVRQQIINTVSLFISRPKYTDIVLSFLLCHPVPYNRHLAEVWRMLSVELPSTTWILWRLLRKLQKCHNEPAQEKMAYVAVAATDALYEVFLGNRLRAATFRLFPQLLMTLLIQIHHSIGLTMSDVDIPSGLYTEQEVPSEVTPLCFAMQATKTLLLRTCCLQEFNIMEKNKGWALLGGKDGHLQGLFLLANALLERNQLLAQKVMYLLVPLLNRGNDKHKLTSAGFFVELLRSPVAKRLPSIYSVARFKDWLQDGNHLFRILGLRGLYNLVGHQEMREDIKSLLPYIVDSLRETDEKIVLSAIQILLQLVRTMDFTTLAAMMRTLFSLFGDVRSDVHRFSVTLFGAAIKSVKNPDKKSIENQVLDSLVPLLLYSQDENDAVAEESRQVLTICAQFLKWKLPQEVYSKDPWHIKPTEAGTICRFFGKKVQGEN

SEQ ID NO: 12415 - protein, 2946 aa, Homo sapiens
MASEKPGPGPGLEPQPVGLIAVGAAGGGGGGSGGGGTGGSGMGELRGASGSGSVMLPAGMINPSVPIRNIRMKFAVLIGLIQVGEVSNRDIVETVLNLLVGGEFDLEMNFIIQDAESITCMTELLEHCDVTCQAEIWSMFTAILRKSVRNLQTSTEVGLIEQVLLKMSAVDDMIADLLVDMLGVLASYSITVKELKLLFSMLRGESGIWPRHAVKLLSVLNQMPQRHGPDTFFNFPGCSAAAIALPPIAKWPYQNGFTLNTWFRMDPLNNINVDKDKPYLYCFRTSKGVGYSAHFVGNCLIVTSLKSKGKGFQHCVKYDFQPRKWYMISIVHIYNRWRNSEIRCYVNGQLVSYGDMAWHVNTNDSYDKCFLGSSETADANRVFCGQLGAVYVFSEALNPAQIFAIHQLGPGYKSTFKFKSESDIHLAEHHKQVLYDGKLASSIAFTYNAKATDAQLCLESSPKENASIFVHSPHALMLQDVKAIVTHSIHSAIHSIGGIQVLFPLFAQLDNRQLNDSQVETTVCATLLAFLVELLKSSVAMQEQMLGGKGFLVIGYLLEKSSRVHITRAVLEQFLSFAKYLDGLSHGAPLLKQLCDHILFNPAIWIHTPAKVQLSLYTYLSAEFIGTATIYTTIRRVGTVLQLMHTLKYYYWVINPADSSGITPKGLDGPRPSQKEIISLRAFMLLFLKQLILKDRGVKEDELQSILNYLLTMHEDENIHDVLQLLVALMSEHPASMIPAFDQRNGIRVIYKLLASKSESIWVQALKVLGYFLKHLGHKRKVEIMHTHSLFTLLGERLMLHTNTVTVTTYNTLYEILTEQVCTQVVHKPHPEPDSTVKIQNPMILKVVATLLKNSTPSAELMEVRRLFLSDMIKLFSNSRENRRCLLQCSVWQDWMFSLGYINPKNSEEQKITEMVYNIFRILLYHAIKYEWGGWRVWVDTLSIAHSKVTYEAHKEYLAKMYEEYQRQEEENIKKGKKGNVSTISGLSSQTTGAKGGMEIREIEDLSQSQSPESETDYPVSTDTRDLLMSTKVSDDILGNSDRPGSGVHVEVHDLLVDIKAEKVEATEVKLDDMDLSPETLVGGENGALVEVESLLDNVYSAAVEKLQNNVHGSVGIIKKNEEKDNGPLITLADEKEDLPNSSTSFLFDKIPKQEEKLLPELSSNHIIPNIQDTQVHLGVSDDLGLLAHMTGSVDLTCTSSIIEEKEFKIHTTSDGMSSISERDLASSTKGLEYAEMTATTLETESSSSKIVPNIDAGSIISDTERSDDGKESGKEIRKIQTTTTTQAVQGRSITQQDRDLRVDLGFRGMPMTEEQRRQFSPGPRTTMFRIPEFKWSPMHQRLLTDLLFALETDVHVWRSHSTKSVMDFVNSNENIIFVHNTIHLISQMVDNIIIACGGILPLLSAATSPTGSKTELENIEVTQGMSAETAVTFLSRLMAMVDVLVFASSLNFSEIEAEKNMSSGGLMRQCLRLVCCVAVRNCLECRQRQRDRGNKSSHGSSKPQEVPQSVTATAASKTPLENVPGNLSPIKDPDRLLQDVDINRLRAVVFRDVDDSKQAQFLALAVVYFISVLMVSKYRDILEPQRETTRTGSQPGRNIRQEINSPTSTVVVIPSIPHPSLNHGFLAKLIPEQSFGHSFYKETPAAFPDTIKEKETPTPGEDIQVESSIPHTDSGIGEEQVASILNGAELETSTGPDAMSELLSTLSSEVKKSQESLTENPSETLKPATSISSISQTKGINVKEILKSLVAAPVEIAECGPEPIPYPDPALKRETQAILPMQFHSFDRSVVVPVKKPPPGSLAVTTVGATTAGSGLPTGSTSNIFAATGATPKSMINTTGAVDSGSSSSSSSSSFVNGATSKNLPAVQTVAPMPEDSAENMSITAKLERALEKVAPLLREIFVDFAPFLSRTLLGSHGQELLIEGLVCMKSSTSVVELVMLLCSQEWQNSIQKNAGLAFIELINEGRLLCHAMKDHIVRVANEAEFILNRQRAEDVHKHAEFESQCAQYAADRREEEKMCDHLISAAKHRDHVTANQLKQKILNILTNKHGAWGAVSHSQLHDFWRLDYWEDDLRRRRRFVRNAFGSTHAEALLKAAIEYGTEEDVVKSKKTFRSQAIVNQNAETELMLEGDDDAVSLLQEKEIDNLAGPVVLSTPAQLIAPVVVAKGTLSITTTEIYFEVDEDDSAFKKIDTKVLAYTEGLHGKWMFSEIRAVFSRRYLLQNTALEVFMANRTSVMFNFPDQATVKKVVYSLPRVGVGTSYGLPQARRISLATPRQLYKSSNMTQRWQRREISNFEYLMFLNTIAGRTYNDLNQYPVFPWVLTNYESEELDLTLPGNFRDLSKPIGALNPKRAVFYAERYETWEDDQSPPYHYNTHYSTATSTLSWLVRIEPFTTFFLNANDGKFDHPDRTFSSVARSWRTSQRDTSDVKELIPEFYYLPEMFVNSNGYNLGVREDEVVVNDVDLPPWAKKPEDFVRINRMALESEFVSCQLHQWIDLIFGYKQRGPEAVRALNVFHYLTYEGSVNLDSITDPVLREAMEAQIQNFGQTPSQLLIEPHPPRSSAMHLCFLPQSPLMFKDQMQQDVIMVLKFPSNSPVTHVAANTLPHLTIPAVVTVTCSRLFAVNRWHNTVGLRGAPGYSLDQAHHLPIEMDPLIANNSGVNKRQITDLVDQSIQINAHCFVVTADNRYILICGFWDKSFRVYSTETGKLTQIVFGHWDVVTCLARSESYIGGDCYIVSGSRDATLLLWYWSGRHHIIGDNPNSSDYPAPRAVLTGHDHEVVCVSVCAELGLVISGAKEGPCLVHTITGDLLRALEGPENCLFPRLISVSSEGHCIIYYERGRFSNFSINGKLLAQMEINDSTRAILLSSDGQNLVTGGDNGVVEVWQACDFKQLYIYPGCDAGIRAMDLSHDQRTLITGMASGSIVAFNIDFNRWHYEHQNRY

SEQ ID NO: 12416 - protein, 2012 aa, Homo sapiens
MWILALSLFQSFANVFSEDLHSSLYFVNASLQEVVFASTTGTLVPCPAAGIPPVTLRWYLATGEEIYDVPGIRHVHPNGTLQIFPFPPSSFSTLIHDNTYYCTAENPSGKIRSQDVHIKAVLREPYTVRVEDQKTMRGNVAVFKCIIPSSVEAYITVVSWEKDTVSLVSGSRFLITSTGALYIKDVQNEDGLYNYRCITRHRYTGETRQSNSARLFVSDPANSAPSILDGFDHRKAMAGQRVELPCKALGHPEPDYRWLKDNMPLELSGRFQKTVTGLLIENIRPSDSGSYVCEVSNRYGTAKVIGRLYVKQPLKATISPRKVKSSVGSQVSLSCSVTGTEDQELSWYRNGEILNPGKNVRITGINHENLIMDHMVKSDGGAYQCFVRKDKLSAQDYVQVVLEDGTPKIISAFSEKVVSPAEPVSLMCNVKGTPLPTITWTLDDDPILKGGSHRISQMITSEGNVVSYLNISSSQVRDGGVYRCTANNSAGVVLYQARINVRGPASIRPMKNITAIAGRDTYIHCRVIGYPYYSIKWYKNSNLLPFNHRQVAFENNGTLKLSDVQKEVDEGEYTCNVLVQPQLSTSQSVHVTVKVPPFIQPFEFPRFSIGQRVFIPCVVVSGDLPITITWQKDGRPIPGSLGVTIDNIDFTSSLRISNLSLMHNGNYTCIARNEAAAVEHQSQLIVRVPPKFVVQPRDQDGIYGKAVILNCSAEGYPVPTIVWKFSKGAGVPQFQPIALNGRIQVLSNGSLLIKHVVEEDSGYYLCKVSNDVGADVSKSMYLTVKIPAMITSYPNTTLATQGQKKEMSCTAHGEKPIIVRWEKEDRIINPEMARYLVSTKEVGEEVISTLQILPTVREDSGFFSCHAINSYGEDRGIIQLTVQEPPDPPEIEIKDVKARTITLRWTMGFDGNSPITGYDIECKNKSDSWDSAQRTKDVSPQLNSATIIDIHPSSTYSIRMYAKNRIGKSEPSNELTITADEAAPDGPPQEVHLEPISSQSIRVTWKAPKKHLQNGIIRGYQIGYREYSTGGNFQFNIISVDTSGDSEVYTLDNLNKFTQYGLVVQACNRAGTGPSSQEIITTTLEDVPSYPPENVQAIATSPESISISWSTLSKEALNGILQGFRVIYWANLMDGELGEIKNITTTQPSLELDGLEKYTNYSIQVLAFTRAGDGVRSEQIFTRTKEDVPGPPAGVKAAAASASMVFVSWLPPLKLNGIIRKYTVFCSHPYPTVISEFEASPDSFSYRIPNLSRNRQYSVWVVAVTSAGRGNSSEIITVEPLAKAPARILTFSGTVTTPWMKDIVLPCKAVGDPSPAVKWMKDSNGTPSLVTIDGRRSIFSNGSFIIRTVKAEDSGYYSCIANNNWGSDEIILNLQVQVPPDQPRLTVSKTTSSSITLSWLPGDNGGSSIRGYILQYSEDNSEQWGSFPISPSERSYRLENLKCGTWYKFTLTAQNGVGPGRISEIIEAKTLGKEPQFSKEQELFASINTTRVRLNLIGWNDGGCPITSFTLEYRPFGTTVWTTAQRTSLSKSYILYDLQEATWYELQMRVCNSAGCAEKQANFATLNYDGSTIPPLIKSVVQNEEGLTTNEGLKMLVTISCILVGVLLLFVLLLVVRRRRREQRLKRLRDAKSLAEMLMSKNTRTSDTLSKQQQTLRMHIDIPRAQLLIEERDTMETIDDRSTVLLTDADFGEAAKQKSLTVTHTVHYQSVSQATGPLVDVSDARPGTNPTTRRNAKAGPTARNRYASQWTLNRPHPTISAHTLTTDWRLPTPRAAGSVDKESDSYSVSPSQDTDRARSSMVSTESASSTYEELARAYEHAKMEEQLRHAKFTITECFISDTSSEQLTAGTNEYTDSLTSSTPSESGICRFTASPPKPQDGGRVMNMAVPKAHRPGDLIHLPPYLRMDFLLNRGGPGTSRDLSLGQACLEPQKSRTLKRPTVLEPIPMEAASSASSTREGQSWQPGAVATLPQREGAELGQAAKMSSSQESLLDSRGHLKGNNPYAKSYTLV

SEQ ID NO: 12417 - protein, 1028 aa, Homo sapiens
MASEAVKVVVRCRPMNQRERELRCQPVVTVDCARAQCCIQNPGAADEPPKQFTFDGAYHVDHVTEQIYNEIAYPLVEGVTEGYNGTIFAYGQTGSGKSFTMQGLPDPPSQRGIIPRAFEHVFESVQCAENTKFLVRASYLEIYNEDVRDLLGADTKQKLELKEHPEKGVYVKGLSMHTVHSVAQCEHIMETGWKNRSVGYTLMNKDSSRSHSIFTISIEMSAVDERGKDHLRAGKLNLVDLAGSERQSKTGATGERLKEATKINLSLSALGNVISALVDGRCKHVPYRDSKLTRLLQDSLGGNTKTLMVACLSPADNNYDETLSTLRYANRAKNIRNKPRINEDPKDALLREYQEEIKKLKAILTQQMSPSSLSALLSRQVPPDPVQVEEKLLPQPVIQHDVEAEKQLIREEYEERLARLKADYKAEQESRARLEEDITAMRNSYDVRLSTLEENLRKETEAVLQVGVLYKAEVMSRAEFASSAEYPPAFQYETVVKPKVFSTTDTLPSDDVSKTQVSSRFAELPKVEPSKSEISLGSSESSSLEETSVSEAFPGPEEPSNVEVSMPTEESRSRYFLDECLGQEAAGHLLGEQNYLPQEEPQEVPLQGLLGLQDPFAEVEAKLARLSSTVARTDAPQADVPKVPVQVPAPTDLLEPSDARPEAEAADDFPPRPEVDLASEVALEVVRTAEPGVWLEAQAPVALVAQPEPLPATAGVKRESVGMEVAVLTDDPLPVVDQQQVLARLQLLEQQVVGGEQAKNKDLKEKHKRRKRYADERRKQLVAALQNSDEDSGDWVLLNVYDSIQEEVRAKSKLLEKMQRKLRAAEVEIKDLQSEFQLEKIDYLATIRRQERDSMLLQQLLEQVQPLIRRDCNYSNLEKILRESCWDEDNGFWKIPHPVITKTSLPVVSTGPQNKPARKTSAADNGEPNMEDDRYRLMLSRSNSENIASNYFRSKRASQILSTDARKSLTHHNSPPGLSCPLSNNSAIPPTQAPEMPQPRPFRLESLDIPFTKAKRKKSKSNFGSEPL

SEQ ID NO: 12418 - protein, 939 aa, Homo sapiens
MAAQPPRGIRLSALCPKFLHTNSTSHTWPFSAVAELIDNAYDPDVNAKQIWIDKTVINDHICLTFTDNGNGMTSDKLHKMLSFGFSDKVTMNGHVPVGLYGNGFKSGSMRLGKDAIVFTKNGESMSVGLLSQTYLEVIKAEHVVVPIVAFNKHRQMINLAESKASLAAILEHSLFSTEQKLLAELDAIIGKKGTRIIIWNLRSYKNATEFDFEKDKYDIRIPEDLDEITGKKGYKKQERMDQIAPESDYSLRAYCSILYLKPRMQIILRGQKVKTQLVSKSLAYIERDVYRPKFLSKTVRITFGFNCRNKDHYGIMMYHRNRLIKAYEKVGCQLRANNMGVGVVGIIECNFLKPTHNKQDFDYTNEYRLTITALGEKLNDYWNEMKVKKNTEYPLNLPVEDIQKRPDQTWVQCDACLKWRKLPDGMDQLPEKWYCSNNPDPQFRNCEVPEEPEDEDLVHPTYEKTYKKTNKEKFRIRQPEMIPRINAELLFRPTALSTPSFSSPKESVPRRHLSEGTNSYATRLLNNHQVPPQSEPESNSLKRRLSTRSSILNAKNRRLSSQFENSVYKGDDDDEDVIILEENSTPKPAVDHDIDMKSEQSHVEQGGVQVEFVGDSEPCGQTGSTSTSSSRCDQGNTAATQTEVPSLVVKKEETVEDEIDVRNDAVILPSCVEAEAKIHETQETTDKSADDAGCQLQELRNQLLLVTEEKENYKRQCHMFTDQIKVLQQRILEMNDKYVKKETCHQSTETDAVFLLESINGKSESPDHMVSQYQQALEEIERLKKQCSALQHVKAECSQCSNNESKSEMDEMAVQLDDVFRQLDKCSIERDQYKSEVELLEMEKSQIRSQCEELKTEVEQLKSTNQQTATDVSTSSNIEESVNHMDGESLKLRSLRVNVGQLLAMIVPDLDLQQVNYDVDVVDEILGQVVEQMSEISST

SEQ ID NO: 12419 - protein, 1288 aa, Homo sapiens
MSSEDLAEIPQLQKLSIPHGFQNKEAASSPTPSITLSQVPDLQPGSQLFTEIHLAKIEKMFEEDINSTGALGMDAFIKAMKKVLSSVSDEMLKELFLKVDSDCEGFVTWQKYVDYMMREFQGKEDMRKSQYRLHFYLPMTVVPLNHGCEVVKVVFLIHRFKKIGCFLTVTKDGILQFWSESFSLMSSFRLNQTQQLYNQPMWVIDMVCLHNMNLVAVASTRQKIDFFDISDHKCVRAFTFVDLDSCALVMDYWSDYHRGVFCYGDAKGNVIVFTSENMTSGLFNPRILPRASKWDHWIKVSLQKLLNEKSALHRSYRLKALHPNWCEQVKFIPQMNVVVSCSAIEKSSLVLTILPAKASKKPRLSVLRLRKGILCFDYCPDRNFLVTGGYDAFIRLWNPFVSKRPVWLMKGHQTSVTHILVDSRNNSILISVSKDKNIRVWDMLDYICLQSFCGKFFALGNCPITSAYFFEKDNTLICSTYSIGILKGYLEAQGLIKARKRTTHCSPLCAVLYSKIFKQVVSGCLRGTVSVWEVVTGRKTMEFAVSGGQHVEMTAMALDESERCLLTGLRDGTMKMWNYNIGKCLLTFPSPEQLEISGIIHMNKVFYVTGWSKRITHFLFHKTKPVLLCYHWQTYHTEDILSMAKYRNQFLGTSSYSGDILFWNTGTLKPIFNFNASRSPSPLQPKRVQDVNNCLAESHRPSRPYVEREKWTYKTSRKLSSLSPESVANTNLRRSLVSAPPVMRCPRDKEPDRPVPQQKPSSASGTSRQSSKIHSKQSIYKEDETRKGEWQKNMLVQSSASVEKIIFLQTRPRLPHTAALLSSCMDGYIYAWSLHENGGLLGKFPVDLDNGDVVVGAMATDKNDWILITGDCKGYIKIWDIKDYCALIDKQPFQSSGAKVVSEAHNKFRLLIPQQLGTNFPHYIPLEDKEVVAGHTISLVPPTLLMTWKGHLNSVADILYVDNFQLVISAGQDRDVKAWKLSGDAIGTFGLSVWKRLQDACDGPRENRASLEEDGDSTGTTQKVLHLELQEQRDLAEALIYQRREQAALMALLHGKADKEADTWAKLQKMALMSPWAGERPLEDIEDSWNKWESRDKQVSKVLGAAYKPKERLQNTRFLSTRVPYGWMKHQISPQVYQSLHFSDLMPTQQPDFLTSRGPDQQDQHIRLVAHHVQKDLVPSREQAVLDTTDSTPAAASSPSSLLSVTASASRLLDSSLPTFLTPQFSFLLRPQSASTAHSTPSVPSPVSKSTLQGSVTPKHIVSSFERPPRPLKATFMSSVKGSSHVRF

SEQ ID NO: 12420 - protein, 837 aa, Homo sapiens
MSLLLSFYLLGLLVSSGQALLQVTISLSKVELSVGESKFFTCTAIGEPESIDWYNPQGEKIISTQRVVVQKEGVRSRLTIYNANIEDAGIYRCQATDAKGQTQEATVVLEIYQKLTFREVVSPQEFKQGEDAEVVCRVSSSPAPAVSWLYHNEEVTTISDNRFAMLANNNLQILNINKSDEGIYRCEGRVEARGEIDFRDIIVIVNVPPAISMPQKSFNATAERGEEMTFSCRASGSPEPAISWFRNGKLIEENEKYILKGSNTELTVRNIINSDGGPYVCRATNKAGEDEKQAFLQVFVQPHIIQLKNETTYENGQVTLVCDAEGEPIPEITWKRAVDGFTFTEGDKSLDGRIEVKGQHGSSSLHIKDVKLSDSGRYDCEAASRIGGHQKSMYLDIEYAPKFISNQTIYYSWEGNPINISCDVKSNPPASIHWRRDKLVLPAKNTTNLKTYSTGRKMILEIAPTSDNDFGRYNCTATNHIGTRFQEYILALADVPSSPYGVKIIELSQTTAKVSFNKPDSHGGVPIHHYQVDVKEVASEIWKIVRSHGVQTMVVLNNLEPNTTYEIRVAAVNGKGQGDYSKIEIFQTLPVREPSPPSIHGQPSSGKSFKLSITKQDDGGAPILEYIVKYRSKDKEDQWLEKKVQGNKDHIILEHLQWTMGYEVQITAANRLGYSEPTVYEFSMPPKPNIIKDTLFNGLGLGAVIGLGVAALLLILVVTDVSCFFIRQCGLLMCITRRMCGKKSGSSGKSKELEEGKAAYLKDGSKEPIVEMRTEDERVTNHEDGSPVNEPNETTPLTEPEKLPLKEEDGKEALNPETIEIKVSNDIIQSKEDDSKA

SEQ ID NO: 12421 - protein, 933 aa, Homo sapiens
MADLSLLQEDLQEDADGSLDFVSQDEMLTPLGRLDKYAASENIFNRQMVARSLLDTLREVCDDERDCIAVLERISRLADDSEPTVRAELMEQVPHIALFCQENRPSIPYAFSKFLLPIVVRYLADQNNQVRKTSQAALLALLEQELIERFDVETKVCPVLIELTAPDSNDDVKTEAVAIMCKMAPMVGKDITERLILPRFCEMCCDCRMFHVRKVCAANFGDICSVVGQQATEEMLLPRFFQLCSDNVWGVRKACAECFMAVSCATCQEIRRTKLSALFINLISDPSRWVRQAAFQSLGPFISTFANPSSSGQYFKEESKSSEEMSVENKNRTRDQEAPEDVQVRPEDTPSDLSVSNSSVILENTMEDHAAEASGKPLGEISVPLDSSLLCTLSSESHQEAASNENDKKPGNYKSMLRPEVGTTSQDSALLDQELYNSFHFWRTPLPEIDLDIELEQNSGGKPSPEGPEEESEGPVPSSPNITMATRKELEEMIENLEPHIDDPDVKAQVEVLSAALRASSLDAHEETISIEKRSDLQDELDINELPNCKINQEDSVPLISDAVENMDSTLHYIHSDSDLSNNSSFSPDEERRTKVQDVVPQALLDQYLSMTDPSRAQTVDTEIAKHCAYSLPGVALTLGRQNWHCLRETYETLASDMQWKVRRTLAFSIHELAVILGDQLTAADLVPIFNGFLKDLDEVRIGVLKHLHDFLKLLHIDKRREYLYQLQEFLVTDNSRNWRFRAELAEQLILLLELYSPRDVYDYLRPIALNLCADKVSSVRWISYKLVSEMVKKLHAATPPTFGVDLINELVENFGRCPKWSGRQAFVFVCQTVIEDDCLPMDQFAVHLMPHLLTLANDRVPNVRVLLAKTLRQTLLEKDYFLASASCHQEAVEQTIMALQMDRDSDVKYFASIHPASTKISEDAMSTASSTY

SEQ ID NO: 12422 - protein, 950 aa, Homo sapiens
MADLSLLQEDLQEDADGFGVDDYSSESDVIIIPSALDFVSQDEMLTPLGRLDKYAASENIFNRQMVARSLLDTLREVCDDERDCIAVLERISRLADDSEPTVRAELMEQVPHIALFCQENRPSIPYAFSKFLLPIVVRYLADQNNQVRKTSQAALLALLEQELIERFDVETKVCPVLIELTAPDSNDDVKTEAVAIMCKMAPMVGKDITERLILPRFCEMCCDCRMFHVRKVCAANFGDICSVVGQQATEEMLLPRFFQLCSDNVWGVRKACAECFMAVSCATCQEIRRTKLSALFINLISDPSRWVRQAAFQSLGPFISTFANPSSSGQYFKEESKSSEEMSVENKNRTRDQEAPEDVQVRPEDTPSDLSVSNSSVILENTMEDHAAEASGKPLGEISVPLDSSLLCTLSSESHQEAASNENDKKPGNYKSMLRPEVGTTSQDSALLDQELYNSFHFWRTPLPEIDLDIELEQNSGGKPSPEGPEEESEGPVPSSPNITMATRKELEEMIENLEPHIDDPDVKAQVEVLSAALRASSLDAHEETISIEKRSDLQDELDINELPNCKINQEDSVPLISDAVENMDSTLHYIHSDSDLSNNSSFSPDEERRTKVQDVVPQALLDQYLSMTDPSRAQTVDTEIAKHCAYSLPGVALTLGRQNWHCLRETYETLASDMQWKVRRTLAFSIHELAVILGDQLTAADLVPIFNGFLKDLDEVRIGVLKHLHDFLKLLHIDKRREYLYQLQEFLVTDNSRNWRFRAELAEQLILLLELYSPRDVYDYLRPIALNLCADKVSSVRWISYKLVSEMVKKLHAATPPTFGVDLINELVENFGRCPKWSGRQAFVFVCQTVIEDDCLPMDQFAVHLMPHLLTLANDRVPNVRVLLAKTLRQTLLEKDYFLASASCHQEAVEQTIMALQMDRDSDVKYFASIHPASTKISEDAMSTASSTY

SEQ ID NO: 12423 - protein, 966 aa, Homo sapiens
MEERKHETMNPAHVLFDRFVQATTCKGTLKAFQELCDHLELKPKDYRSFYHKLKSKLNYWKAKALWAKLDKRGSHKDYKKGKACTNTKCLIIGAGPCGLRTAIDLSLLGAKVVVIEKRDAFSRNNVLHLWPFTIHDLRGLGAKKFYGKFCAGAIDHISIRQLQLILLKVALILGIEIHVNVEFQGLIQPPEDQENERIGWRALVHPKTHPVSEYEFEVIIGGDGRRNTLEGFRRKEFRGKLAIAITANFINRNTTAEAKVEEISGVAFIFNQKFFQELREATGIDLENIVYYKDDTHYFVMTAKKQSLLDKGVILHDYADTELLLSRENVDQEALLSYAREAADFSTQQQLPSLDFAINHYGQPDVAMFDFTCMYASENAALVREQNGHQLLVALVGDSLLEPFWPMGTGIARGFLAAMDSAWMVRSWSLGTSPLEVLAERESIYRLLPQTTPENVSKNFSQYSIDPVTRYPNINVNFLRPSQVRHLYDTGETKDIHLEMESLVNSRTTPKLTRNESVARSSKLLGWCQRQTDGYAGVNVTDLTMSWKSGLALCAIIHRYRPDLIDFDSLDEQNVEKNNQLAFDIAEKELGISPIMTGKEMASVGEPDKLSMVMYLTQFYEMFKDSLPSSDTLDLNAEEKAVLIASTRSPISFLSKLGQTISRKRSPKDKKEKDLDGAGKRRKTSQSEEEEAPRGHRGERPTLVSTLTDRRMDVAVGNQNKVKYMATQLLAKFEENAPAQSIGIRRQGSMKKEFPQNLGGSDTCYFCQKRVYVMERLSAEGKFFHRSCFKCEYCATTLRLSAYAYDIEDGKFYCKPHYCYRLSGYAQRKRPAVAPLSGKEAKGPLQDGATTDANGRANAVASSTERTPGSGVNGLEEPSIAKRLRGTPERIELENYRLSLRQAEALQEVPEETQAEHNLSSVLDTGAEEDVASRDWVSPWLPRMVSNSWAQMIHPPQPPTVLGSQM

SEQ ID NO: 12424 - protein, 205 aa, Homo sapiens
MLKRKPSNVSEKEKHQKPKKGDIIDIICKTPMGMWTGMLNNKVGNFKFIYVDVISEEEAAPKKIKANRRSNSKKSKTLQEFLERIHLQEYTSTLLLNGYETLEDLKDIKESHLIELNIENPDDRRRLLSAAENFLEEEIIQEQENEPEPLSLSSDISLNKSQLDDCPRDSGCYISSGNSDNGKEDLESENLSDMVHKIIITEPSD

SEQ ID NO: 12425 - protein, 373 aa, Homo sapiens
MLKRKPSNVSEKEKHQKPKRSSSFGNFDRFRNNSLSKPDDSTEAHEGDPTNGSGEQSKTSNNGGGLGKKMRAISWTMKKKVGKKYIKALSEEKDEEDGENAHPYRNSDPVIGTHTEKVSLKASDSMDSLYSGQSSSSGITSCSDGTSNRDSFRLDDDGPYSGPFCGRARVHTDFTPSPYDTDSLKIKKGDIIDIICKTPMGMWTGMLNNKVGNFKFIYVDVISEEEAAPKKIKANRRSNSKKSKTLQEFLERIHLQEYTSTLLLNGYETLEDLKDIKESHLIELNIENPDDRRRLLSAAENFLEEEIIQEQENEPEPLSLSSDISLNKSQLDDCPRDSGCYISSGNSDNGKEDLESENLSDMVHKIIITEPSD

SEQ ID NO: 12426 - protein, 1452 aa, Homo sapiens
MVPIFSGRQKHVSGITDTEEERIKEAAAYIAQRNLLASEEGITTSKQSTASKQTTASKQSTASKQSTASKQSTASRQSTASRQSVVSKQATSALQQEETSEKKSRKVVIREKAERLSLRKTLEETETYHAKLNEDHLLHAPEFIIKPRSHTVWEKENVKLHCSIAGWPEPRVTWYKNQVPINVHANPGKYIIESRYGMHTLEINGCDFEDTAQYRASAMNVKGELSAYASVVVKRYKGEFDETRFHAGASTMPLSFGVTPYGYASRFEIHFDDKFDVSFGREGETMSLGCRVVITPEIKHFQPEIQWYRNGVPLSPSKWVQTLWSGERATLTFSHLNKEDEGLYTIRVRMGEYYEQYSAYVFVRDADAEIEGAPAAPLDVKCLEANKDYIIISWKQPAVDGGSPILGYFIDKCEVGTDSWSQCNDTPVKFARFPVTGLIEGRSYIFRVRAVNKMGIGFPSRVSEPVAALDPAEKARLKSPLSTLDWTIIVTEEEPSEGIVPGPPTDLSVTEATRSYVVLSWKPPGQRGHEGIMYFVEKCEAGTENWQRVNTELPVKSPRFALFDLAEGKSYCFRVRCSNSAGVGEPSEATEVTVVGDKLDIPKAPGKIIPSRNTDTSVVVSWEESKDAKELVGYYIEASVAGSGKWEPCNNNPVKAHGFTCHGLVTGQSYIFRVRAVNAAGLSEYSQDSEAIEVKAAIAPPSPPCDITCLESFRDSMVLGWKQPDKIGGAEITGYYVNYREVIDGVPGKWREANVKAVSEEAYKISNLKENMVYQFQVAAMNMAGLGAPSAVSECFKCEEWTIAVPGPPHSLKCSEVRKDSLVLQWKPPVHSGRTPVTGYFVDLKEAKAKEDQWRGLNEAAIKNVYLKVRGLKEGVSYVFRVRAINQAGVGKPSDLAGPVVAETRPGTKEVVVNVDDDGVISLNFECDKMTPKSEFSWSKDYVSTEDSPRLEVESKGNKTKMTFKDLGMDDLGIYSCDVTDTDGIASSYLIDEEELKRLLALSHEHKFPTVPVKSELAVEILEKGQVRFWMQAEKLSGNAKVNYIFNEKEIFEGPKYKMHIDRNTGIIEMFMEKLQDEDEGTYTFQLQDGKATNHSTVVLVGDVFKKLQKEAEFQRQEWIRKQGPHFVEYLSWEVTGECNVLLKCKVANIKKETHIVWYKDEREISVDEKHDFKDGICTLLITEFSKKDAGIYEVILKDDRGKDKSRLKLVDEAFKELMMEVCKKIALSATDLKIQSTAEGIQLYSFVTYYVEDLKVNWSHNGSAIRYSDRVKTGVTGEQIWLQINEPTPNDKGKYVMELFDGKTGHQKTVDLSGQAYDEAYAEFQRLKQAAIAEKNRARVLGGLPDVVTIQEGKALNLTCNVWGDPPPEVSWLKNEKALASDDHCNLKFEAGRTAYFTINGVSTADSGKYGLVVKNKYGSETSDFTVSVFIPEEEARMAALESLKGGKKAK

SEQ ID NO: 12427 - protein, 1300 aa, Homo sapiens
MYKEDPVQGKSNGELSLSRESEGQKNVSSIPGKTGKRRGRPPKRKKLQEEILLSEKQEENSLASEPQTRHGSQGPGQGTWWLLCQTEEEWRQVTESFRERTSLRERQLYKLLSEDFLPEICNMIAQKGKRPQRTKAELHPRWMSDHLSIKPVKQEETPVLTRIEKQKRKEEEEERQILLAVQKKEQEQMLKEERKRELEEKVKAVEDRAKRRKLREERAWLLAQGKELPPELSHLDPNSPMREEKKTKDLFELDDDFTAMYKVLDVVKAHKDSWPFLEPVDESYAPNYYQIIKAPMDISSMEKKLNGGLYCTKEEFVNDMKTMFRNCRKYNGESSEYTKMSDNLERCFHRAMMKHFPGEDGDTDEEFWIREDEKREKRRSRAGRSGGSHVWTRSRDPEGSSRKQQPMENGGKSLPPTRRAPSSGDDQSSSSTQPPREVGTSNGRGFSHPLHCGGTPSQAPFLNQMRPAVPGTFGPLRGSDPATLYGSSGVPEPHPGEPVQQRQPFTMQPPVGINSLRGPRLGTPEEKQMCGGLTHLSNMGPHPGSLQLGQISGPSQDGSMYAPAQFQPGFIPPRHGGAPARPPDFPESSEIPPSHMYRSYKYLNRVHSAVWNGNHGATNQGPLGPDEKPHLGPGPSHQPRTLGHVMDSRVMRPPVPPNQWTEQSGFLPHGVPSSGYMRPPCKSAGHRLQPPPVPAPSSLFGAPAQALRGVQGGDSMMDSPEMIAMQQLSSRVCPPGVPYHPHQPAHPRLPGPFPQVAHPMSVTVSAPKPALGNPGRAPENSEAQEPENDQEPLPGLEEKPPGVGTSEGVYLTQLPHPTPPLQTDCTRQSSPQERETVGPELKSSSSESADNCKAMKGKNPWPSDSSYPGPAAQGCVRDLSTVADRGALSENGVIGEASPCGSEGKGLGSSGSEKLLCPRGRTLQETMPCTGQNAATPPSTDPGLTGGTVSQFPPLYMPGLEYPNSAAHYHISPGLQGVGPVMGGKSPASHPQHFPPRGFQSNHPHSGGFPRYRPPQGMRYSYHPPPQPSYHHYQRTPYYACPQSFSDWQRPLHPQGSPSGPPASQPPPPRSLFSDKNAMASLQGCETLNAALTSPTRMDAVAAKVPNDGQNPGPEEEKLDESMERPESPKEFLDLDNHNAATKRQSSLSASEYLYGTPPPLSSGMGFGSSAFPPHSVMLQTGPPYTPQRPASHFQPRAYSSPVAALPPHHPGATQPNGLSQEGPIYRCQEEGLGHFQAVMMEQIGTRSGIRGPFQEMYRPSGMQMHPVQSQASFPKTPTAATSQEEVPPHKPPTLPLDQS

SEQ ID NO: 12428 - protein, 574 aa, Homo sapiens
MSLPSPSPSRELCPPDPAFAPLSSWPGSGPAGGSTRSGHVLYSGWLRKSPPEKKLRLFAWRKRWFILRRGQTSSDPDVLEYYKNDGSKKPLRTINLNLCEQLDVDVTLNFNKKEIQKGYMFDIKTSERTFYLVAETREDMNEWVQSICQICGFRQEESTGFLGNISSASHGLCSSPAEPSCSHQHLPQEQEPTSEPPVSHCVPPTWPIPAPPGCLRSHQHASQRAEHARSASFSQGSEAPFIMRRNTAMQNLAQHSGYSVDGVSGHIHGFHSLSKPSQHNAEFRGSTHRIPWSLASHGHTRGSLTGSEADNEASSGKYTQHGGGNASRPAESMHEGVCSFLPGRTLVGLSDSIASEGSCVPMNPGSPTLPAVKQAGDDSQGVCIPVGSCLVRFDLLGSPLTELSMHQDLSQGHEVQLPPVNRSLKPNQKANPTPPNLRNNRVINELSFKPPVTEPWSGTSHTFDSSSSQHPISTQSITNTDSEDSGERYLFPNPASAFPVSGGTSSSAPPRSTGNIHYAALDFQPSKPSIGSVTSGKKVDYVQVDLEKTQALQKTMHEQMCLRQSSEPPRGAKL

SEQ ID NO: 12429 - protein, 1151 aa, Homo sapiens [sequence omitted]

SEQ ID NO: 12430 - protein, 518 aa, Homo sapiens
MAALPGTVPRMMRPAPGQNYPRTGFPLEVSTPLGQGRVNQLGGVFINGRPLPNHIRHKIVEMAHHGIRPCVISRQLRVSHGCVSKILCRYQETGSIRPGAIGGSKPRQVATPDVEKKIEEYKRENPGMFSWEIRDRLLKDGHCDRSTVPSVSSISRVLRIKFGKKEEEDEADKKEDDGEKKAKHSIDGILGDKGNRLDEGSDVESEPDLPLKRKQRRSRTTFTAEQLEELEKAFERTHYPDIYTREELAQRTKLTEARVQVWFSNRRARWRKQAGANQLAAFNHLLPGGFPPTGMPTLPPYQLPDSTYPTTTISQDGGSTVHRPQPLPPSTMHQGGLAAAAAAADTSSAYGARHSFSSYSDSFMNPAAPSNHMNPVSNGLSPQVMSILGNPSAVPPQPQADFSISPLHGGLDSATSISASCSQRADSIKPGDSLPTSQAYCPPTYSTTGYSVDPVAGYQYGQYGQSECLVPWASPVPIPSPTPRASCLFMESYKVVSGWGMSISQMEKLKSSQMEQFT

SEQ ID NO: 12431 - protein, 777 aa, Homo sapiens
MFPRGAEAQDWHLDMQLTGKVVLSAAALLLVTVAYRLYKSRPAPAQRWGGNGQAEAKEEAEGSGQPAVQEASPGVLLRGPRRRRSSKRAEAPQGCSCENPRGPYVLVTGATSTDRKPQRKGSGEERGGQGSDSEQVPPCCPSQETRTAVGSNPDPPHFPRLGSEPKSSPAGLIAAADGSCAGGEPSPWQDSKPREHPGLGQLEPPHCHYVAPLQGSSDMNQSWVFTRVIGVSREEAGALEAASDVDLTLHQQEGAPNSSYTFSSIARVRMEEHFIQKAEGVEPRLKGKVYDYYVESTSQAIFQGRLAPRTAALTEVPSPRPPPGSLGTGAASGGQAGDTKGAAERAASPQTGPWPSTRGFSRKESLLQIAENPELQLQPDGFRLPAPPCPDPGALPGLGRSSREPHVQPVAGTNFFHIPLTPASAPQVRLDLGNCYEVLTLAKRQNLEALKEAAYKVMSENYLQVLRSPDIYGCLSGAERELILQRRLRGRQYLVVADVCPKEDSGGLCCYDDEQDVWRPLARMPPEAVSRGCAICSLFNYLFVVSGCQGPGHQPSSRVFCYNPLTGIWSEVCPLNQARPHCRLVALDGHLYAIGGECLNSVERYDPRLDRWDFAPPLPSDTFALAHTATVRAKEIFVTGGSLRFLLFRFSAQEQRWWAGPTGGSKDRTAEMVAVNGFLYRFDLNRSLGIAVYRCSASTRLWYECATYRTPYPDAFQCAVVDNLIYCVGRRSTLCFLADSVSPRFVPKELRSFPAPQGTLLPTVLTLPTPDLPQTRV

SEQ ID NO: 12432 - protein, 348 aa, Homo sapiens
MPDELTEPGRATPARASSFLIENLLAAEAKGAGRATQGDGSREDEEEDDDDPEDEDAEQARRRRLQRRRQLLAGTGPGGEARARALLGPGALGLGPRPPPGPGPPFALGCGGAARWYPRAHGGYGGGLSPDTSDRDSPETGEEMGRAEGAWPRGPGPGAVQREAAELAARGPAAGTEEASELAEVPAAAGETRGGVGVGGGRKKKTRTVFSRSQVFQLESTFDLKRYLSSAERAGLAASLQLTETQVKIWFQNRRNKWKRQLAAELEAASLSPPGAQRLVRVPVLYHESPPAAAAAGPPATLPFPLAPAAPAPPPPLLGFSGALAYPLAAFPAAASVPFLRAQMPGLV

SEQ ID NO: 12433 - protein, 375 aa, Homo sapiens
MWTWFVKSLGSVPLISITGYVDRDIQLLCQSSGWFPRPTAKWKGPQGQDLSTDSRTNRDMHGLFDVEISLTVQENAGSISCSMRHAHLSREVESRVQIGDTFFEPISWHLATKVLGILCCGLFFGIVGLKIFFSKFQWKIQAELDWRRKHGQAELRDARKHAVEVTLDPETAHPKLCVSDLKTVTHRKAPQEVPHSEKRFTRKSVVASQSFQAGKHYWEVDGGHNKRWRVGVCRDDVDRRKEYVTLSPDHGYWVLRLNGEHLYFTLNPRFISVFPRTPPTKIGVFLDYECGTISFFNINDQSLIYTLTCRFEGLLRPYIEYPSYNEQNGTPIVICPVTQESEKEASWQRASAIPETSNSESSSQATTPFLPRGEM

SEQ ID NO: 12434 - protein, 597 aa, Homo sapiens
MDSCSLEIANWRNHQETLKYQFDAFYGERSTQQDIYAGSVQPILRHLLEGQNASVLAYGPTGAGKTHTMLGSPEQPGVIPRALMDLLQLTREEGAEGRPWALSVTMSYLEIYQEKVLDLLDPASGDLVIREDCRGNILIPGLSQKPISSFADFERHFLPASRNRTVGATRLNQRSSRSHAVLLVKVDQRERLAPFRQREGKLYLIDLAGSEDNRRTGNKGLRLKESGAINTSLFVLGKVVDALNQGLPRVPYRDSKLTRLLQDSLGGSAHSILIANIAPERRFYLDTVSALNFAARSKEVINRPFTNESLQPHALGPVKLSQKELLGPPEAKRARGPEEEEIGSPEPMAAPASASQKLSPLQKLSSMDPAMLERLLSLDRLLASQGSQGAPLLSTPKRERMVLMKTVEEKDLEIERLKTKQKELEAKMLAQKAEEKENHCPTMLRPLSHRTVTGAKPLKKAVVMPLQLIQEQAASPNAEIHILKNKGRKRKLESLDALEPEEKAEDCWELQISPELLAHGRQKILDLLNEGSARDLRSLQRIGPKKAQLIVGWRELHGPFSQVEDLERVEGITGKQMESFLKANILGLAAGQRCGAS

SEQ ID NO: 12435 - protein, 273 aa, Homo sapiens
AAVMQAAANSAQSRQGSFPGMNQSGLMASSSPYSQPMNNSSSLMNTQAPPYSMAPAMVNSSAASVGLADMMSPGESKLPLPLKADGKEEGTPQPESKSKKSSSSTTTGEKITKVYELGNEPERKLWVDRYLTFMEERGSPVSSLPAVGKKPLDLFRLYVCVKEIGGLAQVNKNKKWRELATNLNVGTSSSAASSLKKQYIQYLFAFECKIERGEEPPPEVFSTGDTKKQPKLQPPSPGKWRRCSHWPRKAQAPGLGGSGKVVSQSGQQGTWDF

SEQ ID NO: 12436 - protein, 927 aa, Homo sapiens
MTAEETVNVKEVEIIKLILDFLNSKKLHISMLALEKESGVINGLFSDDMLFLRQLILDGQWDEVLQFIQPLECMEKFDKKRFRYIILKQKFLEALCVNNAMSAEDEPQHVRFLFLKLEFTMQEAVQCLHALEEYCPSKDDYSKLCLLLTLPRLTNHAEFKDWNPSTARVHCFEEACVMVAEFIPADRKLSEAGFKASNNRLFQLVMKGLLYECCVEFCQSKATGEEITESEVLLGIDLLCGNGCDDLDLSLLSWLQNLPSSVFSCAFEQKMLNIHVDKLLKPTKAAYADLLTPLISKLSPYPSSPMRRPQSADAYMTRSLNPALDGLTCGLTSHDKRISDLGNKTSPMSHSFANFHYPGVQNLSRSLMLENTECHSIYEESPERSDTPVDAQRPIGSEILGQSSVSEKEPANGAQNPGPAKQEKNELRDSTEQFQEYYRQRLRYQQHLEQKEQQRQIYQQMLLEGGVNQEDGPDQQQNLTEQFLNRSIQKLGELNIGMDGLGNEVSALNQQCNGSKGNGSNGSSVTSFTTPPQDSSQRLTHDASNIHTSTPRNPGSTNHIPFLEESPCGSQISSEHSVIKPPLGDSPGSLSRSKGEEDDKSKKQFVCINILEDTQAVRAVAFHPAGGLYAVGSNSKTLRVCAYPDVIDPSAHETPKQPVVRFKRNKHHKGSIYCVAWSPCGQLLATGSNDKYVKVLPFNAETCNATGPDLEFSMHDGTIRDLAFMEGPESGGAILISAGAGDCNIYTTDCQRGQGLHALSGHTGHILALYTWSGWMIASGSQDKTVRFWDLRVPSCVRVVGTTFHGTGSAVASVAVDPSGRLLATGQEDSSCMLYDIRGGRMVQSYHPHSSDVRSVRFSPGAHYLLTGSYDMKIKVTDLQGDLTKQLPIMVVGEHKDKVIQCRWHTQDLSFLSSSADRTVTLWTYNG

SEQ ID NO: 12437 - protein, 1834 aa, Homo sapiens
MSAGGRDEERRKLADIIHHWNANRLDLFEISQPTEDLEFHGVMRFYFQDKAAGNFATKCIRVSSTATTQDVIETLAEKFRPDMRMLSSPKYSLYEVHVSGERRLDIDEKPLVVQLNWNKDDREGRFVLKNENDAIPPKAQSNGPEKQEKEGVIQNFKRTLSKKEKKEKKKREKEALRQASDKDDRPFQGEDVENSRLAAEVYKDMPETSFTRTISNPEVVMKRRRQQKLEKRMQEFRSSDGRPDSGGTLRIYADSLKPNIPYKTILLSTTDPADFAVAEALEKYGLEKENPKDYCIARVMLPPGAQHSDEKGAKEIILDDDECPLQIFREWPSDKGILVFQLKRRPPDHIPKKTKKHLEGKTPKGKERADGSGYGSTLPPEKLPYLVELSPGRRNHFAYYNYHTYEDGSDSRDKPKLYRLQLSVTEVGTEKLDDNSIQLFGPGIQPHHCDLTNMDGVVTVTPRSMDAETYVEGQRISETTMLQSGMKVQFGASHVFKFVDPSQDHALAKRSVDGGLMVKGPRHKPGIVQETTFDLGGDIHSGTALPTSKSTTRLDSDRVSSASSTAERGMVKPMIRVEQQPDYRRQESRTQDASGPELILPASIEFRESSEDSFLSAIINYTNSSTVHFKLSPTYVLYMACRYVLSNQYRPDISPTERTHKVIAVVNKMVSMMEGVIQKQKNIAGALAFWMANASELLNFIKQDRDLSRITLDAQDVLAHLVQMAFKYLVHCLQSELNNYMPAFLDDPEENSLQRPKIDDVLHTLTGAMSLLRRCRVNAALTIQLFSQLFHFINMWLFNRLVTDPDSGLCSHYWGAIIRQQLGHIEAWAEKQGLELAADCHLSRIVQATTLLTMDKYAPDDIPNINSTCFKLNSLQLQALLQNYHCAPDEPFIPTDLIENVVTVAENTADELARSDGREVQLEEDPDLQLPFLLPEDGYSCDVVRNIPNGLQEFLDPLCQRGFCRLIPHTRSPGTWTIYFEGADYESHLLRENTELAQPLRKEPEIITVTLKKQNGMGLSIVAAKGAGQDKLGIYVKSVVKGGAADVDGRLAAGDQLLSVDGRSLVGLSQERAAELMTRTSSVVTLEVAKQGAIYHGLATLLNQPSPMMQRISDRRGSGKPRPKSEGFELYNNSTQNGSPESPQLPWAEYSEPKKLPGDDRLMKNRADHRSSPNVANQPPSPGGKSAYASGTTAKITSVSTGNLCTEEQTPPPRPEAYPIPTQTYTREYFTFPASKSQDRMAPPQNQWPNYEEKPHMHTDSNHSSIAIQRVTRSQEELREDKAYQLERHRIEAAMDRKSDSDMWINQSSSLDSSTSSQEHLNHSSKSVTPASTLTKSGPGRWKTPAAIPATPVAVSQPIRTDLPPPPPPPPVHYAGDFDGMSMDLPLPPPPSANQIGLPSAQVAAAERRKREEHQRWYEKEKARLEEERERKRREQERKLGQMRTQSLNPAPFSPLTAQQMKPEKPSTLQRPQETVIRELQPQQQPRTIERRDLQYITVSKEELSSGDSLSPDPWKRDAKEKLEKQQQMHIVDMLSKEIQELQSKPDRSAEESDRLRKLMLEWQFQKRLQESKQKDEDDEEEEDDDVDTMLIMQRLEAERRARTAMPAISVLDLLQDEERRRQQQLEEMRKREAEDRARQEEERRRQEEERTKRDAEEKRRQEEGYYSRLEAERRRQHDEAARRLLEPEAPGLCRPPLPRDYEPPSPSPAPGAPPPPPQRNASYLKTQVLSPDSLFTAKFVAYNEEEEEEDCSLAGPNSYPGSTGAAVGAHDACRDAKEKRSKSQDADSPGSSGAPENLTFKERQRLFSQGQDVSNKVKASRKLTELENELNTK

SEQ ID NO: 12438 - protein, 247 aa, Homo sapiens
MSAGGRDEERRKLADIIHHWNANRLDLFEISQPTEDLEFHGVMRFYFQDKAAGNFATKCIRVSSTATTQDVIETLAEKFRPDMRMLSSPKYSLYEVHVSGEERRLDIDEKPLVVQLNWNKDDREGRFVLKNENDAIPPKKAQSNGPEKQEKEGVIQNFKRTLSKKEKKEKKKREKEALRQASDKDDRPFQGEDVENSRLAAEVYKDMPETSFTRTISNPEVVMKRRRQQKLEKRMQEFRSSDGRPDS

SEQ ID NO: 12439 - protein, 250 aa, Homo sapiens
MSAGGRDEERRKLADIIHHWNANRLDLFEISQPTEDLEFHGVMRFYFQDKAAGNFATKCIRVSSTATTQDVIETLAEKFRPDMRMLSSPKYSLYEVHVSGEERRLDIDEKPLVVQLNWNKDDREGRFVLKNENDAIPPKAQSNGPEKQEKEGVIQNFKRTLSKKEKKEKKKREKEALRQASDKDDRPFQGEDVENSRLAAEVYKDMPETSFTRTISNPEVVMKRRRQQKLEKRMQEFRSSDGRPDSGGTL

SEQ ID NO: 12440 - protein, 672 aa, Homo sapiens
MQFLHKLILNHNPLTTVEDPYLFKLPALKYLDMGTTLVPLTTLKNILMMTVELEKLIVPSHMACCLCQFKNSIEAVCKTVKLHCNSACLTNTTHCPEEASVGNPEGAFMKVLQARKNYTSTELIIEPEEPSDSSGINLSGFGSEQLDTNDESDVTSTLSYILPYFSAVNLDVKSLLLPFIKLPTTGNSLAKIQTVGKNRQRLNRVLMGPRSIQKRHFKEVGRQSIRREQGAQASVENTAEEKRLGSPAPRELKQPHTQQGPEKLAGNAVYTKPSFTQEHKAAVSVLKPFSKGAPSTSSPAKALPQVRDRWKDLTHAISILESAKARVTNMKTSKPIVHSRKKYRFHKTRSRMTHRTPKVKKSPKVRKKSYLSRLMLSNRLPFSAAKSLINSPSQGAFSSLRDLSPQENPFLEVSAPSEHFIENNNTKDTTARNAFEENVFMENTNMPEGTISENTNYNHPPEADSAGTAFNLGPTVKQTETKWEYNNVGTDLSPEPKSFNYPLLSSPGDQFEIQLTQQLQSVIPNNNVRRLIAHVIRTLKMDCSGAHVQVTCAKLVSRTGHLMKLLSGQQEVKASKIEWDTDQWKTENYINESTEAQSEQKEKSLEFTKELPGYGYTKKLILALIVTGILTILIILLCLIEICCHRRSLQEDEEGFSRDSEAPTEEESEALP

SEQ ID NO: 12441 - protein, 686 aa, Homo sapiens
MRLLTLLGLLCGSVATPLGPKWPEPVFGRLASPGFPGEYANDQERRWTLTAPPGYRLRLYFTHFDLELSHLCEYDFVKLSSGAKVLATLCGQESTDTERAPGKDTFYSLGSSLDITFRSDYSNEKPFTGFEAFYAAEDIDECQVAPGEAPTCDHHCHNHLGGFYCSCRAGYVLHRNKRTCSALCSGQVFTQRSGELSSPEYPRPYPKLSSCTYSISLEEGFSVILDFVESFDVETHPETLCPYDFLKIQTDREEHGPFCGKTLPHRIETKSNTVTITFVTDESGDHTGWKIHYTSTAQPCPYPMAPPNGHVSPVQAKYILKDSFSIFCETGYELLQGHLPLKSFTAVCQKDGSWDRPMPACSIVDCGPPDDLPSGRVEYITGPGVTTYKAVIQYSCEETFYTMKVNDGKYVCEADGFWTSSKGEKSLPVCEPVCGLSARTTGGRIYGGQKAKPGDFPWQVLILGGTTAAGALLYDNWVLTAAHAVYEQKHDASALDIRMGTLKRLSPHYTQAWSEAVFIHEGYTHDAGFDNDIALIKLNNKVVINSNITPICLPRKEAESFMRTDDIGTASGWGLTQRGFLARNLMYVDIPIVDHQKCTAAYEKPPYPRGSVTANMLCAGLESGGKDSCRGDSGGALVFLDSETERWFVGGIVSWGSMNCGEAGQYGVYTKVINYIPWIENIISDF

SEQ ID NO: 12442 - protein, 512 aa, Homo sapiens
MENKEAGTPPPIPSREGRLQPTLLLATLSAAFGSAFQYGYNLSVVNTPHKVFKSFYNETYFERHATFMDGKLMLLLWSCTVSMFPLGGLLGSLLVGLLVDSCGRKGTLLINNIFAIIPAILMGVSKVAKAFELIVFSRVVLGVCAGISYSALPMYLGELAPKNLRGMVGTMTEVFVIVGVFLAQIFSLQAILGNPAGWPVLLALTGVPALLQLLTLPFFPESPRYSLIQKGDEATARQALRRLRGHTDMEAELEDMRAEARAERAEGHLSVLHLCALRSLRWQLLSIIVLMAGQQLSGINAINYYADTIYTSAGVEAAHSQYVTVGSGVVNIVMTITSAVLVERLGRRHLLLAGYGICGSACLVLTVVLLFQNRVPELSYLGIICVFAYIAGHSIGPSPVPSVVRTEIFLQSSRRAAFMVDGAVHWLTNFIIGFLFPSIQEAIGAYSFIIFAGICLLTAIYIYVVIPETKGKTFVEINRIFAKRNRVKLPEEKEETIDAGPPTASPAKETSF

SEQ ID NO: 12443 - protein, 584 aa, Homo sapiens
MTADKDKDKDKEKDRDRDRDREREKRDKARESENSRPRRSCTLEGGAKNYAESDHSEDEDNDNNSATAEESTKKNKKKPPKKKSRYERTDTGEITSYITEDDVVYRPGDCVYIESRRPNTPYFICSIQDFKLVHNSQACCRSPTPALCDPPACSLPVASQPPQHLSEAGRGPVGSKRDHLLMNVKWYYRQSEVPDSVYQHLVQDRHNENDSGRELVITDPVIKNRELFISDYVDTYHAAALRGKCNISHFSDIFAAREFKARVDSFFYILGYNPETRRLNSTQGEIRVGPSHQAKLPDLQPFPSPDGDTVTQHEELVWMPGVNDCDLLMYLRAARSMAAFAGMCDGGSTEDGCVAASRDDTTLNALNTLHESGYDAGKALQRLVKKPVPKLIEKCWTEDEVKRFVKGLRQYGKNFFRIRKELLPNKETGELITFYYYWKKTPEAASSRAHRRHRRQAVFRRIKTRTASTPVNTPSRPPSSEFLDLSSASEDDFDSEDSEQELKGYACRHCFTTSTPYPRDLPGAIPPPMSAAHQLQAMHAQSAELQRLAMEQQWLHGHPHMHGGHLPSQEDYYSRLKKEGDKQL

SEQ ID NO: 12444 - protein, 1062 aa, Homo sapiens
MDDQSPAEKKGLRCQNPACMDKGRAAKVCHHADCQQLHRRGPLNLCEACDSKFHSTMHYDGHVRFDLPPQGSVLARNVSTRSCPPRTSPAVDLEEEEEESSVDGKGDRKSTGLKLSKKKARRRHTDDPSKECFTLKFDLNVDIETEIVPAMKKKSLGEVLLPVFERKGIALGKVDIYLDQSNTPLSLTFEAYRFGGHYLRVKAPAKPGDEGKVEQGMKDSKSLSLPILRPAGTGPPALERVDAQSRRESLDILAPGRRRKNMSEFLGEASIPGQEPPTPSSCSLPSGSSGSTNTGDSWKNRAASRFSGFFSSGPSTSAFGREVDKMEQLEGKLHTYSLFGLPRLPRGLRFDHDSWEEEYDEDEDEDNACLRLEDSWRELIDGHEKLTRRQCHQQEAVWELLHTEASYIRKLRVIINLFLCCLLNLQESGLLCEVEAERLFSNIPEIAQLHRRLWASVMAPVLEKARRTRALLQPGDFLKGFKMFGSLFKPYIRYCMEEEGCMEYMRGLLRDNDLFRAYITWAEKHPQCQRLKLSDMLAKPHQRLTKYPLLLKSVLRKTEEPRAKEAVVAMIGSVERFIHHVNACMRQRQERQRLAAVVSRIDAYEVVESSSDEVDKLLKEFLHLDLTAPIPGASPEETRQLLLEGSLRMKEGKDSKMDVYCFLFTDLLLVTKAVKKAERTRVIRPPLLVDKIVCRELRDPGSFLLIYLNEFHSAVGAYTFQASGQALCRGWVDTIYNAQNQLQQLRAQEPPGSQQPLQSLEEEEDEQEEEEEEEEEEEEGEDSGTSAASSPTIMRKSSGSPDSQHCASDGSTETLAMVVVEPGDTLSSPEFDSGPFSSQSDETSLSTTASSATPTSELLPLGPVDGRSCSMDSAYGTLSPTSLQDFVAPGPMAELVPRAPESPRVPSPPPSPRLRRRTPVQLLSCPPHLLKSKSEASLLQLLAGAGTHGTPSAPSRSLSELCLAVPAPGIRTQGSPQEAGPSWDCRGAPSPGSGPGLVGCLAGEPAGSHRKRCGDLPSGASPRVQPEPPPGVSAQHRKLTLAQLYRIRTTLLLNSTLTASEV

SEQ ID NO: 12445 - protein, 201 aa, Homo sapiens
MDEQALLGLNPNADSDFRQRALAYFEQLKISPDAWQVCAEALAQRTYSDDHVKFFCFQVLEHQVKYKYSELTTVQQQLIRETLISWLQAQMLNPQPEKTFIRNKAAQVFALLFVTEYLTKWPKFFFDILSVVDLNPRGVDLYLRILMAIDSELVDRDVVHTSEEARRNTLIKDTMREQCIPNLVESWYQILQNYQFTNSEV

SEQ ID NO: 12446 - protein, 453 aa, Homo sapiens
METFIPIDLTTENQEMDKEETKTKPRLLRYEEKKYEDVKPLETQPAEIAEKETLEYKTVRTFSESLKSEKTEDYLRESIIQQHMVSPEPASLKEKGKSRRKKDQTHACPNVRKARPVSYDRTEPKDDDVIRNIIRLREKLGWQTILPQHSLKYGSSKIAIQKITLKKPLEDDGEFVYCLPRKSPKSLYNPYDLQVVSAHTAKHCKEFWVITASFISKVINIVGSVKEVELIPTLEWLSERRHYYLLRQFKIFSDFRMNKAFVTWKLNVKRIKTEKSRSFLYHHLFLADDLFQTCLVYIRGLCEDAINLKNYNDHENNLSAICLVKLDSSRTYSLDEFCEEQLQQATQALKQLEDIRNKAISEMKSTFLKVAEKNEIKEYFESKLSEDDTTHFKLPKYRRLLETFFKFVMLVDYIFQELIRQLMNTAVTLLLELFNGSAGMPFSVEKKNENLIR

SEQ ID NO: 12447 - protein, 2039 aa, Homo sapiens; identical to SEQ ID NO: 8317

SEQ ID NO: 12448 - protein, 1435 aa, Homo sapiens
MAAGGGGGSSKASSSSASSAGALESSLDRKFQSVTNTMESIQGLSSWCIENKKHHSTIVYHWMKWLRRSAYPHRLNLFYLANDVIQNCKRKNAIIFRESFADVLPEAAALVKDPSVSKSVERIFKIWEDRNVYPEEMIVALREALTSTNPKAALKSKIVAEFRSQALIEELLLYKRSEDQIELKEKQLSTMRVDVCSTETLKCLKDKTGGKKFSKEFEEASSKLEEFVNGLDKQVKNGPSLTEALENAGIFYEAQYKEVKVVANAYKTFANRVNNLKKKLDQLKSTLPDPEESPVPSPSMDAPSPTGSESPFQGMGGEESQSPTMESEKSATPEPVTDNRDVEDMELSDVEDDGSKIIVEDRKEKPAEKSAVSTSVPTKPTENISKASSCTPVPVTMTATPPLPKPVNTSLSPSPALALPNLANVDLAKISSILSSLTSVMKNTGVSPASRPSPGTPTSPSNLTSGLKTPAPATTTSHNPLANILSKVEITPESILSALSKTQTQSAPALQGLSSLLQSVTGNPVPASEAASQSTSASPANTTVSTIKGRNLPSSAQPFIPKSFNYSPNSSTSEVSSTSASKASIGQSPGLPSTTFKLPSNSLGFTATHNTSPAAPPTEVTICQSSEVSKPKLESESTSPSLEMKIHNFLKGNPGFSGLNLNIPILSSLGSSAPSESHPSDFQRGPTSTSIDNIDGTPVRDERSGTPTQDEMMDKPTSSSVDTMSLLSKIISPGSSTPSSTRSPPPGRDESYPRELSNSVSTYRPFGLGSESPYKQPSDGMERPSSLMDSSQEKFYPDTSFQEDEDYRDFEYSGPPPSAMMNLEKKPAKSILKSSKLSDTTEYQPILSSYSHRAQEFGVKSAFPPSVRALLDSSENCDRLSSSPGLFGAFSVRGNEPGSDRSPSPSKNDSFFTPDSNHNSLSQSTTGHLSLPQKQYPDSPHPVPHRSLFSPQNTLAAPTGHPPTSGVEKVLASTISTTSTIEFKNMLKNASRKPSDDKHFGQAPSKGTPSDGVSLSNLTQPSLTATDQQQQEEHYRIETRVSSSCLDLPDSTEEKGAPIETLGYHSASNRRMSGEPIQTVESIRVPGKGNRGHGREASRVGWFDLSTSGSSFDNGPSSASELASLGGGGSGGLTGFKTAPYKERAPQFQESVGSFRSNSFNSTFEHHLPPSPLEHGTPFQREPVGPSSAPPVPPKDHGGIFSRDAPTHLPSVDLSNPFTKEAALAHAAPPPPPGEHSGIPFPTPPPPPPPGEHSSSGGSGVPFSTPPPPPPPVDHSGVVPFPAPPLAEHGVAGAVAVFPKDHSSLLQGTLAEHFGVLPGPRDHGGPTQRDLNGPGLSRVRESLTLPSHSLEHLGPPHGGGGGGGSNSSSGPPLGPSHRDTISRSGIILRSPRPDFRPREPFLSRDPFHSLKRPRPPFARGPPFFAPKRPFFPPRY

SEQ ID NO: 12449 - protein, 1299 aa, Homo sapiens
MESSSSDYYNKDNEEESLLANVASLRHELKITEWSLQSLGEELSSVSPSENSDYAPNPSRSEKLILDVQPSHPGLLNYSPYENVCKISGSSTDFQKKPRDKMFSSSAPVDQEIKSLREKLNKLRQQNACLVTQNHSLMTKFESIHFELTQSRAKVSMLESAQQQAASVPILEEQIINLEAEVSAQDKVLREAENKLEQSQKMVIEKEQSLQESKEECIKLKVDLLEQTKQGKRAERQRNEALYNAEELSKAFQQYKKKVAEKLEKVQAEEEILERNLTNCEKENKRLQERCGLYKSELEILKEKLRQLKEENNNGKEKLRIMAVKNSEVMAQLTESRQSILKLESELENKDEILRDKFSLMNENRELKVRVAAQNERLDLCQQEIESSRVELRSLEKIISQLPLKRELFGFKSYLSKYQMSSFSNKEDRCIGCCEANKLVISELRIKLAIKEAEIQKLHANLTANQLSQSLITCNDSQESSKLSSLETEPVKLGGHQVAESVKDQNQHTMNKQYEKERQRLVTGIEELRTKLIQIEAENSDLKVNMAHRTSQFQLIQEELLEKASNSSKLESEMTKKCSQLLTLEKQLEEKIVAYSSIAAKNAELEQELMEKNEKIRSLETNINTEHEKICLAFEKAKKIHLEQHKEMEKQIERLEAQLEKKDQQFKEQEKTMSMLQQDIICKQHHLESLDRLLTESKGEMKKENMKKDEALKALQNQVSEETIKVRQLDSALEICKEELVLHLNQLEGNKEKFEKQLKKKSEEVYCLQKELKIKNHSLQETSEQNVILQHTLQQQQQMLQQETIRNGELEDTQTKLEKQVSKLEQELQKQRESSAEKLRKMEEKCESAAHEADLKRQKVIELTGTARQVKIEMDQYKEELSKMEKEIMHLKRDGENKAMHLSQLDMILDQTKTELEKKTNAVKELEKLQHSTETELTEALQKREVLETELQNAHGELKSTLRQLQELRDVLQKAQLSLEEKYTTIKDLTAELRECKMEIEDKKQELLEMDQALKERNWELKQRAAQVTHLDMTIREHRGEMEQKIIKLEGTLEKSELELKECNKQIESLNDKLQNAKEQLREKEFIMLQNEQEISQLKKEIERTQQRMKEMESVMKEQEQYIATQYKEAIDLGQELRLTREQVQNSHTELAEARHQQVQAQREIERLSSELEDMKQLSKEKDAHGNHLAEELGASKVREAHLEARMQAEIKKLSAEVESLKEAYHMEMISHQENHAKWKISADSQKSSVQQLNEQLEKAKLELEEAQDTVSNLHQQVQDRNEVIEAANEALLTKGENV

SEQ ID NO: 12450 - protein, 321 aa, Homo sapiens
MNDISQKAEIKEMLASDDEEDVSSKVEKAYVPKLTGTVKGRFAEMEKQRQEEQRKRTEEERKRRIEQDMLEKRKIQRELAKRAEQIEDINNTGTESASEEGDDSLLITVVPVKSYKTSGKMKKNFEDLEKEREEKERIKYEEDKRIRYEEQRPSLKEAKCLSLVMDDEIESEAKKESLSPGKLKLTFEELERQRQENRKKQAEEEARKRLEEEKRAFEEARRQMVNEDEENQDTAKIFKGYRPGKLKLSFEEMERQRREDEKRKAEEEARRRIEEEKKAFAEARRNMVVDDDSPEMYKTISQEFLTPGKLEINFEELLKQK

SEQ ID NO: 12451 - protein, 1094 aa, Homo sapiens
MAARAPPAAPAAEEPGNPGGPPRRKKSRSGASGLRRAFSWLRGKRRKKKAAGAEGAEPAAPRAKKAEDKAKRAKGKGRGSAKAENDKHLSVGPGQGPGSAVDEHQDNVFFPSGRPPHLEELHTQAQEGLRSLQHQEKQKLNKGGWDHGDTQSIQSSRTGPDEDNISFCSQTTSYVAESSTAEDALSIRSEMIQRKGSTFRPHDSFPKSGKSGRRRRERRSTVLGLPQHVQKELGLRNEREAPGTPRAPGARDAVRIPTVDGRPRGTSGMGARVSLQALEAEAEAGAETEAMLQRHIDRVYRDDTFVGRSTGTRAPPLTRPMSLAVPGLTGGAGPAEPLSPAMSISPQATYLSKLIPHAVLPPTVDVVALGRCSLRTLSRCSLHSASPASVRSLGRFSSVSSPQPRSRHPSSSSDTWSHSQSSDTIVSDGSTLSSKGGSEGQPESSTASNSVVPPPQGGSGRGSPSGGSTAEASDTLSIRSSGQLSGRSVSLRKLKRPPPPPRRTHSLHQRGLAVPDGPLGLPPKPERKQQPQLPRPPTTGGSEGAGAAPCPPNPANSWVPGLSPGGSRRPPRSPERTLSPSSGYSSQSGTPTLPPKGLAGPPASPGKAQPPKPERVTSLRSPGASVSSSLTSLCSSSSDPAPSDRSGPQILTPLGDRFVIPPHPKVPAPFSPPPSKPRSPNPAAPALAAPAVVPGPVSTTDASPQSPPTPQTTLTPLQESPVISKDQSPPPSPPPSYHPPPPPTKKPEVVVEAPSASETAEEPLQDPNWPPPPPPAPEEQDLSMADFPPPEEAFFSVASPEPAGPSGSPELVSSPAASSSSATALQIQPPGSPDPPPAPPAPAPASSAPGHVAKLPQKEPVGCSKGGGPPREDVGAPLVTPSLLQMVRLRSVGAPGGAPTPALGPSAPQKPLRRALSGRASPVPAPSSGLHAAVRLKACSLAASEGLSSAQPNGPPEAEPRPPQSPASTASFIFSKGSRKLQLERPVSPETQADLQRNLVAELRSISEQRPPQAPKKSPKAPPPVARKPSVGVPPPASPSYPRAEPLTAPPTNGLPHTQDRTKRELAENGGVLQLVGPEEKMGLPGSDSQKELA

SEQ ID NO: 12452 - protein, 1079 aa, Homo sapiens
MMSAQELVACLCREGEQHLALGELPLATAFYLAAFSCHAPSALQSVRTALAQARGAAVVATLESWCRGDSQIPAIHWDGMAVVSLTGSLASAFLGALCPDHPAAILHLLAGLLARGRHEEVVQRCSALLDSHAQQVLELRLTRALAWVLSGVQAADGVAAYLQAFASSADRTVAFIRTHQRPHLPALLSALQDYLSGHPEAGHSAGQQETGGQRLLAALDPRGTRSDTLSPEALLHSGRFEDCLAACSRALEAHPTGSEPQGERRAALLVTRAASAFFLDGRAQDVFWNLQEAFRESPSGARRQFQAVFSVQDQERVRAQAQEAADVGFARFQEAVRNHPELREDAGRELLAPVTRALRVLLRLAPAGARPALGARLAECLLLAGDAAGARAMCERLLRPARPEDPAGDRAGDRAPLLALRGFCALHAGDSRRAMEDFQTVVEQGAPHPGGCVRALCGRGLLRVLAGSAFLGTLDYVTACRLRPEEALLAAKAYVPWNQRGLLLVVLREEARGMLQRSPRAGPSRAQGRREAAETGGPTTQEGVACGVHQLATLLMELDSEDEASRLLAADALYRLGRLEETHKALLVALSRRPQAAPVLARLALLQLRRGFFYDANQLVKKLVQSGDTACLQPTLDVFCHEDRQLLQGHCHARALAILRARPGGADGRVHTKEAIAYLSLAIFAAGSQASESLLARARCYGFLGQKKTAMFDFNTVLRAEPGNVQALCGRALVHLALDQLQEAVDDIVSALKLGPGTVVPELRSLKPEAQALITQGLYSHCRALLSQLPDTGAPLEDKDTQGLLAVGEALIKIDSGQPHWHLLLADILMAQGSYEEAGTHLEKALHRAPTSEAARARLGLLQLKKGDVPGAARDLQSLAEVDAPDLSCLLHLLEASERQSLAQAAAQEAGTLLDAGQPRQALGYCSLSVLASGSSACHLRLRATCLAELQEFGRALRDLDHVLQEALGDGDLPRRAEDFCRQGRLLLSLGDEAAAAGAFAQALKLAPSLAQNSLCRQPGRAPTARMFLLRGQCCLEEQRHAEAWTAVESGLLVDPDHRGLKRLKARIRREASSGCWLQ

SEQ ID NO: 12453 - protein, 937 aa, Homo sapiens
MYNMRRLSLSPTFSMGFHLLVTVSLLFSHVDHVIAETEMEGEGNETGECTGSYYCKKGVILPIWEPQDPSFGDKIARATVYFVAMVYMFLGVSIIADRFMSSIEVITSQEKEITIKKPNGETTKTTVRIWNETVSNLTLMALGSSAPEILLSVIEVCGHNFTAGDLGPSTIVGSAAFNMFIIIALCVYVVPDGETRKIKHLRVFFVTAAWSIFAYTWLYIILSVISPGVVEVWEGLLTFFFFPICVVFAWVADRRLLFYKYVYKRYRAGKQRGMIIEHEGDRPSSKTEIEMDGKVVNSHVENFLDGALVLEVDERDQDDEEARREMARILKELKQKHPDKEIEQLIELANYQVLSQQQKSRAFYRIQATRLMTGAGNILKRHAADQARKAVSMHEVNTEVTENDPVSKIFFEQGTYQCLENCGTVALTIIRRGGDLTNTVFVDFRTEDGTANAGSDYEFTEGTVVFKPGDTQKEIRVGIIDDDIFEEDENFLVHLSNVKVSSEASEDGILEANHVSTLACLGSPSTATVTIFDDDHAGIFTFEEPVTHVSESIGIMEVKVLRTSGARGNVIVPYKTIEGTARGGGEDFEDTCGELEFQNDEIVKIITIRIFDREEYEKECSFSLVLEEPKWIRRGMKGGFTITDEYDDKQPLTSKEEEERRIAEMGRPILGEHTKLEVIIEESYEFKSTVDKLIKKTNLALVVGTNSWREQFIEAITVSAGEDDDDDECGEEKLPSCFDYVMHFLTVFWKVLFAFVPPTEYWNGWACFIVSILMIGLLTAFIGDLASHFGCTIGLKDSVTAVVFVALGTSVPDTFASKVAATQDQYADASIGNVTGSNAVNVFLGIGVAWSIAAIYHAANGEQFKVSPGTLAFSVTLFTIFAFINVGVLLYRRRPEIGGELGGPRTAKLLTSCLFVLLWLLYIFFSSLEAYCHIKGF

SEQ ID NO: 12454 - protein, 2016 aa, Homo sapiens
MAESASPPSSSAAAPAAEPGVTTEQPGPRSPPSSPPGLEEPLDGADPHVPHPDLAPIAFFCLRQTTSPRNWCIKMVCNPWFECVSMLVILLNCVTLGMYQPCDDMDCLSDRCKILQVFDDFIFIFFAMEMVLKMVALGIFGKKCYLGDTWNRLDFFIVMAGMVEYSLDLQNINLSAIRTVRVLRPLKAINRVPSMRILVNLLLDTLPMLGNVLLLCFFVFFIFGIIGVQLWAGLLRNRCFLEENFTIQGDVALPPYYQPEEDDEMPFICSLSGDNGIMGCHEIPPLKEQGRECCLSKDDVYDFGAGRQDLNASGLCVNWNRYYNVCRTGSANPHKGAINFDNIGYAWIVIFQVITLEGWVEIMYYVMDAHSFYNFIYFILLIIVGSFFMINLCLVVIATQFSETKQREHRLMLEQRQRYLSSSTVASYAEPGDCYEEIFQYVCHILRKAKRRALGLYQALQSRRQALGPEAPAPAKPGPHAKEPRHYHGKTKGQGDEGRHLGSRHCQTLHGPASPGNDHSGRELCPQHSPLDATPHTLVQPIPATLASDPASCPCCQHEDGRRPSGLGSTDSGQEGSGSGSSAGGEDEADGDGARSSEDGASSELGKEEEEEEQADGAVWLCGDVWRETRAKLRGIVDSKYFNRGIMMAILVNTVSMGIEHHEQPEELTNILEICNVVFTSMFALEMILKLAAFGLFDYLRNPYNIFDSIIVIISIWEIVGQADGGLSVLRTFRLLRVLKLVRFMPALRRQLVVLMKTMDNVATFCMLLMLFIFIFSILGMHIFGCKFSLRTDTGDTVPDRKNFDSLLWAIVTVFQILTQEDWNVVLYNGMASTSPWASLYFVALMTFGNYVLFNLLVAILVEGFQAEGDANRSYSDEDQSSSNIEEFDKLQEGLDSSGDPKLCPIPMTPNGHLDPSLPLGGHLGPAGAAGPAPRLSLQPDPMLVALGSRKSSVMSLGRMSYDQRSLSSSRSSYYGPWGRSAAWASRRSSWNSLKHKPPSAEHESLLSAERGGGARVCEVAADEGPPRAAPLHTPHAHHIHHGPHLAHRHRHHRRTLSLDNRDSVDLAELVPAVGAHPRAAWRAAGPAPGHEDCNGRMPSIAKDVFTKMGDRGDRGEDEEEIDYTLCFRVRKMIDVYKPDWCEVREDWSVYLFSPENRFRVLCQTIIAHKLFDYVVLAFIFLNCITIALERPQIEAGSTERIFLTVSNYIFTAIFVGEMTLKVVSLGLYFGEQAYLRSSWNVLDGFLVFVSIIDIVVSLASAGGAKILGVLRVLRLLRTLRPLRVISRAPGLKLVVETLISSLKPIGNIVLICCAFFIIFGILGVQLFKGKFYHCLGVDTRNITNRSDCMAANYRWVHHKYNFDNLGQALMSLFVLASKDGWVNIMYNGLDAVAVDQQPVTNHNPWMLLYFISFLLIVSFFVLNMFVGVVVENFHKCRQHQEAEEARRREEKRLRRLEKKRRKAQRLPYYATYCHTRLLIHSMCTSHYLDIFITFIICLNVVTMSLEHYNQPTSLETALKYCNYMFTTVFVLEAVLKLVAFGLRRFFKDRWNQLDLAIVLLSVMGITLEEIEINAALPINPTIIRIMRVLRIARVLKLLKMATGMRALLDTVVQALPQVGNLGLLFMLLFFIYAALGVELFGKLVCNDENPCEGMSRHATFENFGMAFLTLFQVSTGDNWNGIMKDTLRDCTHDERSCLSSLQFVSPLYFVSFVLTAQFVLINVVVAVLMKHLDDSNKEAQEDAEMDAELELEMAHGLGPGPRLPTGSPGAPGRGPGGAGGGGDTEGGLCRRCYSPAQENLWLDSVSLIIKDSLEGELTIIDNLSGSIFHHYSSPAGCKKCHHDKQEVQLAETEAFSLNSDRSSSILLGDDLSLEDPTACPPGRKDSKGELDPPEPMRVGDLGECFFPLSSTAVSPDPENFLCEMEEIPFNPVRSWLKHDSSQAPPSPFSPDASSPLLPMPAEFFHPAVSASQKGPEKGTGTGTLPKIALQGSWASLRSPRVNCTLLRQVPTPPRP

SEQ ID NO: 12455 - protein, 837 aa, Homo sapiens
MSLSHLYRDGEGRIDDDDDERENFEITDWDLQNEFNPNRQRHWQTKEEATYGVWAERDSDDERPSFGGKRARDYSAPVNFISAGLKKGAAEEAELEDSDDEEKPVKQDDFPKDFGPRKLKTGGNFKPSQKGFAGGTKSFMDFGSWERHTKGIGQKLLQKMGYVPGRGLGKNAQGIINPIEAKQRKGKGAVGAYGSERTTQSMQDFPVVDSEEEAEEEFQKELSQWRKDPSGSKKKPKYSYKTVEELKAKGRISKKLTAPQKELSQVKVIDMTGREQKVYYSYSQISHKHNVPDDGLPLQSQQLPQSGKEAKAPGFALPELEHNLQLLIDLTEQEIIQNDRQLQYERDMVVNLFHELEKMTEVLDHEERVISNLSKVLEMVEECERRMQPDCSNPLTLDECARIFETLQDKYYEEYRMSDRVDLAVAIVYPLMKEYFKEWDPLKDCTYGTEIISKWKSLLENDQLLSHGGQDLSADAFHRLIWEVWMPFVRNIVTQWQPRNCDPMVDFLDSWVHIIPVWILDNILDQLIFPKLQKEVENWNPLTDTVPIHSWIHPWLPLMQARLEPLYSPIRSKLSSALQKWHPSDSSAKLILQPWKDVFTPGSWEAFMVKNIVPKLGMCLGELVINPHQQHMDAFYWVIDWEGMISVSSLVGLLEKHFFPKWLQVLCSWLSNSPNYEEITKWYLGWKSMFSDQVLAHPSVKDKFNEALDIMNRAVSSNVGAYMQPGARENIAYLTHTERRKDFQYEAMQERREAENMAQRGIGVAASSVPMNFKDLIETKAEEHNIVFMPVIGKRHEGKQLYTFGRIVIYIDRGVVFVQGEKTWVPTSLQSLIDMAK

SEQ ID NO: 12456 - protein, 477 aa, Homo sapiens
MNWVGGSRSRVLIKQERRKQKEYFEKHRLKSKMKSLGVLSPVKNSAVSLDILNLYMVNQISCKKKIPETVRKPTHVNMNRDIKMPLRKHNLELTMSPHCVPSKLCLDDTETNVNCQRLSSKEDLGPVQSQGMDSYSMLHPQFSKIENCSFTPSSFSVELPSNRHISKLNFTSGIAPTPQKLAYEKKQNDQRSTVNCSDSLLSKLNKSQDVFSPSHKTTRFGTLFERLNSLGNRNLLTKSPAVIMDEDCRSTDEIRQSDYITEKHSIQHIWGKNGKEVSNFLEDVNQSTPNLLSENCDSFVSQNMINVLNIDEQRIKKTFNKCDYDSMGDTCVVTSSDKNHVTDRCIRNIFTVPELTFSNSTLNKTSYPEKCQPNKKYQREYNKNERNDLSTSFENDYYPSSSERKEKFENDYQEKTPQKSIQKYPANSMGNIPSEELHSKQSWDFGLDEILMEEGGIYSLKSKRISTKKICQYNCIS

SEQ ID NO: 12457 - protein, 399 aa, Homo sapiens
MWQLLAAACWMLLLGSMYGYDKKGNNANPEANMNISQIISYWGYPYEEYDVTTKDGYILGIYRIPHGRGCPGRTAPKPAVYLQHGLIASASNWICNLPNNSLAFLLADSGYDVWLGNSRGNTWSRKHLKLSPKSPEYWAFSLDEMAKYDLPATINFIIEKTGQKRLYYVGHSQGTTIAFIAFSTNPELAKKIKIFFALAPVVTVKYTQSPMKKLTTLSRRVVKVLFGDKMFHPHTLFDQFIATKVCNRKLFRRICSNFLFTLSGFDPQNLNMSRLDVYLSHNPAGTSVQNMLHWAQAVNSGQLQAFDWGNSDQNMMHFHQLTPPLYNITKMEVPTAIWNGGQDIVADPKDVENLLPQIANLIYYKLIPHYNHVDFYLGEDAPQEIYQDLIILMEEYLQN

SEQ ID NO: 12458 - protein, 203 aa, Homo sapiens
MSQTSLKQKKNEPGMRSSKESLEAEKRKESDKTGVRLSNQGSQESSLRKTDSRGYLVRSQWSRISRSPSTKAPSIDEPRSRNTSAKVELPSSPRSSHPRRPSCPGRWTRGLPRPQSPILAPGAAPKCKRIRRPGPKASCGKSARPGTRSRWNIRARPPPSGSPPASAGGSTPPPPSWTATLCPSSSSSSGRTRTTTRLPTGHP

SEQ ID NO: 12459 - protein, 1250 aa, Homo sapiens
MIKTEKSYPERRLRGVLEELSCGCCRFLSLADKDQGHSSRTRLDRERLKSCMRELENMGQQARMLRAQVKRHTVRDKLRLCQNFLQKLRFLADEPQHSIPDIFIWMMSNNKRVAYARVPSKDLLFSIVEEETGKDCAKVKTLFLKLPGKRGFGSAGWTVQAKVELYLWLGLSKQRKEFLCGLPCGFQEVKAAQGLGLHAFPPVSLVYTKKQAFQLRAHMYQARSLFAADSSGLSDPFARVFFINQSQCTEVLNETLCPTWDQMLVFDNLELYGEAHELRDDPPIIVIEIYDQDSMGKADFMGRTFAKPLVKMADEAYCPPRFPPQLEYYQIYRGNATAGDLLAAFELLQIGPAGKADLPPINGPVDVDRGPIMPVPMGIRPVLSKYRVEVLFWGLRDLKRVNLAQVDRPRVDIECAGKGVQSSLIHNYKKNPNFNTLVKWFEVDLPENELLHPPLNIRVVDCRAFGRYTLVGSHAVSSLRRFIYRPPDRSAPSWNTTVRLLRRCRVLCNGGSSSHSTGEVVVTMEPEVPIKKLETMVKLDATSEAVVKVDVAEEEKEKKKKKKGTAEEPEEEEPDESMLDWWSKYFASIDTMKEQLRQQEPSGIDLEEKEEVDNTEGLKGSMKGKEKARAAKEEKKKKTQSSGSGQGSEAPEKKKPKIDELKVYPKELESEFDNFEDWLHTFNLLRGKTGDDEDGSTEEERIVGRFKGSLCVYKVPLPEDVSREAGYDSTYGMFQGIPSNDPINVLVRVYVVRATDLHPADINGKADPYIAIRLGKTDIRDKENYISKQLNPVFGKSFDIEASFPMESMLTVAVYDWDLVGTDDLIGETKIDLENRFYSKHRATCGIAQTYSTHGYNIWRDPMKPSQILTRLCKDGKVDGPHFGPPGRVKVANRVFTGPSEIEDENGQRKPTDEHVALLALRHWEDIPRAGCRLVPEHVETRPLLNPDKPGIEQGRLELWVDMFPMDMPAPGTPLDISPRKPKKYELRVIIWNTDEVVLEDDDFFTGEKSSDIFVRGWLKGQQEDKQDTDVHYHSLTGEGNFNWRYLFPFDYLAAEEKIVISKKESMFSWDETEYKIPARLTLQIWDADHFSADDFLGAIELDLNRFPRGAKTAKQCTMEMATGEVDVPLVSIFKQKRVKGWWPLLARNENDEFELTGKVEAELHLLTAEEAEKNPVGLARNEPDPLEKPNRPDTSFIWFLNPLKSARYFLWHTYRWLLLKLLLLLLLLLLLALFLYSVPGYLVKKILGA

SEQ ID NO: 12460 - protein, 392 aa, Homo sapiens
MARAMAAAWPLLLVALLVLSWPPPGTGDVVVQAPTQVPGFLGDSVTLPCYLQVPNMEVTHVSQLTWARHGESGSMAVFHQTQGPSYSESKRLEFVAARLGAELRNASLRMFGLRVEDEGNYTCLFVTFPQGSRSVDIWLRVLAKPQNTAEVQKVQLTGEPVPMARCVSTGGRPPAQITWHSDLGGMPNTSQVPGFLSGTVTVTSLWILVPSSQVDGKNVTCKVEHESFEKPQLLTVNLTVYYPPEVSISGYDNNWYLGQNEATLTCDARSNPEPTGYNWSTTMGPLPPFAVAQGAQLLIRPVDKPINTTLICNVTNALGARQAELTVQVKEGPPSEHSGMSRNAIIFLVLGILVFLILLGIGIYFYWSKCSREVLWHCHLCPSSEHHQSCRN

SEQ ID NO: 12461 - protein, 542 aa, Homo sapiens
MELRSELPSVPGAATAAAATATGPPVASVASVAAAAAAAASLPVSVAGGLLRGPPLLLRAAEKYPRTPKCARCRNHGVVSALKGHKRYCRWKDCLCAKCTLIAERQRVMAAQVALRRQQAQEENEARELQLLYGTAEGLALAAANGIIPPRPAYEVFGSVCAADGGGPGAGAPAGTGGGAAGAGGSEAKLQKFDLFPKTLLQAGRPGSPLPPPVKPLSPDGADSGPGTSSPEVRPGSGSENGDGESFSGSPLARASKEAGGSCPGSAGPGGGGEEDSPGSASPLGSESGSEADKEEGEAAPAPGLGGGSGPRQRTPLDILTRVFPGHRRGVLELVLQGCGGDVVQAIEQVLNHHRGGLAAGLGPAAPPDKAAVGAAAAADDAWPSRVDAAAAAAAAAGGPGLPAPLQAGPAAPPHHRPLLAGAMAPGALGSLSSRSAFSPLQPNASHFGADAGAYPLGAPLGLSPLRLAYSAAAAHSRGLAFMAPYSTAGLVPTLGFRPPMDYAFSDLMRDRSAAAAAAVHKEPTYGGGLYGPMVNGAPEKQ

SEQ ID NO: 12462 - protein, 1025 aa, Homo sapiens
MHSMISSVDVKSEVPVGLEPISPLDLRTDLRMMMPVVDPVVREKQLQQELLLIQQQQQIQKQLLIAEFQKQHENLTRQHQAQLQEHIKLQQELLAIKQQQELLEKEQKLEQQRQEQEVERHRREQQLPPLRGKDRGRERAVASTEVKQKLQEFLLSKSATKDTPTNGKNHSVSRHPKLWYTAAHHTSLDQSSPPLSGTSPSYKYTLPGAQDAKDDFPLRKTESSVSSSSPGSGPSSPNNGPTGSVTENETSVLPPTPHAEQMVSQQRILIHEDSMNLLSLYTSPSLPNITLGLPAVPSQLNASNSLKEKQKCETQTLRQGVPLPGQYGGSIPASSSHPHVTLEGKPPNSSHQALLQHLLLKEQMRQQKLLVAGGVPLHPQSPLATKERISPGIRGTHKLPRHRPLNRTQSAPLPQSTLAQLVIQQQHQQFLEKQKQYQQQIHMNKLLSKSIEQLKQPGSHLEEAEEELQGDQAMQEDRAPSSGNSTRSDSSACVDDTLGQVGAVKVKEEPVDSDEDAQIQEMESGEQAAFMQQPFLEPTHTRALSVRQAPLAAVGMDGLEKHRLVSRTHSSPAASVLPHPAMDRPLQPGSATGIAYDPLMLKHQCVCGNSTTHPEHAGRIQSIWSRLQETGLLNKCERIQGRKASLEEIQLVHSEHHSLLYGTNPLDGQKLDPRILLGDDSQKFFSSLPCGGLGVDSDTIWNELHSSGAARMAVGCVIELASKVASGELKNGFAVVRPPGHHAEESTAMGFCFFNSVAITAKYLRDQLNISKILIVDLDVHHGNGTQQAFYADPSILYISLHRYDEGNFFPGSGAPNEVGTGLGEGYNINIAWTGGLDPPMGDVEYLEAFRTIVKPVAKEFDPDMVLVSAGFDALEGHTPPLGGYKVTAKCFGHLTKQLMTLADGRVVLALEGGHDLTAICDASEACVNALLGNELEPLAEDILHQSPNMNAVISLQKIIEIQSKYWKSVRMVAVPRGCALAGAQLQEETETVSALASLTVDVEQPFAQEDSRTAGEPMEEEPAL

SEQ ID NO: 12463 - protein, 431 aa, Homo sapiens
MGGWKGPGQRRGKEGPEARRRAAERGGGGGGGGVPAPRSPAREPRPRSCLLLPPPWGAAMTPDLLNFKKGWMSILDEPGEPPSPSLTTTSTSQWKKHWFVLTDSSLKYYRDSTAEEADELDGEIDLRSCTDVTEYAVQRNYGFQIHTKDAVYTLSAMTSGIRRNWIEALRKTVRPTSAPDVTKLSDSNKENALHSYSTQKGPLKAGEQRAGSEVISRGGPRKADGQRQALDYVELSPLTQASPQRARTPARTPDRLAKQEELERDLAQRSEERRKWFEATDSRTPEVPAGEGPRRGLGAPLTEDQQNRLSEEIEKKWQELEKLPLRENKRVPLTALLNQSRGERRGPPSDGHEALEKEVQALRAQLEAWRLQGEAPQSALRSQEDGHIPPGYISQLVGVITVPVLQTRPLSSERLCDLPKVTPPAGLKGGI

SEQ ID NO: 12464 - protein, 266 aa, Homo sapiens
MAVNVYSTSVTSENLSRHDMLAWVNDSLHLNYTKIEQLCSGAAYCQFMDMLFPGCVHLRKVKFQAKLEHEYIHNFKVLQAAFKKMGVDKIIPVEKLVKGKFQDNFEFIQWFKKFFDANYDGKDYNPLLARQGQDVAPPPNPVPQRTSPTGPKNMQTSGRLSNVAPPCILRKNPPSARNGGHETDAQILELNQQLVDLKLTVDGLEKERDFYFSKLRDIELICQEHESENSPVISGIIGILYATEEGFAPPEDDEIEEHQQEDQDEY

SEQ ID NO: 12465 - protein, 689 aa, Homo sapiens
MGSSGLGKAATLDELLCTCIEMFDDNGELDNSYLPRIVLLMHRWYLSSTELAEKLLCMYRNATGESCNEFRLKICYFMRYWILKFPAEFNLDLGLIRMTEEFREVASQLGYEKHVSLIDISSIPSYDWMRRVTQRKKVSKKGKACLLFDHLEPIELAEHLTFLEHKSFRRISFTDYQSYVIHGCLENNPTLERSIALFNGISKWVQLMVLSKPTPQQRAEVITKFINVAKKLLQLKNFNTLMAVVGGLSHSSISRLKETHSHLSSEVTKNWNEMTELVSSNGNYCNYRKAFADCDGFKIPILGVHLKDLIAVHVIFPDWTEENKVNIVKMHQLSVTLSELVSLQNASHHLEPNMDLINLLTLSLDLYHTEDDIYKLSLVLEPRNSKSPTSPTTPNKPVVPLEWALGVMPKPDPTVINKHIRKLVESVFRNYDHDHDGYISQEDFESIAANFPFLDSFCVLDKDQDGLISKDEMMAYFLRAKSQLHCKMGPGFIHNFQEMTYLKPTFCEHCAGFLWGIIKQGYKCKDCGANCHKQCKDLLVLACRRFARAPSLSSGHGSLPGSPSLPPAQDEVFEFPGVTAGHRDLDSRAITLVTGSSRKISVRLQRATTSQATQTEPVWSEAGWGDSGSHTFPKMKSKFHDKAAKDKGFAKWENEKPRVHAGVDVVDRGTEFELDQDEGEETRQDGEDG

SEQ ID NO: 12466 - protein, 918 aa, Homo sapiens
MKRTKCADIDVETPDSILVNTNLRALINKHTFSVLPGDCQQRLLLLLPEVDRQVGPDGLMKLNGSALNNEFFTSAAQGWKERLSEGEFTPEMQVRIRQEIEKEKKVEPWKEQFFESYYGQSSGLSLEDSKKLTASPSDPKVKKTPAEQPKSMPVSEASLIRIVPVVSQSECKEEALQMSSPGRKEECESQGEVQPNFSTSSEPLLSSALNTHELSSILPIKCPKDEDLLEQKPVTSAEQESEKNHLTTASNYNKSESQESLVTSPSKPKSPGVEKPIVKPTAGAGPQETNMKEPLATLVDQSPESLKRKSSLTQEEAPVSWEKRPRVTENRQHQQPFQVSPQPFLNRGDRIQVRKVPPLKIPVSRISPMPFHPSQVSPRARFPVSITSPNRTGARTLADIKAKAQLVKAQRAAAAAAAAAAAAASVGGTIPGPGPGGGQGPGEGGEGQTARGGSPGSDRVSETGKGPTLELAGTGSRGGTRELLPCGPETQPQSETKTTPSQAQPHSVSGAQLQQTPPVPPTPAVSGACTSVPSPAHIEKLDNEKLNPTRATATVASVSHPQGPSSCRQEKAPSPTGFQLEDISTSQRFMLGFAGRRTSKPAMAGHYLLNISTYGRGSESFRRTHSVNPEDRFCLSSPTEALKMGYTDCKNATGESSSSKEDDTDEESTGDEQESVTVKEEPQVSQSAGKGDTSSGPHSRETLSTSDCLASKNVKAEIPLNEQTTLSKENYLFTRGQTFDEKTLARDLIQAAQKQMAHAVRGKAIRSSPELFSSTVLPLPADSPTHQPLLLPPLQTPKLYGSPTQIGPSYRGMINVSTSSDMDHNSAVPGSQVSSNVGDVMSFSVTVTTIPASQAMNPSSHGQTIPVQAFSEENSIEGTPSKCYCRLKAMIMCKGCGAFCHDDCIGPSKLCVSCLVVR

SEQ ID NO: 12467 - protein, 398 aa, Homo sapiens
MMWLLLTTTCLICGTLNAGGFLDLENEVNPEVWMNTSEIIIYNGYPSEEYEVTTEDGYILLVNRIPYGRTHARSTGPRPVVYMQHALFADNAYWLENYANGSLGFLLADAGYDVWMGNSRGNTWSRRHKTLSETDEKFWAFSFDEMAKYDLPGVIDFIVNKTGQEKLYFIGHSLGTTIGFVAFSTMPELAQRIKMNFALGPTISFKYPTGIFTRFFLLPNSIIKAVFGTKGFFLEDKKTKIASTKICNNKILWLICSEFMSLWAGSNKKNMNQSRMDVYMSHAPTGSSVHNILHIKQLYHSDEFRAYDWGNDADNMKHYNQSHPPIYDLTAMKVPTAIWAGGHDVLVTPQDVARILPQIKSLHYFKLLPDWNHFDFVWGLDAPQRMYSEIIALMKAYS

SEQ ID NO: 12468 - protein, 560 aa, Homo sapiens
MLRGTLLCAVLGLLRAQPFPCPPACKCVFRDAAQCSGGDVARISALGLPTNLTHILLFGMGRGVLQSQSFSGMTVLQRLMISDSHISAVAPGTFSDLIKLKTLRLSRNKITHLPGALLDKMVLLEQLFLDHNALRGIDQNMFQKLVNLQELALNQNQLDFLPASLFTNLENLKLLDLSGNNLTHLPKGLLGAQAKLERLLLHSNRLVSLDSGLLNSLGALTELQFHRNHIRSIAPGAFDRLPNLSSLTLSRNHLAFLPSALFLHSHNLTLLTLFENPLAELPGVLFGEMGGLQELWLNRTQLRTLPAAAFRNLSRLRYLGVTLSPRLSALPQGAFQGLGELQVLALHSNGLTALPDGLLRGLGKLRQVSLRRNRLRALPRALFRNLSSLESVQLDHNQLETLPGDVFGALPRLTEVLLGHNSWRCDCGLGPFLGWLRQHLGLVGGEEPPRCAGPGAHAGLPLWALPGGDAECPGPRGPPPRPAADSSSEAPVHPALAPNSSEPWVWAQPVTTGKGQDHSPFWGFYFLLLAVQAMITVIIVFAMIKIGQLFRKLIRERALG

SEQ ID NO: 12469 - protein, 277 aa, Homo sapiens
MLLSLKPSEAPELDEDEGFGDWSQRPEQRQQHEGAQGALDSGEPPQCRSPEGEQEDRPGLHAYEKEDSDEVHLEELSLSKEGPGPEDTVQDNLGAAGAEEEQEEHQKCQQPRTPSPLVLEGTIEQSSPPLSPTTKLIDRTESLNRSIEKSNSVKKSQPDLPISKIDQWLEQYTQAIETAGRTPKLARQASIELPSMAVASTKSRWETGEVQAQSAAKTPSCKDIVAGDMSKKSLWEQKGGSKTSSTIKSTPSGKRYKFVATGHGKYEKVLVEGGPAP

SEQ ID NO: 12470 - protein, 1442 aa, Homo sapiens
MSIAIPLGVTTSDTSYSDMAAGSDPESVEASPAVNEKSVYSTHNYGTTQRHGCRGLPYATIIPRSDLNGLPSPVEERCGDSPNSEGETVPTWCPCGLSQDGFLLNCDKCRGMSRGKVIRLHRRKQDNISGGDSSATESWDEELSPSTVLYTATQHTPTSITLTVRRTKPKKRKKSPEKGRAAPKTKKIKNSPSEAQNLDENTTEGWENRIRLWTDQYEEAFTNQYSADVQNALEQHLHSSKEFVGKPTILDTINKTELACNNTVIGSQMQLQLGRVTRVQKHRKILRAARDLALDTLIIEYRGKVMLRQQFEVNGHFFKKPYPFVLFYSKFNGVEMCVDARTFGNDARFIRRSCTPNAEVRHMIADGMIHLCIYAVSAITKDAEVTIAFDYEYSNCNYKVDCACHKGNRNCPIQKRNPNATELPLLPPPPSLPTIGAETRRRKARRKELEMEQQNEASEENNDQQSQEVPEKVTVSSDHEEVDNPEEKPEEEKEEVIDDQENLAHSRRTREDRKVEAIMHAFENLEKRKKRRDQPLEQSNSDVEITTTTSETPVGEETKTEAPESEVSNSVSNVTIPSTPQSVGVNTRRSSQAGDIAAEKLVPKPPPAKPSRPRPKSRISRYRTSSAQRLKRQKQANAQQAELSQAALEEGGSNSLVTPTEAGSLDSSGENRPLTGSDPTVVSITGSHVNRAASKYPKTKKYLVTEWLNDKAEKQECPVECPLRITTDPTVLATTLNMLPGLIHSPLICTTPKHYIRFGSPFIPERRRRPLLPDGTFSSCKKRWIKQALEEGMTQTSSVPQETRTQHLYQSNENSSSSSICKDNADLLSPLKKWKSRYLMEQNVTKLLRPLSPVTPPPPNSGSKSPQLATPGSSHPGEEECRNGYSLMFSPVTSLTTASRCNTPLQFELCHRKDLDLAKVGYLDSNTNSCADRPSLLNSGHSDLAPHPSLGPTSETGFPSRSGDGHQTLVRNSDQAFRTEFNLMYAYSPLNAMPRADGLYRGSPLVGDRKPLHLDGGYCSPAEGFSSRYEHGLMKDLSRGSLSPGGERACEGVPSAPQNPPQRKKVSLLEYRKRKQEAKENSAGGGGDSAQSKSKSAGAGQGSSNSVSDTGAHGVQGSSARTPSSPHKKFSPSHSSMSHLEAVSPSDSRGTSSSHCRPQENISSRWMVPTSVERLREGGSIPKVLRSSVRVAQKGEPSPTWESNITEKDSDPADGEGPETLSSALSKGATVYSPSRYSYQLLQCDSPRTESQSLLQQSSSPFRGHPTQSPGYSYRTTALRPGNPPSHGSSESSLSSTSYSSPAHPVSTDSLAPFTGTPGYFSSQPHSGNSTGSNLPRRSCPSSAASPTLQGPSDSPTSDSVSQSSTGTLSSTSFPQNSRSSLPSDLRTISLPSAGQSAVYQASRVSAVSNSQHYPHRGSGGVHQYRLQPLQGSGVKTQTGLS

SEQ ID NO: 12471 - protein, 257 aa, Homo sapiens
MDFSRLHMYSPPQCVPENTGYTYALSSSYSSDALDFETEHKLDPVFDSPRMSRRSLRLATTACTLGDGEAVGADSGTSSAVSLKNRAARTTKQRRSTNKSAFSINHVSRQVTSSGVSHGGTVSLQDAVTRRPPVLDESWIREQTTVDHFWGLDDDGDLKGGNKAAIQGNGDVGAAAATAHNGFSCSNCSMLSERKDVLTAHPAAPGPVSRVYSRDRNQKCKSQSFKTQKKVCFPNLIFPFCKSQCLHYLSWRLKIIP

SEQ ID NO: 12472 - protein, 437 aa, Homo sapiens
MQDDKTGGVPIRTVKSFLSKIPSVVTGTDIVQWLMKNLSIEDPVEAIHLGSLIAAQGYIFPISDHVLTMKDDGTFYRFQAPYFWPSNCWEPENTDYAIYLCKRTMQNKARLELADYEAENLARLQRAFARKWEFIFMQAEAQVKIDRKKDKTERKILDSQERAFWDVHRPVPGCVNTTEMDIRKCRRLKNPQKVKKSVYGVTEESQAQSPVHVLSQPIRKTTKEDIRKQITFLNAQIDRHCLKMSKVAESLIAYTEQYVEYDPLITPAEPSNPWISDDVALWDIEMSKEPSQQRVKRWGFSFDEILKDQVGRDQFLRFLESEFSSENLRFWLAVQDLKKQPLQDVAKRVEEIWQEFLAPGAPSAINLDSHSYEITSQNVKDGGRYTFEDAQEHIYKLMKSDSYARFLRSNAYQDLLLAKKKGKSLAGKRLTGLMQSS

SEQ ID NO: 12473 - protein, 380 aa, Homo sapiens
MDAATLTYDTLRFAEFEDFPETSEPVWILGRKYSIFTEKDEILSDVASRLWFTYRKNFPAIGGTGPTSDTGWGCMLRCGQMIFAQALVCRHLGRDWRWTQRKRQPDSYFSVLNAFIDRKDSYYSIHQIAQMGVGEGKSIGQWYGPNTVAQVLKKLAVFDTWSSLAVHIAMDNTVVMEEIRRLCRTSVPCAGATAFPADSDRHCNGFPAGAEVTNRPSPWRPLVLLIPLRLGLTDINEAYVETLKHCFMMPQSLGVIGGKPNSAHYFIGYVGEELIYLDPHTTQPAVEPTDGCFIPDESFHCQHPPCRMSIAELDPSIAVGFFCKTEDDFNDWCQQVKKLSLLGGALPMFELVELQPSHLACPDVLNLSLGESCQVQILLM

SEQ ID NO: 12474 - protein, 843 aa, Homo sapiens
MAAHVGSRCASRSSAGSSNTGTRSSATPGARGPGCWRETLTHSVTPARASCSSAPAARALPRKSEGATRTNGGGWKTTDMEGAHASLSLEDEVSGAGSRQRPLEGKGGETPAAEEPGSLKNYAVFATRDVSAAPEKEEEEAEGPLRAQDLRESYIQLVQGVQEWQDGCMYQGEFGLNMKLGYGKFSWPTGESYHGQFYRDHCHGLGTYMWPDGSSFTGTFYLSHREGYGTMYMKTRLFQTHCHNDIVNLLLDCGADVNKCSDEGLTALSMCFLLHYPAQSFKPNVAERTIPEPQEPPKFPVVPILSSSFMDTNLESLYYEVNVPSQGSYELRPPPAPLLLPRVSGSHEGGHFQDTGQCGGSIDHRSSSLKGDSPLVKGSLGHVESGLEDVLGNTDRGSLCSAETKFESNVCVCDFSIELSQAMLERSAQSHSLLKMASPSPCTSSFDKGTMRRMALSMIERRKRWRTIKLLLRRGADPNLCCVPMQVLFLAVKAGDVDGVRLLLEHGARTDICFPPQLSTLTPLHIAAALPGEEGVQIVELLLHAITDVDAKASDEDDTYKPGKLDLLPSSLKLSNEPGPPQAYYSTDTALPEEGGRTALHMACEREDDNKVVKELLTQGADPNLPLTKGLGSALCVACDLTYEHQRNMDSKLALIDRLISHGADILKPVMLRQGEKEAVGTAVDYGYFRFFQDRRIARCPFHTLMPAERETFLARKRLLEYMGLQLRQAVFAKESQWDPTWLYLCKRAELIPSHRMKKKGPSLPRGLDVKEQGQIPFFKFCYQCGRSIGVRLLPCPRCYGILTCSKYCKTKAWTEFHKKDCGDLVAIVTQLEQVSRRREEFQ

SEQ ID NO: 12475 - protein, 1081 aa, Homo sapiens
MDSLASLVLCGVSLLLSGTVEGAMDLILINSLPLVSDAETSLTCIASGWRPHEPITIGRDFEALMNQHQDPLEVTQDVTREWAKKVVWKREKASKINGAYFCEGRVRGEAIRIRTMKMRQQASFLPATLTMTVDKGDNVNISFKKVLIKEEDAVIYKNGSFIHSVPRHEVPDILEVHLPHAQPQDAGVYSARYIGGNLFTSAFTRLIVRRCEAQKWGPECNHLCTACMNNGVCHEDTGECICPPGFMGRTCEKACELHTFGRTCKERCSGQEGCKSYVFCLPDPYGCSCATGWKGLQCNEGIQRMTPKIVDLPDHIEVNSGKFNPICKASGWPLPTNEEMTLVKPDGTVLHPKDFNHTDHFSVAIFTIHRILPPDSGVWVCSVNTVAGMVEKPFNISVKVLPKPLNAPNVIDTGHNFAVINISSEPYFGDGPIKSKKLLYKPVNHYEAWQHIQVTNEIVTLNYLEPRTEYELCVQLVRRGEGGEGHPGPVRRFTTASIGLPPPRGLNLLPKSQTTLNLTWQPIFPSSEDDFYVEVERRSVQKSDQQNIKVPGNLTSVLLNNLHPREQYVVRARVNTKAQGEWSEDLTAWTLSDILPPQPENIKISNITHSSAVISWTILDGYSISSITIRYKVQGKNEDQHVDVKIKNATITQYQLKGLEPETAYQVDIFAENNIGSSNPAFSHELVTLPESQAPADLGGGKMLLIAILGSAGMTCLTVLLAFLIILQLKRANVQRRMAQAFQNVREEPAVQFNSGTLALNRKVKNNPDPTIYPVLDWNDIKFQDVIGEGNFGQVLKARIKKDGLRMDAAIKRMKEYASKDDHRDFAGELEVLCKLGHHPNIINLLGACEHRGYLYLAIEYAPHGNLLDFLRKSRVLETDPAFAIANSTASTLSSQQLLHFAADVARGMDYLSQKQFIHRDLAARNILVGENYVAKIADFGLSRGQEVYVKKTMGRLPVRWMAIESLNYSVYTTNSDVWSYGVLLWEIVSLGGTPYCGMTCAELYEKLPQGYRLEKPLNCDDEVYDLMRQCWREKPYERPSFAQILVSLNRMLEERKTYVNTTLYEKFTYAGIDCSAEEAA

SEQ ID NO: 12476 - protein, 1077 aa, Homo sapiens
MPRVHNIKKSLTPHISCVTNESDNLLDFLPDRLRAKLLPFQKDGIIFALKRNGRCMVADEMGLGKTIQAIGITYFYKEEWPLLIVVPSSLRYPWTEEIEKWIPELSPEEINVIQNKTDVRRMSTSKVTVLGYGLLTADAKTLIDALNNQNFKVVIVDESHYMKSRNATRSRILLPIVQKARRAILLTGTPALGRPEELFMQIEALFPQKFGRWTDYAKRYCNAHIRYFGKRPQWDCRGASNLNELHQLLSDIMIRRLKTEVLTQLPPKVRQRIPFDLPSAAAKELNTSFEEWEKIMRTPNSGAMETVMGLITRMFKQTAIAKAGAVKDYIKMMLQNDSLKFLVFAHHLSMLQACTEAVIENKTRYIRIDGSVSSSERIHLVNQFQKDPDTRVAILSIQAAGQGLTFTAASHVVFAELYWDPGHIKQAEDRAHRIGQCSSVNIHYLIANGTLDTLMWGMLNRKAQVTGSTLNGRKEKIQAEEGDKEKWDFLQFAEAWTPNDSSEELRKEALFTHFEKEKQHDIRSFFVPQPKKRQLMTSCDESKRFREENTVVSSDPTKTAARDIIDYESDVEPETKRLKLAASEDHCSPSEETPSQSKQIRTPLVESVQEAKAQLTTPAFPVEGWQCSLCTYINNSELPYCEMCETPQGSAVMQIDSLNHIQDKNEKDDSQKDTSKKVQTISDCEKQALAQSEPGQLADSKEETPKIEKEDGLTSQPEQWKSSDTLPVYDTLMFCASRNTDRIHIYTKDGKQMSCNFIPLDIKLDLWEDLPASFQLKQYRSLILRFVREWSSLTAMKQRIIRKSGQLFCSPILALEEITKQQTKQNCTKRYITKEDVAVASMDKVKNVGGHVRLITKESRPRDPFTKKLLEDGACVPFLNPYTVQADLTVKPSTSKGYLQAVDNEGNPLCLRCQQPTCQTKQACKANSWDSRFCSLKCQEEFWIRSNNSYLRAKVFETEHGVCQLCNVNAQELFLRLRDAPKSQRKNLLYATWTSKLPLEQLNEMIRNPGEGHFWQVDHIKPVYGGGGQCSLDNLQTLCTVCHKERTARQAKERSQVRRQSLASKHGSDITRFLVKK

SEQ ID NO: 12477 - protein, 376 aa, Homo sapiens
MMMMALSKTFGQKPVKFQLEDDGEFYMIGSEVGNYLRMFRGSLYKRYPSLWRRLATVEERKKIVASSHDHGYTTLATSVTLLKASEVEEILDGNDEKYKAVSISTEPPTYLREQKAKRNSQWVPTLPNSSHHLDAVPCSTTINRNRMGRDKKRTFPLCFDDHDPAVIHENASQPEVLVPIRLDMEIDGQKLRDAFTWNMNEKLMTPEMFSEILCDDLDLNPLTFVPAIASAIRQQIESYPTDSILEDQSDQRVIIKLNIHVGNISLVDQFEWDMSEKENSPEKFALKLCSELGLGGEFVTTIAYSIRGQLSWHQKTYAFSENPLPTVEIAIRNTGDADQWCPLLETLTDAEMEKKIRDQDRNTRRMRRLANTAPAW

SEQ ID NO: 12478 - protein, 125 aa, Homo sapiens
MLRRRAQEEDSTVLIDVSPPEAEKRGSYGSTAHASEPGGQQAAACRAGSPAKPRIDFVLVWEEDLKLDRQQDSAARDRTDMHRTWRETFLDNLRAAGLCVDQVRGGCHGQGPRPCIHSVTHDLAA

SEQ ID NO: 12479 - protein, 454 aa, Homo sapiens
MELATRYQIPKEVADIFNAPSDDEEFVGFRDDVPMETLSSEESCDSFDSLESGKQQDVRFHSKYFTEELRRIFIEDTDSETEDFAGFTQSDLNGKTNPEVMVVESDLSDDGKASLVSEEEEDEEEDKATPRRSRSRRSSIGLRVAFQFPTKKLANKPDKNSSSEQLFSSARLQNEKKTILERKKDCRQVIQREDSTSESEDDSRDESQESSDALLKRTMNIKENKAMLAQLLAELNSMPDFFPVRTPTSASRKKTVRRAFSEGQITRRMNPTRSARPPEKFALENFTVSAAKFAEEFYSFRRRKTIGGKCREYRRRHRISSFRPVEDITEEDLENVAITVRDKIYDKVLGNTCHQCRQKTIDTKTVCRNQGCCGVRGQFCGPCLRNRYGEDVRSALLDPDWVCPPCRGICNCSYCRKRDGRCATGILIHLAKFYGYDNVKEYLESLQKELVEDN

SEQ ID NO: 12480 - protein, 717 aa, Homo sapiens
MSRRSQRLTRYSQGDDDGSSSSGGSSVAGSQSTLFKDSPLRTLKRKSSNMKRLSPAPQLGPSSDAHTSYYSESLVHESWFPPRSSLEELHGDANWGEDLRVRRRRGTGGSESSRASGLVGRKATEDFLGSSSGYSSEDDYVGYSDVDQQSSSSRLRSAVSRAGSLLWMVATSPGRLFRLLYWWAGTTWYRLTTAASLLDVFVLTRRFSSLKTFLWFLLPLLLLTCLTYGAWYFYPYGLQTFHPALVSWWAAKDSRRPDEGWEARDSSPHFQAEQRVMSRVHSLERRLEALAAEFSSNWQKEAMRLERLELRQGAPGQGGGGGLSHEDTLALLEGLVSRREAALKEDFRRETAARIQEELSALRAEHQQDSEDLFKKIVRASQESEARIQQLKSEWQSMTQESFQESSVKELRRLEDQLAGLQQELAALALKQSSVAEEVGLLPQQIQAVRDDVESQFPAWISQFLARGGGGRVGLLQREEMQAQLRELESKILTHVAEMQGKSAREAAASLSLTLQKEGVIGVTEEQVHHIVKQALQRYSEDRIGLADYALESGGASVISTRCSETYETKTALLSLFGIPLWYHSQSPRVILQPDVHPGNCWAFQGPQGFAVVRLSARIRPTAVTLEHVPKALSPNSTISSAPKDFAIFGFDEDLQQEGTLLGKFTYDQDGEPIQTFHFQAPTMATYQVVELRILTNWGHPEYTCIYRFRVHGEPAH

SEQ ID NO: 12481 - protein, 645 aa, Homo sapiens
MEPLKFRDVAIEFSLEEWQCLDTIQQNLYRNVMLENYRNLVFLGIVVSKPDLITCLEQEKEPWTRKRHRMVAEPPVICSHFAQDFSPEQNIKDSFQKVTPRRYGKCEHENLQLSKSVDECKVQKGGYNGLNQCLPTTQSKIFQCDKYMKIFHKFSNLNGHKVRHTRKKPFKYKEFGKSFCIFSNLTQHKIICTRVNFYKCEDCGKAFNGSSIFTKHKRIHIGEKSYICEECGKACNQFTNLTTHKIIYTRDKLYKREECSKAFNLSSHITTHTIIHTGENPYKREECDKAFNQSLTLTTHKIIHTREKLNEYKECGKAFNQSSHLTRHKIIHTGEKPYKCEECGKAFNQSSHLTRHKIIHTGEKPYRCEECGKAFRQSSHLTTHKIIHTGEKPYKCEECGKAFNKSSHLTRHKSIHTGEKPYQCEKCGKASNQSSNLTEHKNIHTEEKPYKCEECGKAFNQFSNLTTHKRIHTGEKPYKCEECGKAFNQSSILTTHKRIHTGEKSYKCEECGKAFYRSSKLTEHKKIHTGEKPYTCEECGKAFNHSSHLATHKVIHTGEKPYQCEECGKAFNQSSHLTRHKRIHTGEKPYQCEKCGKAFNQSSNLTGHKKIHTGEKLYKPKRCNSDFENTSKFSKHKRNYAGEKS

SEQ ID NO: 12482 - protein, 691 aa, Homo sapiens
MSALLQDPMIAGQVSKPLLSVRSEMNAELRGEDKAATSDSELNEPLLAPVESNDSEDTPSKLFGARGNPALSDPGTPDQHQASQTHPPFPVGPQPLLTAQQLASAVAGVMPGGPPALNQPILIPFNMAGQLGGQQGLVLTLPTANLTNIQGLVAAAAAGGIMTLPLQNLQATSSLNSQLQQLQLQLQQQQQQQQQQPPPSTNQHPQPAPQAPSQSQQQPLQPTPPQQPPPASQQPPAPTSQLQQAPQPQQHQPHSHSQNQNQPSPTQQSSSPPQKPSQSPGHGLPSPLTPPNPLQLVNNPLASQAAAAAAAMSSIASSQAFGNALSSLQGVTGQLVTNAQGQIIGTIPLMPNPGPSSQAASGTQGLQVQPITPQLLTNAQGQIIATVIGNQILPVINTQGITLSPIKPGQQLHQPSQTSVGQAASQGNLLHLAHSQASMSQSPVRQASSSSSSSSSSSALSVGQLVSNPQTAAGEVDGVNLEEIREFAKAFKIRRLSLGLTQTQVGQALSATEGPAYSQSAICRHTILRSHFFLPQEAQENTIASSLTAKLNPGLLYPARFEKLDITPKSAQKIKPVLERWMAEAEARHRAGMQNLTEFIGSEPSKKRKRRTSFTPQALEILNAHFEKNTHPSGQEMTEIAEKLNYDREVVRVWFCNKRQALKNTIKRLKQHEPATAVPLEPLTDSLEENS

SEQ ID NO: 12483 - protein, 725 aa, Homo sapiens
MEQSNDSLRVNHNDGEESKTSAQVFEHLICMDSRDSSFGQNDSPTVLPITTREANNSLISQNIPGPLTQTQTLSAEQFHLVDQNGQAIQYELQSLGESNAQMMIVASPTENGQVLRVIPPTQTGMAQVIIPQGQLVDVNSPRDVPEEKPSNRNLPTVRVDTLADNTSNYILHPQTSFPLPKKSVTGMLEEPLLGPLQPLSSNTPIWACRLRSCEKIGDSYRGYCVSETELESVLTFHKQQTQSVWGTRQSPSPAKPATRLMWKSQYVPYDGIPFVNAGSRAVVMECQYGPRRKGFQLKKVSEQESRSCQLYKATCPARIYIKKVQKFPEYRVPTDPKIDKKIIRMEQEKAFNMLKKNLVDAGGVLRWYVQLPTQQAHQYHELETPCLTLSPSPFPVSSLEEEETAVRDENCALPSRLHPQVAHKIQELVSQGIEQVYAVRKQLRKFVERELFKPDEVPERHNLSFFPTVNDIKNHIHEVQKSLRNGDTVYNSEIIPATLQWTTDSGNILKETMTVTFAEGNSPGESITTKVETNQTRGSLSPEPTHLLSSLSSFQPKIFTQLQGLQLQPRYTSPDESPAVVSVNNQPSSSPSGLLDTIGSAVMNNNSLLLGQSHSLQRDTCLTQNNSTASTMGNLPEPDQNLVAMDELVEVGDVEDTGNLEGTVHRILLGDVQTIPIQIIDNHSALIEENPESTISVSQVKQEPKEPALSMEAKKTVDYKKLSAT

SEQ ID NO: 12484 - protein, 615 aa, Homo sapiens
MCSEARLARRLRDALREEEPWAVEELLRCGADPNLVLEDGAAAVHLAAGARHPRGLRCLGALLRQGGDPNARSVEALTPLHVAAAWGCRRGLELLLSQGADPALRDQDGLRPLDLALQQGHLECARVLQDLDTRTRTRTRIGAETQEPEPAPGTPGLSGPTDETLDSIALQKQPCRGDNRDIGLEADPGPPSLPVPLETVDKHGSSASPPGHWDYSSDASFVTAVEVSGAEDPASDTPPWAGSLPPTRQGLLHVVHANQRVPRSQGTEAELNARLQALTLTPPNAAGFQSSPSSMPLLDRSPAHSPPRTPTPGASDCHCLWEHQTSIDSDMATLWLTEDEASSTGGREPVGPCRHLPVSTVSDLELLKGLRALGENPHPITPFTRQLYHQQLEEAQIAPGPEFSGHSLELAAALRTGCIPDVQADEDALAQQFEQPDPARRWREGVVKSSFTYLLLDPRETQDLPARAFSLTPAERLQTFIRAIFYVGKGTRARPYVHLWEALGHHGRSRKQPHQACPKVRQILDIWASGCGVVSLHCFQHVVAVEAYTREACIVEALGIQTLTNQKQGHCYGVVAGWPPARRRRLGVHLLHRALLVFLAEGERQLHPQDIQARG

SEQ ID NO: 12485 - protein, 785 aa, Homo sapiens
MDFSRLHMYSPPQCVPENTGYTYALSSSYSSDALDFETEHKLDPVFDSPRMSRRSLRLATTACTLGDGEAVGADSGTSSAVSLKNRAARTTKQRRSTNKSAFSINHVSRQVTSSGVSHGGTVSLQDAVTRRPPVLDESWIREQTTVDHFWGLDDDGDLKGGNKAAIQGNGDVGAAAATAHNGFSCSNCSMLSERKDVLTAHPAAPGPVSRVYSRDRNQKCYFLLQILRRIGAVGQAVSRTAWSALWLAVVAPGKAASGVFWWLGIGWYQFVTLISWLNVFLLTRCLRNICKFLVLLIPLFLLLAGLSLRGQGNFFSFLPVLNWASMHRTQRVDDPQDVFKPTTSRLKQPLQGDSEAFPWHWMSGVEQQVASLSGQCHHHGENLRELTTLLQKLQARVDQMEGGAAGPSASVRDAVGQPPRETDFMAFHQEHEVRMSHLEDILGKLREKSEAIQKELEQTKQKTISAVGEQLLPTVEHLQLELDQLKSELSSWRHVKTGCETVDAVQERVDVQVREMVKLLFSEDQQGGSLEQLLQRFSSQFVSKGDLQTMLRDLQLQILRNVTHHVSVTKQLPTSEAVVSAVSEAGASGITEAQARAIVNSALKLYSQDKTGMVDFALESGGGSILSTRCSETYETKTALMSLFGIPLWYFSQSPRVVIQPDIYPGNCWAFKGSQGYLVVRLSMMIHPAAFTLEHIPKTLSPTGNISSAPKDFAVYGLENEYQEEGQLLGQFTYDQDGESLQMFQALKRPDDTAFQIVELRIFSNWGHPEYTCLYRFRVHGEPVK

SEQ ID NO: 12486 - protein, 577 aa, Homo sapiens
MLQTIYESDSCFSSDGVAGREQLLAQQRMHSMISSVDVKSEVPVGLEPISPLDLRTDLRMMMPVVDPVVREKQLQQELLLIQQQQQIQKQLLIAEFQKQHENLTRQHQAQLQEHIKLQQELLAIKQQQELLEKEQKLEQQRQEQEVERHRREQQLPPLRGKDRGRERAVASTEVKQKLQEFLLSKSATKDTPTNGKNHSVSRHPKLWYTAAHHTSLDQSSPPLSGTSPSYKYTLPGAQDAKDDFPLRKTESSVSSSSPGSGPSSPNNGPTGSVTENETSVLPPTPHAEQMVSQQRILIHEDSMNLLSLYTSPSLPNITLGLPAVPSQLNASNSLKEKQKCETQTLRQGVPLPGQYGGSIPASSSHPHVTLEGKPPNSSHQALLQHLLLKEQMRQQKLLVAGGVPLHPQSPLATKERISPGIRGTHKLPRHRPLNRTQSAPLPQSTLAQLVIQQQHQQFLEKQKQYQQQIHMNKLLSKSIEQLKQPGSHLEEAEEELQGDQAMQEDRAPSSGNSTRSDSSACVDDTLGQVGAVKVKEEPVDSDEDAQIQEMESGEQAAFMQQVIGKDLAPGFVIKVII

SEQ ID NO: 12487 - protein, 2514 aa, Homo sapiens
MSGSTQPVAQTWRATEPRYPPHSLSYPVQIARTHTDVGLLEYQHHSRDYASHLSPGSIIQPQRRRPSLLSEFQPGNERSQELHLRPESHSYLPELGKSEMEFIESKRPRLELLPDPLLRPSPLLATGQPAGSEDLTKDRSLTGKLEPVSPPSPPHTDPELELVPPRLSKEELIQNMDRVDREITMVEQQISKLKKKQQQLEEEAAKPPEPEKPVSPPPIESKHRSLVQIIYDENRKKAEAAHRILEGLGPQVELPLYNQPSDTRQYHENIKINQAMRKKLILYFKRRNHARKQWEQKFCQRYDQLMEAWEKKVERIENNPRRRAKESKVREYYEKQFPEIRKQRELQERMQSRVGQRGSGLSMSAARSEHEVSEIIDGLSEQENLEKQMRQLAVIPPMLYDADQQRIKFINMNGLMADPMKVYKDRQVMNMWSEQEKETFREKFMQHPKNFGLIASFLERKTVAECVLYYYLTKKNENYKSLVRRSYRRRGKSQQQQQQQQQQQQQQQQQPMPRSSQEEKDEKEKEKEAEKEEEKPEVENDKEDLLKEKTDDTSGEDNDEKEAVASKGRKTANSQGRRKGRITRSMANEANSEEAITPQQSAELASMELNESSRWTEEEMETAKKGLLEHGRNWSAIARMVGSKTVSQCKNFYFNYKKRQNLDEILQQHKLKMEKERNARRKKKKAPAAASEEAAFPPVVEDEEMEASGVSGNEEEMVEEAEALHASGNEVPRGECSGPATVNNSSDTESIPSPHTEAAKDTGQNGPKPPATLGADGPPPGPPTPPPEDIPAPTEPTPASEATGAPTPPPAPPSPSAPPPVVPKEEKEEETAAAPPVEEGEEQKPPAAEELAVDTGKAEEPVKSECTEEAEEGPAKGKDAEAAEATAEGALKAEKKEGGSGRATTAKSSGAPQDSDSSATCSADEVDEAEGGDKNRLLSPRPSLLTPTGDPRANASPQKPLDLKQLKQRAAAIPPIQVTKVHEPPREDAAPTKPAPPAPPPPQNLQPESDAPQQPGSSPRGKSRSPAPPADKEAFAAEAQKLPGDPPCWTSGLPFPVPPREVIKASPHAPDPSAFSYAPPGHPLPLGLHDTARPVLPRPPTISNPPPLISSAKHPSVLERQIGAISQGMSVQLHVPYSEHAKAPVGPVTMGLPLPMDPKKLAPFSGVKQEQLSPRGQAGPPESLGVPTAQEASVLRGTALGSVPGGSITKGIPSTRVPSDSAITYRGSITHGTPADVLYKGTITRIIGEDSPSRLDRGREDSLPKGHVIYEGKKGHVLSYEGGMSVTQCSKEDGRSSSGPPHETAAPKRTYDMMEGRVGRAISSASIEGLMGRAIPPERHSPHHLKEQHHIRGSITQGIPRSYVEAQEDYLRREAKLLKREGTPPPPPPSRDLTEAYKTQALGPLKLKPAHEGLVATVKEAGRSIHEIPREELRHTPELPLAPRPLKEGSITQGTPLKYDTGASTTGSKKHDVRSLIGSPGRTFPPVHPLDVMADARALERACYEESLKSRPGTASSSGGSIARGAPVIVPELGKPRQSPLTYEDHGAPFAGHLPRGSPVTTREPTPRLQEGSLSSSKASQDRKLTSTPREIAKSPHSTVPEHHPHPISPYEHLLRGVSGVDLYRSHIPLAFDPTSIPRGIPLDAAAAYYLPRHLAPNPTYPHLYPPYLIRGYPDTAALENRQTIINDYITSQQMHHNAATAMAQRADMLRGLSPRESSLALNYAAGPRGIIDLSQVPHLPVLVPPTPGTPATAMDRLAYLPTAPQPFSSRHSSSPLSPGGPTHLTKPTTTSSSERERDRDRERDRDREREKSILTSTTTVEHAPIWRPGTEQSSGSSGGGGGSSSRPASHSHAHQHSPISPRTQDALQQRPSVLHNTGMKGIITAVEPSTPTVLRSTSTSSPVRPAATFPPATHCPLGGTLDGVYPTLMEPVLLPKEAPRVARPERPRADTGHAFLAKPPARSGLEPASSPSKGSEPRPLVPPVSGHATIARTPAKNLAPHHASPDPPAPPASASDPHREKTQSKPFSIQELELRSLGYHGSSYSPEGVEPVSPVSSPSLTHDKGLPKHLEELDKSHLEGELRPKQPGPVKLGGEAAHLPHLRPLPESQPSSSPLLQTAPGVKGHQRVVTLAQHISEVITQDYTRHHPQQLSAPLPAPLYSFPGASCPVLDLRRPPSDLYLPPPDHGAPARGSPHSEGGKRSPEPNKTSVLGGGEDGIEPVSPPEGMTEPGHSRSAVYPLLYRDGEQTEPSRMGSKSPGNTSQPPAFFSKLTESNSAMVKSKKQEINKKLNTHNRNEPEYNISQPGTEIFNMPAITGTGLMTYRSQAVQEHASTNMGLEAIIRKALMGKYDQWEESPPLSANAFNPLNASASLPAAMPITAADGRSDHTLTSPGGGGKAKVSGRPSSRKAKSPAPGLASGDRPPSVSSVHSEGDCNRRTPLTNRVWEDRPSSAGSTPFPYNPLIMRLQAGVMASPPPPGLPAGSGPLAGPHHAWDEEPKPLLCSQYETLSDSE

SEQ ID NO: 12488 - protein, 411 aa, Homo sapiens
MRLSFIVFSSQATIILPLTGDRGKISKGLEDLKRVSPVGETYIHEGLKLANEQIQKAGGLKTSSIIIALTDGKLDGLVPSYAEKEAKISRSLGASVYCVGVLDFEQAQLERIADSKEQVFPVKGGFQALKGIINSILAQSCTEILELQPSSVCVGEEFQIVLSGRGFMLGSRNGSVLCTYTVNETYTTSVKPVSVQLNSMLCPAPILNKAGETLDVSVSFNGGKSVISGSLIVTATECSNGIAAIIVILVLLLLLGIGLMWWFWPLCCKVVIKDPPPPPAPAPKEEEEEPLPTKKWPTVDASYYGGRGVGGIKRMEVRWGDKGSTEEGARLEKAKNAVVKIPEETEEPIRPRPPRPKPTHQPPQTKWYTPIKGRLDALWALLRRQYDRVSLMRPQEGDEGRCINFSRVPSQ

SEQ ID NO: 12489 - protein, 561 aa, Homo sapiens
MAGAIASRMSFSSLKRKQPKTFTVRIVTMDAEMEFNCEMKWKGKDLFDLVCRTLGLRETWFFGLQYTIKDTVAWLKMDKKVLDHDVSKEEPVTFHFLAKFYPENAEEELVQEITQHLFFLQVKKQILDEKIYCPPEASVLLASYAVQAKYGDYDPSVHKRGFLAQEELLPKRVINLYQMTPEMWEERITAWYAEHRGRARDEAEMEYLKIAQDLEMYGVNYFAIRNKKGTELLLGVDALGLHIYDPENRLTPKISFPWNEIRNISYSDKEFTIKPLDKKIDVFKFNSSKLRVNKLILQLCIGNHDLFMRRRKADSLEVQQMKAQAREEKARKQMKEEATMANEALMRSEETADLLAEKAQITEEEAKLLAQKAAEAEQEMQRIKATAIRTEEEKRLMEQKVLEAEVLALKMAEESERRAKEADQLKQDLQEAREAERRAKQKLLEIATKPTYPPMNPIPAPLPPDIPSFNLIGDSLSFDFKDTDMKRLSMEIEKEKVEYMEKSKHLQEQLNELKTEIEALKLKERETALDILHNENSDRGGSSKHNTIKKPQAQGRRPICI

SEQ ID NO: 12490 - protein, 105 aa, Homo sapiens
MEPAMEPETLEARINRATNPLNKELDWASINGFCEQLNEDFEGPPLATRLLAHKIQSPQEWEAIQALTVLETCMKSCGKRFHDEVGKFRFLNELIKVVSPKGTLL

SEQ ID NO: 12491 - protein, 458 aa, Homo sapiens
MASDGARKQFWKRSNSKLPGSIQHVYGAQHPPFDPLLHGTLLRSTAKMPTTPVKAKRVSTFQEFESNTSDAWDAGEDDDELLAMAAESLNSEVVMETANRVLRNHSQRQGRPTLQEGPGLQQKPRPEAEPPSPPSGDLRLVKSVSESHTSCPAEELRRLSWSGIPKPVRPMTWKLLSGYLPANVDRRPATLQRKQKEYFAFIEHYYDSRNDEVHQDTYRQIHIDIPRMSPEALILQPKVTEIFERILFIWAIRHPASGYVQGINDLVTPFFVVFICEYIEAEEVDTVDVSGVPAEVLCNIEADTYWCMSKLLDGIQDNYTFAQPGIQMKVKMLEELVSRIDEQVHRHLDQHEVRYLQFAFRWMNNLLMREVPLRCTIRLWDTYQSEPDGFSHFHLYVCAAFLVRWRKEILEEKDFQELLLFLQNLPTAHWDDEDISLLLAEAYRLKFAFADAPNHYKK

SEQ ID NO: 12492 - protein, 387 aa, Homo sapiens
MTCLISYWVTLRKPSPVYSFGFERLEVLAVFASTVLAQLGALFILKESAERFLEQPEIHTGRLLVGTFVALCFNLFTMLSIRNKPFAYVSEAASTSWLQEHVADLSRSLCGIIPGLSSIFLPRMNPFVLIDLAGAFALCITYMLIEINNYFAVDTASAIAIALMTFGTMYPMSVYSGKVLLQTTPPHVIGQLDKLIREVSTLDGVLEVRNEHFWTLGFGSLAGSVHVRIRRDANEQMVLAHVTNRLYTLVSTLTVQIFKDDWIRPALLSGPVAANVLNFSDHHVIPMPLLKGTDDLNPVTSTPAKPSSPPPEFSFNTPGKNVNPVILLNTQTRPYGFGLNHGHTPYSSMLNQGLGVPGIGATQGLRTGFTNIPSRYGTNNRIGQPRP

SEQ ID NO: 12493 - protein, 580 aa, Homo sapiens
MGSSRLRVFDPHLERKDSAAALSDRELPLPTFDVPYFKYIDEEDEDDEWSSRSQSSTEDDSVDSLLSDRYVVVSGTPEKILEHLLNDLHLEEVQDKETETLLDDFLLTYTVFMTTDDLCQALLRHYSAKKYQGKEENSDVPRRKRKVLHLVSQWIALYKDWLPEDEHSKMFLKTIYRNVLDDVYEYPILEKELKEFQKILGMHRRHTVDEYSPQKKNKALFHQFSLKENWLQHRGTVTETEEIFCHVYITEHSYVSVKAKVSSIAQEILKVVAEKIQYAEEDLALVAITFSGEKHELQPNDLVISKSLEASGRIYVYRKDLADTLNPFAENEESQQRSMRILGMNTWDLALELMNFDWSLFNSIHEQELIYFTFSRQGSGEHTANLSLLLQRCNEVQLWVATEILLCSQLGKRVQLVKKFIKIAAHCKAQRNLNSFFAIVMGLNTASVSRLSQTWEKIPGKFKKLFSELESLTDPSLNHKAYRDAFKKMKPPKIPFMPLLLKDVTFIHEGNKTFLDNLVNFEKLHMIADTVRTLRHCRTNQFGDLSPKEHQELKSYVNHLYVIDSQQALFELSHRIEPRV

SEQ ID NO: 12494 - protein, 1069 aa, Homo sapiens; identical to SEQ ID NO: 12006

SEQ ID NO: 12495 - protein, 897 aa, Homo sapiens
MVLAQGLLSMALLALCWERSLAGAEETIPLQTLRCYNDYTSHITCRWADTQDAQRLVNVTLIRRVNEDLLEPVSCDLSDDMPWSACPHPRCVPRRCVIPCQSFVVTDVDYFSFQPDRPLGTRLTVTLTQHVQPPEPRDLQISTDQDHFLLTWSVALGSPQSHWLSPGDLEFEVVYKRLQDSWEDAAILLSNTSQATLGPEHLMPSSTYVARVRTRLAPGSRLSGRPSKWSPEVCWDSQPGDEAQPQNLECFFDGAAVLSCSWEVRKEVASSVSFGLFYKPSPDAGEEECSPVLREGLGSLHTRHHCQIPVPDPATHGQYIVSVQPRRAEKHIKSSVNIQMAPPSLNVTKDGDSYSLRWETMKMRYEHIDHTFEIQYRKDTATWKDSKTETLQNAHSMALPALEPSTRYWARVRVRTSRTGYNGIWSEWSEARSWDTESVLPMWVLALIVIFLTIAVLLALRFCGIYGYRLRRKWEEKIPNPSKSHLFQNGSAELWPPGSMSAFTSGSPPHQGPWGSRFPELEGVFPVGFGDSEVSPLTIEDPKHVCDPPSGPDTTPAASDLPTEQPPSPQPGPPAASHTPEKQASSFDFNGPYLGPPHSRSLPDILGQPEPPQEGGSQKSPPPGSLEYLCLPAGGQVQLVPLAQAMGPGQAVEVERRPSQGAAGSPSLESGGGPAPPALGPRVGGQDQKDSPVAIPMSSGDTEDPGVASGYVSSADLVFTPNSGASSVSLVPSLGLPSDQTPSLCPGLASGPPGAPGPVKSGFEGYVELPPIEGRSPRSPRNNPVPPEAKSPVLNPGERPADVSPTSPQPEGLLVLQQVGDYCFLPGLGPGPLSLRSKPSSPGPGPEIKNLDQAFQVKKPPGQAVPQVPVIQLFKALKQQDYLSLPPWEVNKPGEVC

SEQ ID NO: 12496 - protein, 725 aa, Homo sapiens
MLQTKDLIWTLFFLGTAVSLQVDIVPSQGEISVGESKFFLCQVAGDAKDKDISWFSPNGEKLTPNQQRISVVWNDDSSSTLTIYNANIDDAGIYKCVVTGEDGSESEATVNVKIFQKLMFKNAPTPQEFREGEDAVIVCDVVSSLPPTIIWKHKGRDVILKKDVRFIVLSNNYLQIRGIKKTDEGTYRCEGRILARGEINFKDIQVIVNVPPTIQARQNIVNATANLGQSVTLVCDAEGFPEPTMSWTKDGEQIEQEEDDEKYIFSDDSSQLTIKKVDKNDEAEYICIAENKAGEQDATIHLKVFAKPKITYVENQTAMELEEQVTLTCEASGDPIPSITWRTSTRNISSEEKTLDGHMVVRSHARVSSLTLKSIQYTDAGEYICTASNTIGQDSQSMYLEVQYAPKLQGPVAVYTWEGNQVNITCEVFAYPSATISWFRDGQLLPSSNYSNIKIYNTPSASYLEVTPDSENDFGNYNCTAVNRIGQESLEFILVQADTPSSPSIDQVEPYSSTAQVQFDEPEATGGVPILKYKAEWRAVGEEVWHSKWYDAKEASMEGIVTIVGLKPETTYAVRLAALNGKGLGEISAASEFKTQPVREPSAPKLEGQMGEDGNSIKVNLIKQDDGGSPIRHYLVRYRALSSEWKPEIRLPSGSDHVMLKSLDWNAEYEVYVVAENQQGKSKAAHFVFRTSAQPTAIPATLGGNSASYTFVSLLFSAVTLLLLC

SEQ ID NO: 12497 - protein, 1174 aa, Homo sapiens
MARQPPPPWVHAAFLLCLLSLGGAIEIPMDLTQPPTITKQSAKDHIVDPRDNILIECEAKGNPAPSFHWTRNSRFFNIAKDPRVSMRRRSGTLVIDFRSGGRPEEYEGEYQCFARNKFGTALSNRIRLQVSKSPLWPKENLDPVVVQEGAPLTLQCNPPPGLPSPVIFWMSSSMEPITQDKRVSQGHNGDLYFSNVMLQDMQTDYSCNARFHFTHTIQQKNPFTLKVLTNHPYNDSSLRNHPDMYSARGVAERTPSFMYPQGTASSQMVLRGMDLLLECIASGVPTPDIAWYKKGGDLPSDKAKFENFNKALRITNVSEEDSGEYFCLASNKMGSIRHTISVRVKAAPYWLDEPKNLILAPGEDGRLVCRANGNPKPTVQWMVNGEPLQSAPPNPNREVAGDTIIFRDTQISSRAVYQCNTSNEHGYLLANAFVSVLDVPPRMLSPRNQLIRVILYNRTRLDCPFFGSPIPTLRWFKNGQGSNLDGGNYHVYENGSLEIKMIRKEDQGIYTCVATNILGKAENQVRLEVKDPTRIYRMPEDQVARRGTTVQLECRVKHDPSLKLTVSWLKDDEPLYIGNRMKKEDDSLTIFGVAERDQGSYTCVASTELDQDLAKAYLTVLGRPDRPRDLELTDLAERSVRLTWIPGDANNSPITDYVVQFEEDQFQPGVWHDHSKYPGSVNSAVLRLSPYVNYQFRVIAINEVGSSHPSLPSERYRTSGAPPESNPGDVKGEGTRKNNMEITWTPMNATSAFGPNLRYIVKWRRRETREAWNNVTVWGSRYVVGQTPVYVPYEIRVQAENDFGKGPEPESVIGYSGEDYPRAAPTEVKVRVMNSTAISLQWNRVYSDTVQGQLREYRAYYWRESSLLKNLWVSQKRQQASFPGDRLRGVVSRLFPYSNYKLEMVVVNGRGDGPRSETKEFTTPEGVPSAPRRFRVRQPNLETINLEWDHPEHPNGIMIGYTLKYVAFNGTKVGKQIVENFSPNQTKFTVQRTDPVSRYRFTLSARTQVGSGEAVTEESPAPPNEATPTAAYTNNQADIATQGWFIGLMCAIALLVLILLIVCFIKRSRGGKYPVREKKDVPLGPEDPKEEDGSFDYSDEDNKPLQGSQTSLDGTIKQQESDDSLVDYGEGGEGQFNEDGSFIGQYTVKKDKEETEGNESSEATSPVNAIYSLA

SEQ ID NO: 12498 - protein, 444 aa, Homo sapiens
MCLCSGRKTILEIYPGQFQPSLCHKFIALSDKEGKLLRNYTQNIDTLEQVAGIQRIIQCHGSFATASCLICKYKVDCEAVRGDIFNQVVPRCPRCPADEPLAIMKPEIVFFGENLPEQFHRAMKYDKDEVDLLIVIGSSLKVRPVALIPSSIPHEVPQILINREPLPHLHFDVELLGDCDVIINELCHRLGGEYAKLCCNPVKLSEITEKPPRTQKELAYLSELPPTPLHVSEDSSSPERTSPPDSSVIVTLLDQAAKSNDDLDVSESKGCMEEKPQEVQTSRNVESIAEQMENPDLKNVGSSTGEKNERTSVAGTVRKCWPNRVAKEQISRRLDGNQYLFLPPNRYIFHGAEVYSDSEDDVLSSSSCGSNSDSGTCQSPSLEEPMEDESEIEEFYNGLEDEPDVPERAGGAGFGTDGDDQEAINEAISVKQEVTDMNYPSNKS

SEQ ID NO: 12499 - protein, 817 aa, Homo sapiens
MYGVCGCCGALRPRYKRLVDNIFPEDPEDGLVKTNMEKLTFYALSAPEKLDRIGAYLSERLIRDVGRHRYGYVCIAMEALDQLLMACHCQSINLFVESFLKMVAKLLESEKPNLQILGTNSFVKFANIEEDTPSYHRSYDFFVSRFSEMCHSSHDDLEIKTKIRMSGIKGLQGVVRKTVNDELQANIWDPQHMDKIVPSLLFNLQHVEEAESRSPSPLQAPEKEKESPAELAERCLRELLGRAAFGNIKNAIKPVLIHLDNHSLWEPKVFAIRCFKIIMYSIQPQHSHLVIQQLLGHLDANSRSAATVRAGIVEVLSEAAVIAATGSVGPTVLEMFNTLLRQLRLSIDYALTGSYDGAVSLGTKIIKEHEERMFQEAVIKTVGSFASTLPTYQRSEVILFIMSKVPRPSLHQAVDTGRTGENRNRLTQIMLLKSLLQVSTGFQCNNMMSALPSNFLDRLLSTALMEDAEIRLFVLEILISFIDRHGNRHKFSTISTLSDISVLKLKVDKCSRQDTVFMKKHSQQLYRHIYLSCKEETNVQKHYEALYGLLALISIELANEEVVVDLIRLVLAVQDVAQVNEENLPVYNRCALYALGAAYLNLISQLTTVPAFCQHIHEVIETRKKEAPYMLPEDVFVERPRLSQNLDGVVIELLFRQSKISEVLGGSGYNSDRLCLPYIPQLTDEDRLSKRRSIGETISLQVEVESRNSPEKEERVPAEEITYETLKKAIVDSVAVEEQERERRRQVVEKFQKAPFEEIAAHCGARASLLQSKLNQIFEITIRPPPSPSGTITAAYGQPQNHSIPVYEMKFPDLCVY

SEQ ID NO: 12500 - protein, 491 aa, Homo sapiens
MSGRGDGGQQQLLHSKFLAGFVCHIEKNESQRGRNCNEKPTNVRKRKFINRDLAHDSEELFQDLSQLQETWLAEAQVPDNDEQFVPDYQAESLAFHGLPLKIKKEPHSPCSEISSACSQEQPFKFSYGEKCLYNVSAYDQKPQVGMRPSNPPTPSSTPVSPLHHASPNSTHTPKPDRAFPAHLPPSQSIPDSSYPMDHRFRRQLSEPCNSFPPLPTMPREGRPMYQRQMSEPNIPFPPQGFKQEYHDPVYEHNTMVGSAASQSFPPPLMIKQEPRDFAYDSEVPSCHSIYMRQEGFLAHPSRTEGCMFEKGPRQFYDDTCVVPEKFDGDIKQEPGMYREGPTYQRRGSLQLWQFLVALLDDPSNSHFIAWTGRGMEFKLIEPEEVARRWGIQKNRPAMNYDKLSRSLRYYYEKGIMQKVAGERYVYKFVCDPEALFSMAFPDNQRPLLKTDMERHINEEDTVPLSHFDESMAYMPEGGCCNPHPYNEGYVY

SEQ ID NO: 12501 - protein, 1395 aa, Homo sapiens
MDTKLMCLLFFFSLPPLLVSNHTGRIKVVFTPSICKVTCTKGSCQNSCEKGNTTTLISENGHAADTLTATNFRVVICHLPCMNGGQCSSRDKCQCPPNFTGKLCQIPVHGASVPKLYQHSQQPGKALGTHVIHSTHTLPLTVTSQQGVKVKFPPNIVNIHVKHPPEASVQIHQVSRIDGPTGQKTKEAQPGQSQVSYQGLPVQKTQTIHSTYSHQQVIPHVYPVAAKTQLGRCFQETIGSQCGKALPGLSKQEDCCGTVGTSWGFNKCQKCPKKPSYHGYNQMMECLPGYKRVNNTFCQDINECQLQGVCPNGECLNTMGSYRCTCKIGFGPDPTFSSCVPDPPVISEEKGPCYRLVSSGRQCMHPLSVHLTKQLCCCSVGKAWGPHCEKCPLPGTAAFKEICPGGMGYTVSGVHRRRPIHHHVGKGPVFVKPKNTQPVAKSTHPPPLPAKEEPVEALTFSREHGPGVAEPEVATAPPEKEIPSLDQEKTKLEPGQPQLSPGISTIHLHPQFPVVIEKTSPPVPVEVAPEASTSSASQVIAPTQVTEINECTVNPDICGAGHCINLPVRYTCICYEGYRFSEQQRKCVDIDECTQVQHLCSQGRCENTEGSFLCICPAGFMASEEGTNCIDVDECLRPDVCGEGHCVNTVGAFRCEYCDSGYRMTQRGRCEDIDECLNPSTCPDEQCVNSPGSYQCVPCTEGFRGWNGQCLDVDECLEPNVCANGDCSNLEGSYMCSCHKGYTRTPDHKHCRDIDECQQGNLCVNGQCKNTEGSFRCTCGQGYQLSAAKDQCEDIDECQHRHLCAHGQCRNTEGSFQCVCDQGYRASGLGDHCEDINECLEDKSVCQRGDCINTAGSYDCTCPDGFQLDDNKTCQDINECEHPGLCGPQGECLNTEGSFHCVCQQGFSISADGRTCEDIDECVNNTVCDSHGFCDNTAGSFRCLCYQGFQAPQDGQGCVDVNECELLSGVCGEAFCENVEGSFLCVCADENQEYSPMTGQCRSRTSTDLDVDVDQPKEEKKECYYNLNDASLCDNVLAPNVTKQECCCTSGVGWGDNCEIFPCPVLGTAEFTEMCPKGKGFVPAGESSSEAGGENYKDADECLLFGQEICKNGFCLNTRPGYECYCKQGTYYDPVKLQCFDMDECQDPSSCIDGQCVNTEGSYNCFCTHPMVLDASEKRCIRPAESNEQIEETDVYQDLCWEHLSDEYVCSRPLVGKQTTYTECCCLYGEAWGMQCALCPLKDSDDYAQLCNIPVTGRRQPYGRDALVDFSEQYTPEADPYFIQDRFLNSFEELQAEECGILNGCENGRCVRVQEGYTCDCFDGYHLDTAKMTCVDVNECDELNNRMSLCKNAKCINTDGSYKCLCLPGYVPSDKPNYCTPLNTALNLEKDSDLE

SEQ ID NO: 12502 - protein, 2188 aa, Homo sapiens
MAESASPPSSSAAAPAAEPGVTTEQPGPRSPPSSPPGLEEPLDGADPHVPHPDLAPIAFFCLRQTTSPRNWCIKMVCNPWFECVSMLVILLNCVTLGMYQPCDDMDCLSDRCKILQVFDDFIFIFFAMEMVLKMVALGIFGKKCYLGDTWNRLDFFIVMAGMVEYSLDLQNINLSAIRTVRVLRPLKAINRVPSMRILVNLLLDTLPMLGNVLLLCFFVFFIFGIIGVQLWAGLLRNRCFLEENFTIQGDVALPPYYQPEEDDEMPFICSLSGDNGIMGCHEIPPLKEQGRECCLSKDDVYDFGAGRQDLNASGLCVNWNRYYNVCRTGSANPHKGAINFDNIGYAWIVIFQVITLEGWVEIMYYVMDAHSFYNFIYFILLIIVGSFFMINLCLVVIATQFSETKQREHRLMLEQRQRYLSSSTVASYAEPGDCYEEIFQYVCHILRKAKRRALGLYQALQSRRQALGPEAPAPAKPGPHAKEPRHYQLCPQHSPLDATPHTLVQPIPATLASDPASCPCCQHEDGRRPSGLGSTDSGQEGSGSGSSAGGEDEADGDGARSSEDGASSELGKEEEEEEQADGAVWLCGDVWRETRAKLRGIVDSKYFNRGIMMAILVNTVSMGIEHHEQPEELTNILEICNVVFTSMFALEMILKLAAFGLFDYLRNPYNIFDSIIVIISIWEIVGQADGGLSVLRTFRLLRVLKLVRFMPALRRQLVVLMKTMDNVATFCMLLMLFIFIFSILGMHIFGCKFSLRTDTGDTVPDRKNFDSLLWAIVTVFQILTQEDWNVVLYNGMASTSPWASLYFVALMTFGNYVLFNLLVAILVEGFQAEGDANRSYSDEDQSSSNIEEFDKLQEGLDSSGDPKLCPIPMTPNGHLDPSLPLGGHLGPAGAAGPAPRLSLQPDPMLVALGSRKSSVMSLGRMSYDQRSLSSSRSSYYGPWGRSAAWASRRSSWNSLKHKPPSAEHESLLSAERGGGARVCEVAADEGPPRAAPLHTPHAHHIHHGPHLAHRHRHHRRTLSLDNRDSVDLAELVPAVGAHPRAAWRAAGPAPGHEDCNGRMPSIAKDVFTKMGDRGDRGEDEEEIDYTLCFRVRKMIDVYKPDWCEVREDWSVYLFSPENRFRVLCQTIIAHKLFDYVVLAFIFLNCITIALERPQIEAGSTERIFLTVSNYIFTAIFVGEMTLKVVSLGLYFGEQAYLRSSWNVLDGFLVFVSIIDIVVSLASAGGAKILGVLRVLRLLRTLRPLRVISRAPGLKLVVETLISSLKPIGNIVLICCAFFIIFGILGVQLFKGKFYHCLGVDTRNITNRSDCMAANYRWVHHKYNFDNLGQALMSLFVLASKDGWVNIMYNGLDAVAVDQQPVTNHNPWMLLYFISFLLIVSFFVLNMFVGVVVENFHKCRQHQEAEEARRREEKRLRRLEKKRRKAQRLPYYATYCHTRLLIHSMCTSHYLDIFITFIICLNVVTMSLEHYNQPTSLETALKYCNYMFTTVFVLEAVLKLVAFGLRRFFKDRWNQLDLAIVLLSVMGITLEEIEINAALPINPTIIRIMRVLRIARVLKLLKMATGMRALLDTVVQALPQVGNLGLLFMLLFFIYAALGVELFGKLVCNDENPCEGMSRHATFENFGMAFLTLFQVSTGDNWNGIMKDTLRDCTHDERSCLSSLQFVSPLYFVSFVLTAQFVLINVVVAVLMKHLDDSNKEAQEDAEMDAELELEMAHGLGPGPRLPTGSPGAPGRGPGGAGGGGDTEGGLCRRCYSPAQENLWLDSVSLIIKDSLEGELTIIDNLSGSIFHHYSSPAGCKKCHHDKQEVQLAETEAFSLNSDRSSSILLGDDLSLEDPTACPPGRKDSKGELDPPEPMRVGDLGECFFPLSSTAVSPDPENFLCEMEEIPFNPVRSWLKHDSSQAPPSPFSPDASSPLLPMPAEFFHPAVSASQKGPEKGTGTGTLPKIALQGSWASLRSPRVNCTLLRQATGSDTSLDASPSSSAGSLQTTLEDSLTLSDSPRRALGPPAPAPGPRAGLSPAARRRLSLRGRGLFSLRGLRAHQRSHSSGGSTSPGCTHHDSMDPSDEEGRGGAGGGGAGSEHSETLSSLSLTSLFCPPPPPPAPGLTPARKFSSTSSLAAPGRPHAAALAHGLARSPSWAADRSKDPPGRAPLPMGLGPLAPPPQPLPGELEPGDAASKRKR

SEQ ID NO: 12503 - protein, 2444 aa, Homo sapiens
MKAQRERLQIPGLTLDLTPRSLSPTPSSPGSPCSPLLAFHFWSCRTSNRKSLIGNGQSPALPRPHSPLSAHAGNSPQDSPRNFSPSASAHFSFARRNDRTDGRRWSLASLPSSGYGTNTPSSTVSSSCSSQEKLHQLPYQPTPDELHFLSKHFCTTESIATENRCRNTPMRPRSRSLSPGRSPACCDHEIIMMNHVYKERFPKATAQMEERLKEIITSYSPDNVLPLADGVLSFTHHQIIELARDCLDKSHQGLITSRYFLELQHKLDKLLQEAHDRSESGELAFIKQLVRKILIVIARPARLLECLEFDPEEFYYLLEAAEGHAKEGQGIKTDIPRYIISQLGLNKDPLEEMAHLGNYDSGTAETPETDESVSSSNASLKLRRKPRESDFETIKLISNGAYGAVYFVRHKESRQRFAMKKINKQNLILRNQIQQAFVERDILTFAENPFVVSMYCSFETRRHLCMVMEYVEGGDCATLMKNMGPLPVDMARMYFAETVLALEYLHNYGIVHRDLKPDNLLVTSMGHIKLTDFGLSKVGLMSMTTNLYEGHIEKDAREFLDKQVCGTPEYIAPEVILRQGYGKPVDWWAMGIILYEFLVGCVPFFGDTPEELFGQVISDEINWPEKDEAPPPDAQDLITLLLRQNPLERLGTGGAYEVKQHRFFRSLDWNSLLRQKAEFIPQLESEDDTSYFDTRSEKYHHMETEEEDDTNDEDFNVEIRQFSSCSHRFSKVFSSIDRITQNSAEEKEDSVDKTKSTTLPSTETLSWSSEYSEMQQLSTSNSSDTESNRHKLSSGLLPKLAISTEGEQDEAASCPGDPHEEPGKPALPPEECAQEEPEVTTPASTISSSTLSVGSFSEHLDQINGRSECVDSTDNSSKPSSEPASHMARQRLESTEKKKISGKVTKSLSASALSLMIPGDMFAVSPLGSPMSPHSLSSDPSSSRDSSPSRDSSAASASPHQPIVIHSSGKNYGFTIRAIRVYVGDSDIYTVHHIVWNVEEGSPACQAGLKAGDLITHINGEPVHGLVHTEVIELLLKSGNKVSITTTPFENTSIKTGPARRNSYKSRMVRRSKKSKKKESLERRRSLFKKLAKQPSPLLHTSRSFSCLNRSLSSGESLPGSPTHSLSPRSPTPSYRSTPDFPSGTNSSQSSSPSSSAPNSPAGSGHIRPSTLHGLAPKLGGQRYRSGRRKSAGNIPLSPLARTPSPTPQPTSPQRSPSPLLGHSLGNSKIAQAFPSKMHSPPTIVRHIVRPKSAEPPRSPLLKRVQSEEKLSPSYGSDKKHLCSRKHSLEVTQEEVQREQSQREAPLQSLDENVCDVPPLSRARPVEQGCLKRPVSRKVGRQESVDDLDRDKLKAKVVVKKADGFPEKQESHQKSHGPGSDLENFALFKLEEREKKVYPKAVERSSTFENKASMQEAPPLGSLLKDALHKQASVRASEGAMSDGRVPAEHRQGGGDFRRAPAPGTLQDGLCHSLDRGISGKGEGTEKSSQAKELLRCEKLDSKLANIDYLRKKMSLEDKEDNLCPVLKPKMTAGSHECLPGNPVRPTGGQQEPPPASESRAFVSSTHAAQMSAVSFVPLKALTGRVDSGTEKPGLVAPESPVRKSPSEYKLEGRSVSCLKPIEGTLDIALLSGPQASKTELPSPESAQSPSPSGDVRASVPPVLPSSSGKKNDTTSARELSPSSLKMNKSYLLEPWFLPPSRGLQNSPAVSLPDPEFKRDRKGPHPTARSPGTVMESNPQQREGSSPKHQDHTTDPKLLTCLGQNLHSPDLARPRCPLPPEASPSREKPGLRESSERGPPTARSERSAARADTCREPSMELCFPETAKTSDNSKNLLSVGRTHPDFYTQTQAMEKAWAPGGKTNHKDGPGEARPPPRDNSSLHSAGIPCEKELGKVRRGVEPKPEALLARRSLQPPGIESEKSEKLSSFPSLQKDGAKEPERKEQPLQRHPSSIPPPPLTAKDLSSPAARQHCSSPSHASGREPGAKPSTAEPSSSPQDPPKPVAAHSESSSHKPRPGPDPGPPKTKHPDRSLSSQKPSVGATKGKEPATQSLGGSSREGKGHSKSGPDVFPATPGSQNKASDGIGQGEGGPSVPLHTDRAPLDAKPQPTSGGRPLEVLEKPVHLPRPGHPGPSEPADQKLSAVGEKQTLSPKHPKPSTVKDCPTLCKQTDNRQTDKSPSQPAANTDRRAEGKKCTEALYAPAEGDKLEAGLSFVHSENRLKGAERPAAGVGKGFPEARGKGPGPQKPPTEADKPNGMKRSPSATGQSSFRSTALPEKSLSCSSSFPETRAGVREASAASSDTSSAKAAGGMLELPAPSNRDHRKAQPAGEGRTHMTKSDSLPSFRVSTLPLESHHPDPNTMGGASHRDRALSVTATVGETKGKDPAPAQPPPARKQNVGRDVTKPSPAPNTDRPISLSNEKDFVVRQRRGKESLRSSPHKKAL

SEQ ID NO: 12504 - protein, 445 aa, Homo sapiens
MSWSLHPRNLILYFYALLFLSSTCVAYVATRDNCCILDERFGSYCPTTCGIADFLSTYQTKVDKDLQSLEDILHQVENKTSEVKQLIKAIQLTYNPDESSKPNMIDAATLKSRKMLEEIMKYEASILTHDSSIRYLQEIYNSNNQKIVNLKEKVAQLEAQCQEPCKDTVQIHDITGKVKVDSPSLDCQDIANKGAKQSGLYFIKPLKANQQFLVYCEIDGSGNGWTVFQKRLDGSVDFKKNWIQYKEGFGHLSPTGTTEFWLGNEKIHLISTQSAIPYALRVELEDWNGRTSTADYAMFKVGPEADKYRLTYAYFAGGDAGDAFDGFDFGDDPSDKFFTSHNGMQFSTWDNDNDKFEGNCAEQDGSGWWMNKCHAGHLNGVYYQGGTYSKASTPNGYDNGIIWATWKTRWYSMKKTTMKIIPFNRLTIGEGQQHHLGGAKQAGDV

SEQ ID NO: 12505 - protein, 240 aa, Homo sapiens
MMGIFLVYVGFVFFSVLYVQQGLSSQAKFTEFPRNVTATEGQNVEMSCAFQSGSASVYLEIQWWFLRGPEDLDPGAEGAGAQVELLPDRDPDSDGTKISTVKVQGNDISHKLQISKVRKKDEGLYECRVTDANYGELQEHKAQAYLKVNANSHARRMQAFEASPMWLQDMKPRKNVSAAIPSSIHGSANQRTHSTSSPQVVAKIPKQSPQSAKSKSPVKSTERTAKLTLNSKHHPAPTVL

SEQ ID NO: 12506 - protein, 1461 aa, Homo sapiens
MSIAIPLGVTTSDTSYSDMAAGSDPESVEASPAVNEKSVYSTHNYGTTQRHGCRGLPYADHNYGAPPPPTPPASPPVQTIIPRSDLNGLPSPVEERCGDSPNSEGETVPTWCPCGLSQDGFLLNCDKCRGMSRGKVIRLHRRKQDNISGGDSSATESWDEELSPSTVLYTATQHTPTSITLTVRRTKPKKRKKSPEKGRAAPKTKKIKNSPSEAQNLDENTTEGWENRIRLWTDQYEEAFTNQYSADVQNALEQHLHSSKEFVGKPTILDTINKTELACNNTVIGSQMQLQLGRVTRVQKHRKILRAARDLALDTLIIEYRGKVMLRQQFEVNGHFFKKPYPFVLFYSKFNGVEMCVDARTFGNDARFIRRSCTPNAEVRHMIADGMIHLCIYAVSAITKDAEVTIAFDYEYSNCNYKVDCACHKGNRNCPIQKRNPNATELPLLPPPPSLPTIGAETRRRKARRKELEMEQQNEASEENNDQQSQEVPEKVTVSSDHEEVDNPEEKPEEEKEEVIDDQENLAHSRRTREDRKVEAIMHAFENLEKRKKRRDQPLEQSNSDVEITTTTSETPVGEETKTEAPESEVSNSVSNVTIPSTPQSVGVNTRRSSQAGDIAAEKLVPKPPPAKPSRPRPKSRISRYRTSSAQRLKRQKQANAQQAELSQAALEEGGSNSLVTPTEAGSLDSSGENRPLTGSDPTVVSITGSHVNRAASKYPKTKKYLVTEWLNDKAEKQECPVECPLRITTDPTVLATTLNMLPGLIHSPLICTTPKHYIRFGSPFIPERRRRPLLPDGTFSSCKKRWIKQALEEGMTQTSSVPQETRTQHLYQSNENSSSSSICKDNADLLSPLKKWKSRYLMEQNVTKLLRPLSPVTPPPPNSGSKSPQLATPGSSHPGEEECRNGYSLMFSPVTSLTTASRCNTPLQFELCHRKDLDLAKVGYLDSNTNSCADRPSLLNSGHSDLAPHPSLGPTSETGFPSRSGDGHQTLVRNSDQAFRTEFNLMYAYSPLNAMPRADGLYRGSPLVGDRKPLHLDGGYCSPAEGFSSRYEHGLMKDLSRGSLSPGGERACEGVPSAPQNPPQRKKVSLLEYRKRKQEAKENSAGGGGDSAQSKSKSAGAGQGSSNSVSDTGAHGVQGSSARTPSSPHKKFSPSHSSMSHLEAVSPSDSRGTSSSHCRPQENISSRWMVPTSVERLREGGSIPKVLRSSVRVAQKGEPSPTWESNITEKDSDPADGEGPETLSSALSKGATVYSPSRYSYQLLQCDSPRTESQSLLQQSSSPFRGHPTQSPGYSYRTTALRPGNPPSHGSSESSLSSTSYSSPAHPVSTDSLAPFTGTPGYFSSQPHSGNSTGSNLPRRSCPSSAASPTLQGPSDSPTSDSVSQSSTGTLSSTSFPQNSRSSLPSDLRTISLPSAGQSAVYQASRVSAVSNSQHYPHRGSGGVHQYRLQPLQGSGVKTQTGLS

SEQ ID NO: 12507 - protein, 1274 aa, Homo sapiens
MAVRQAATAGTPGPRREEEAALLFERAHYRHDPRWLLPVTPRLCLACALELLPDPGVSLVRKKHMLSCFQDALVRHTSLVTQLVSQDQRVCIHFISVLFGLLCSMEDGSVTDLCIEVLIQITTQLKLEQTIRCLLDECHKELCNMPSMRGSLATLTLLGKLVDAIPALADELVMEHGNLMEHLLRGLVYPSEGIQASVCYLYGKLYSSPVAAEMLSGHFREKLFPLFLSILDGAQTKELQINCLGLLRQLLKYDLFVSMIMNQDGLGESAKNIEGSSGNTSLPLVLKKLLLSRDETLQVASAHCITAVLVHSPAKHASAFIHADIPEFLFEHLSSSSEVLVWSSCNCLTLLVEEPLFFSKCHTVYGIEAVVRSLQGSLKMNNIELHKQGLLLFAEILTRQPEEIKLFTSSAMCRDAGRALQEAVSSPVLEVAAEALKATSAFLRKDHQSTPPVQYGELQALLEAMLNRCAEFSQTLLSRRPLGHASSRDSEKAILQRGKFLLSTLEGFRSACRLAIEFQSEPSAQENPFTAPSAKKEDTLEAFSEFLLSACDSLCIPMVMRHLEQTTHPALMEVFLSILHNLFVIVPHMKEKFSKKLASSSFIRLTLELKARFCSGLSHSALNQVCSNFLYYMCLNLLSAPEKTGPPSKEELSAVSELLQHGLPQISSRSPESLAFLSDRQYMEGAARQRQYCILLLFYLAYIHEDRFVSEAELFEAVQSFLLSLQDQGERPPLVVFKASIYLLAICQDKDNTLRETMVSAIRKFLEGIPDLQLVYTHHPLLLRFFLLYPELMSRYGHRVLELWFFWEESSYEELDDVTSAGQPALPASLVVLFQLLRSIPSILLILLDLIYSSPVDTAHKVLISLRTFLRRNEDIQVGGLIRGHFLLILQRLLVEHGASPSGASGNLPLLLSLLSLMQLRNVSEQELDSVAMKLLHQVSKLCGKCSPTDVDILQPSFNFLYWSLHQTTPSSQKRAAAVLLSSTGLMELLEKMLALTLAKADSPRTALLCSAWLLTASFSAQQHKGSLQVHQTLSVEMDQVLKALSFPKKKAALLSAAILCFLRTALRQSFSSALVALVPSGAQPLPATKDTVLAPLRMSQVRSLVIGLQNLLVQKDPLLSQACVGCLEALLDYLDARSPDIALHVASQPWNRFLLFTLLDAGENSFLRPEILRLMTLFMRYRSSSVLSHEEVGDVLQGVALADLSTLSNTTLQALHGFFQQLQSMGHLADHSMAQTLQASLEGLPPSTSSGQPPLQDMLCLGGVAVSLSHIRN

SEQ ID NO: 12508 - protein, 822 aa, Homo sapiens
MDFSRLHMYSPPQCVPENTGYTYALSSSYSSDALDFETEHKLDPVFDSPRMSRRSLRLATTACTLGDGEAVGADSGTSSAVSLKNRAARTTKQRRSTNKSAFSINHVSRQVTSSGVSHGGTVSLQDAVTRRPPVLDESWIREQTTVDHFWGLDDDGDLKGGNKAAIQGNGDVGAAAATAHNGFSCSNCSMLSERKDVLTAHPAAPGPVSRVYSRDRNQKCDDCKGKRHLDAHTAAHSQSPRLPGRAGTLWHIWACAGYFLLQILRRIGAVGQAVSRTAWSALWLAVVAPGKAASGVFWWLGIGWYQFVTLISWLNVFLLTRCLRNICKFLVLLIPLFLLLAGLSLRGQGNFFSFLPVLNWASMHRTQRVDDPQDVFKPTTSRLKQPLQGDSEAFPWHWMSGVEQQVASLSGQCHHHGENLRELTTLLQKLQARVDQMEGGAAGPSASVRDAVGQPPRETDFMAFHQEHEVRMSHLEDILGKLREKSEAIQKELEQTKQKTISAVGEQLLPTVEHLQLELDQLKSELSSWRHVKTGCETVDAVQERVDVQVREMVKLLFSEDQQGGSLEQLLQRFSSQFVSKGDLQTMLRDLQLQILRNVTHHVSVTKQLPTSEAVVSAVSEAGASGITEAQARAIVNSALKLYSQDKTGMVDFALESGGGSILSTRCSETYETKTALMSLFGIPLWYFSQSPRVVIQPDIYPGNCWAFKGSQGYLVVRLSMMIHPAAFTLEHIPKTLSPTGNISSAPKDFAVYGLENEYQEEGQLLGQFTYDQDGESLQMFQALKRPDDTAFQIVELRIFSNWGHPEYTCLYRFRVHGEPVK

SEQ ID NO: 12509 - protein, 437 aa, Homo sapiens
MLQDLSASVFFPPCSQHRTLAQVPDNDEQFVPDYQAESLAFHGLPLKIKKEPHSPCSEISSACSQEQPFKFSYGEKCLYNVSAYDQKPQVGMRPSNPPTPSSTPVSPLHHASPNSTHTPKPDRAFPAHLPPSQSIPDSSYPMDHRFRRQLSEPCNSFPPLPTMPREGRPMYQRQMSEPNIPFPPQGFKQEYHDPVYEHNTMVGSAASQSFPPPLMIKQEPRDFAYDSEVPSCHSIYMRQEGFLAHPSRTEGCMFEKGPRQFYDDTCVVPEKFDGDIKQEPGMYREGPTYQRRGSLQLWQFLVALLDDPSNSHFIAWTGRGMEFKLIEPEEVARRWGIQKNRPAMNYDKLSRSLRYYYEKGIMQKVAGERYVYKFVCDPEALFSMAFPDNQRPLLKTDMERHINEEDTVPLSHFDESMAYMPEGGCCNPHPYNEGYVY

SEQ ID NO: 12510 - protein, 1160 aa, Homo sapiens
MASVWKRLQRVGKHASKFQFVASYQELMVECTKKWQPDKLVVVWTRRSRRKSSKAHSWQPGIKNPYRGVVVWPVPENIEITVTLFKDPHAEEFEDKEWTFVIENESPSGRRKALATSSINMKQYASPMPTQTDVKLKFKPLSKKVVSAALQFSLSCIFLREGKATDEDMQSLASLMSMKQADIGNLDDFEEDNEDDDENRVNQEEKAAKITELINKLNFLDEAEKDLATVNSNPFDDPDAAELNPFGDPDSEEPITETASPRKTEDSFYNNSYNPFKEVQTPQYLNPFDEPEAFVTIKDSPPQSTKRKNIRPVDMSKYLYADSSKTEEEELDESNPFYEPKSTPPPNNLVNPVQELETERRVKRKAPAPPVLSPKTGVLNENTVSAGKDLSTSPKPSPIPSPVLGRKPNASQSLLVWCKEVTKNYRGVKITNFTTSWRNGLSFCAILHHFRPDLIDYKSLNPQDIKENNKKAYDGFASIGISRLLEPSDMVLLAIPDKLTVMTYLYQIRAHFSGQELNVVQIEENSSKSTYKVGNYETDTNSSVDQEKFYAELSDLKREPELQQPISGAVDFLSQDDSVFVNDSGVGESESEHQTPDDHLSPSTASPYCRRTKSDTEPQKSQQSSGRTSGSDDPGICSNTDSTQAQVLLGKKRLLKAETLELSDLYVSDKKKDMSPPFICEETDEQKLQTLDIGSNLEKEKLENSRSLECRSDPESPIKKTSLSPTSKLGYSYSRDLDLAKKKHASLRQTESDPDADRTTLNHADHSSKIVQHRLLSRQEELKERARVLLEQARRDAALKAGNKHNTNTATPFCNRQLSDQQDEERRRQLRERARQLIAEARSGVKMSELPSYGEMAAEKLKERSKASGEQNSKLVDLKLKKLLEVQPQVANSPSSAAQKAVTESSEQDMKSGTEDLRTERLQKTTERFRNPVVFSKDSTVRKTQLQSFSQYIENRPEMKRQRSIQEDTKKGNEEKAAITETQRKPSEDEVLNKGFKDTSQYVVGELAALENEQKQIDTRAALVEKRLRYLMDTGRNTEEEEAMMQEWFMLVNKKNALIRRMNQLSLLEKEHDLERRYELLNRELRAMLAIEDWQKTEAQKRREQLLLDELVALVNKRDALVRDLDAQEKQAEEEDEHLERTLEQNKGKMAKKEEKCVLQ

SEQ ID NO: 12511 - protein, 630 aa, Homo sapiens
MRTVVLTMKASVIEMFLAVPQINCDVKAGKIIDPEFIVKCPAGCQDPKYHVYGTDVYASYSSVCGAAVHSGVLDNSGGKILVRKVAGQSGYKGSYSNGVQSLSLPRWRESFIVLESKPKKGVTYPSALTYSSSKSPAAQAGETTKAYQRPPIPGTTAQPVTLMQLLAVTVAVATPTTLPRPSPSAASTTSIPRPQSVGHRSQEMGEMDSWKPGSVLLDEGLVPKEELSTQSLEPVSLGDPNCKIDLSFLIDGSTSIGKRRFRIQKQLLADVAQALDIGPAGPLMGVVQYGDNPATHFNLKTHTNSRDLKTAIEKITQRGGLSNVGRAISFVTKNFFSKANGNRSGAPNVVVVMVDGWPTDKVEEASRLARESGINIFFITIEGAAENEKQYVVEPNFANKAVCRTNGFYSLHVQSWFGLHKTLQPLVKRVCDTDRLACSKTCLNSADIGFVIDGSSSVGTGNFRTVLQFVTNLTKEFEISDTDTRIGAVQYTYEQRLEFGFDKYSSKPDILNAIKRVGYWSGGTSTGAAINFALEQLFKKSKPNKRKLMILITDGRSYDDVRIPAMAAHLKGVITYAIGVAWAAQEELEVIATHPARDHSFFVDEFDNLHQYVPRIIQNICTEFNSQPRN

SEQ ID NO: 12512 - protein, 626 aa, Homo sapiens
MLPARGCVRKRTVWPRLARVLIVTLLTLELSYAPLPCQLSGVPYNTGDPVGRWARPCIWPCPWHTTINALKGRISELQWSVMDQEMRVKRLESEKQELQEQLDLQHKKCQEANQKIQELQASQEARADHEQQIKDLEQKLSLQEQDAAIVKNMKSELVRLPRLERELKQLREESAHLREMRETNGLLQEELEGLQRKLGRQEKMQETLVGLELENERLLAKLQSWERLDQTMGLSIRTPEDLSRFVVELQQRELALKDKNSAVTSSARGLEKARQQLQEELRQVSGQLLEERKKRETHEALARRLQKRVLLLTKERDGMRAILGSYDSELTPAEYSPQLTRRMREAEDMVQKVHSHSAEMEAQLSQALEELGGQKQRADMLEMELKMLKSQSSSAEQSFLFSREEADTLRLKVEELEGERSRLEEEKRMLEAQLERRALQGDYDQSRTKVLHMSLNPTSVARQRLREDHSQLQAECERLRGLLRAMERGGTVPADLEAAAASLPSSKEVAELKKQVESAELKNQRLKEVFQTKIQEFRKACYTLTGYQIDITTENQYRLTSLYAEHPGDCLIFKATSPSGSKMQLLETEFSHTVGELIEVHLRRQDSIPAFLSSLTLELFSRQTVA

SEQ ID NO: 12513 - protein, 745 aa, Homo sapiens
MKSSVAQIKPSSGHDRRENLNSYQRNSSPEDRYEEQERSPRDRDYFDYSRSDYEHSRRGRSYDSSMESRNRDREKRRERERDTDRKRSRKSPSPGRRNPETSVTQSSSAQDEPATKKKKDELDPLLTRTGGAYIPPAKLRMMQEQITDKNSLAYQRMSWEALKKSINGLINKVNISNISIIIQELLQENIVRGRGLLSRSVLQAQSASPIFTHVYAALVAIINSKFPQIGELILKRLILNFRKGYRRNDKQLCLTASKFVAHLINQNVAHEVLCLEMLTLLLERPTDDSVEVAIGFLKECGLKLTQVSPRGINAIFERLRNILHESEIDKRVQYMIEVMFAVRKDGFKDHPIILEGLDLVEEDDQFTHMLPLEDDYNPEDVLNVFKMDPNFMENEEKYKAIKKEILDEGDTDSNTDQDAGSSEEDEEEEEEEGEEDEEGQKVTIHDKTEINLVSFRRTIYLAIQSSLDFEECAHKLLKMEFPESQTKELCNMILDCCAQQRTYEKFFGLLAGRFCMLKKEYMESFEGIFKEQYDTIHRLETNKLRNVAKMFAHLLYTDSLPWSVLECIKLSEETTTSSSRIFVKIFFQELCEYMGLPKLNARLKDETLQPFFEGLLPRDNPRNTRFAINFFTSIGLGGLTDELREHLKNTPKVIVAQKPDVEQNKSSPSSSSSASSSSESDSSDSDSDSSDSSSESSSEESDSSSISSHSSASANDVRKKGHGKTRSKEVDKLIRNQQTNDRKQK

SEQ ID NO: 12514 - protein, 1170 aa, Homo sapiens
MAAALGASGGAGAGDDDFDQFDKPGAERSWRRRAADEDWDSELEDDLLGEDLLSGKKNQSDLSDEELNDDLLQSDNEDEENFSSQGVTISLNATSGMVTSFELSDNTNDQSGEQESEYEQEQGEDELVYHKSDGSELYTQEYPEEGQYEGHEAELTEDQIEYVEEPEEEQLYTDEVLDIEINEPLDEFTGGMETLELQKDIKEESDEEEEDDEESGRLRFKTERKEGTIIRLSDVTRERRNIPETLELSAEAKAALLEFEERERQHKQGRYSSRRGGRRGGPLMCRGVGDQRRESTERGRMKDHRPALLPTQPPVVPQAPPPPPPPPQQQPIRSLFQPQPLQPLLPVQHPHHPSPPQGMHMPPQLETPRMMMTPPPVTPQQPKNIHINPHFKGTVVTPVQVPLLPVPSQPRPAVGPQRFPGPPEFPQHTPGPVPNSFSQPPRLPLQDQWRAPPPPQDRDPFFLGVSGEPRFPSHLFLEQRSPPPPPPPPTLLNSSHPVPTQSPLPFTQPGPAFNQQGQQPVFPRERPVRPALQPPGPVGILHFSQPGSATTRPFIPPRQPFLPGPGQPFLPTHTQPNLQGPLHPPLPPPHQPQPQQPQQQPPPQHQPPHQPPHQPPPQHQPPPQHPPQHPPQHQHHHHHHHLSVPPPPLMPMSQPQFRPHVQTAQPQASSSRMQCPQRQGLRHNTTSQNVSKRPMQQMQPTAPRNSNLRELPIAPSHVIEMSSSRCSATPSAQVKPIVSASPPSRAVAGSRSSQGKTEVKVKPASPVAQPKEEAKTETEFPDEDEETRLYRLKIEEQKRLREEILKQKELRRQQQAGARKKELLERLAQQQQQLYAPPPPAEQEEQALSPSPTNGNPLLPFPGAQVRQNVKNRLLVKNQDVSISNVQPKTSNFVPSSANMQYQGQQMKALKHLRQTRTVPQSQTQPLHKVLPIKPADVEEPAVPQTPRVASIQGRPQDTKPGVKRTVTHRTNSGGGDGPHISSKVRVIKLSGGGGESDGFFHPEGQPQRLPQPPEVGPQPARKVTLTRGGLQQPPHLPAGPHAHSPVPPGIKSIQGIHPAKKAIMHGRGRGVAGPMGRGRLMPNKQNLRVVECKPQPCVVSVEGLSSSTTDAQLKSLLMSVGPIQSLQMLPQQRKAIAKFKEPAHALAFQQKFHRHMIDLSHINVALIVE

SEQ ID NO: 12515 - protein, 1392 aa, Homo sapiens
MASVKVAVRVRPMNRREKDLEAKFIIQMEKSKTTITNLKIPEGGTGDSGRERTKTFTYDFSFYSADTKSPDYVSQEMVFKTLGTDVVKSAFEGYNACVFAYGQTGSGKSYTMMGNSGDSGLIPRICEGLFSRINETTRWDEASFRTEVSYLEIYNERVRDLLRRKSSKTFNLRVREHPKEGPYVEDLSKHLVQNYGDVEELMDAGNINRTTAATGMNDVSSRSHAIFTIKFTQAKFDSEMPCETVSKIHLVDLAGSERADATGATGVRLKEGGNINKSLVTLGNVISALADLSQDAANTLAKKKQVFVPYRDSVLTWLLKDSLGGNSKTIMIATISPADVNYGETLSTLRYANRAKNIINKPTINEDANVKLIRELRAEIARLKTLLAQGNQIALLDSPTALSMEEKLQQNEARVQELTKEWTNKWNETQNILKEQTLALRKEGIGVVLDSELPHLIGIDDDLLSTGIILYHLKEGQTYVGRDDASTEQDIVLHGLDLESEHCIFENIGGTVTLIPLSGSQCSVNGVQIVEATHLNQGAVILLGRTNMFRFNHPKEAAKLREKRKSGLLSSFSLSMTDLSKSRENLSAVMLYNPGLEFERQQREELEKLESKRKLIEEMEEKQKSDKAELERMQQEVETQRKETEIVQLQIRKQEESLKRRSFHIENKLKDLLAEKEKFEEERLREQQEIELQKKRQEEETFLRVQEELQRLKELNNNEKAEKFQIFQELDQLQKEKDEQYAKLELEKKRLEEQEKEQVMLVAHLEEQLREKQEMIQLLRRGEVQWVEEEKRDLEGIRESLLRVKEARAGGDEDGEELEKAQLRFFEFKRRQLVKLVNLEKDLVQQKDILKKEVQEEQEILECLKCEHDKESRLLEKHDESVTDVTEVPQDFEKIKPVEYRLQYKERQLQYLLQNHLPTLLEEKQRAFEILDRGPLSLDNTLYQVEKEMEEKEEQLAQYQANANQLQKLQATFEFTANIARQEEKVRKKEKEILESREKQQREALERALARLERRHSALQRHSTLGMEIEEQRQKLASLNSGSREQSGLQASLEAEQEALEKDQERLEYEIQQLKQKIYEVDGVQKDHHGTLEGKVASSSLPVSAEKSHLVPLMDARINAYIEEEVQRRLQDLHRVISEGCSTSADTMKDNEKLHNGTIQRKLKYELCRDLLCVLMPEPDAAACANHPLLQQDLVQLSLDWKTEIPDLVLPNGVQVSSKFQTTLVDMIYFLHGNMEVNVPSLAEVQLLLYTTVKVMGDSGHDQCQSLVLLNTHIALVKEDCVFYPRIRSRNIPPPGAQFDVIKCHALSEFRCVVVPEKKNVSTVELVFLQKLKPSVGSRNSPPEHLQEAPNVQLFTTPLYLQGSQNVAPEVWKLTFNSQDEALWLISHLTRL

SEQ ID NO: 12516 - protein, 1231 aa, Homo sapiens
MVLLWEPAGAWLALGLALALGPSVAAAAPRQDCTGVECPPLENCIEEALEPGACCATCVQQGCACEGYQYYDCLQGGFVRGRVPAGQSYFVDFGSTECSCPPGGGKISCQFMLCPELPPNCIEAVVVADSCPQCGQVGCVHAGHKYAAGHTVHLPPCRACHCPDAGGELICYQLPGCHGNFSDAEEGDPERHYEDPYSYDQEVAEVEAATALGGEVQAGAVQAGAGGPPAALGGGSQPLSTIQAPPWPAVLPRPTAAAALGPPAPVQAKARRVTEDSEEEEEEEEEREEMAVTEQLAAGGHRGLDGLPTTAPAGPSLPIQEERAEAGARAEAGARPEENLILDAQATSRSTGPEGVTHAPSLGKAALVPTQAVPGSPRDPVKPSPHNILSTSLPDAAWIPPTREVPRKPQVLPHSHVEEDTDPNSVHSIPRSSPEGSTKDLIETCCAAGQQWAIDNDECLEIPESGTEDNVCRTAQRHCCVSYLQEKSCMAGVLGAKEGETCGAEDNDSCGISLYKQCCDCCGLGLRVRAEGQSCESNPNLGYPCNHVMLSCCEGEEPLIVPEVRRPPEPAAAPRRVSEAEMAGREALSLGTEAELPNSLPGDDQDECLLLPGELCQHLCINTVGSYHCACFPGFSLQDDGRTCRPEGHPPQPEAPQEPALKSEFSQVASNTIPLPLPQPNTCKDNGPCKQVCSTVGGSAICSCFPGYAIMADGVSCEDQDECLMGAHDCSRRQFCVNTLGSFYCVNHTVLCADGYILNAHRKCVDINECVTDLHTCSRGEHCVNTLGSFHCYKALTCEPGYALKDGECEDVDECAMGTHTCQPGFLCQNTKGSFYCQARQRCMDGFLQDPEGNCVDINECTSLSEPCRPGFSCINTVGSYTCQRNPLICARGYHASDDGTKCVDVNECETGVHRCGEGQVCHNLPGSYRCDCKAGFQRDAFGRGCIDVNECWASPGRLCQHTCENTLGSYRCSCASGFLLAADGKRCEDVNECEAQRCSQECANIYGSYQCYCRQGYQLAEDGHTCTDIDECAQGAGILCTFRCLNVPGSYQCACPEQGYTMTANGRSCKDVDECALGTHNCSEAETCHNIQGSFRCLRFECPPNYVQVSKTKCERTTCHDFLECQNSPARITHYQLNFQTGLLVPAHIFRIGPAPAFTGDTIALNIIKGNEEGYFGTRRLNAYTGVVYLQRAVLEPRDFALDVEMKLWRQGSVTTFLAKMHIFFTTFAL

SEQ ID NO: 12517 - protein, 521 aa, Homo sapiens
MKNCGVNCSGDVFTALIGEIASPNYPKPYPENSRCEYQIRLEKGFQVVVTLRREDFDVEAADSAGNCLDSLVFVAGDRQFGPYCGHGFPGPLNIETKSNALDIIFQTDLTGQKKGWKLRYHGDPMPCPKEDTPNSVWEPAKAKYVFRDVVQITCLDGFEVVEGRVGATSFYSTCQSNGKWSNSKLKCQPVDCGIPESIENGKVEDPESTLFGSVIRYTCEEPYYYMENGGGGEYHCAGNGSWVNEVLGPELPKCVPVCGVPREPFEEKQRIIGGSDADIKNFPWQVFFDNPWAGGALINEYWVLTAAHVVEGNREPTMYVGSTSVQTSRLAKSKMLTPEHVFIHPGWKLLEVPEGRTNFDNDIALVRLKDPVKMGPTVSPICLPGTSSDYNLMDGDLGLISGWGRTEKRDRAVRLKAARLPVAPLRKCKEVKVEKPTADAEAYVFTPNMICAGGEKGMDSCKGDSGGAFAVQDPNDKTKFYAAGLVSWGPQCGTYGLYTRVKNYVDWIMKTMQENSTPRED

SEQ ID NO: 12518 - protein, 1151 aa, Homo sapiens
MSRRKQSKPRQIKRPLEDAIEDEEEECPSEETDIISKGDFPLEESFSTEFGPENLSCEEVEYFCNKGDDEGIQETAESDGDTQSEKPGQPGVETDDWDGPGELEVFQKDGERKIQSRQQLPVGTTWGPFPGKMDLNNNSLKTKAQVPMVLTAGPKWLLDVTWQGVEDNKNNCIVYSKGGQLWCTTTKAISEGEELIAFVVDFDSRLQAASQMTLTEGMYPARLLDSIQLLPQQAAMASILPTAIVNKDIFPCKSCGIWYRSERNLQAHLMYYCSGRQREAAPVSEENEDSAHQISSLCPFPQCTKSFSNARALEMHLNSHSGVKMEEFLPPGASLKCTVCSYTADSVINFHQHLFSHLTQAAFRCNHCHFGFQTQRELLQHQELHVPSGKLPRESDMEHSPSATEDSLQPATDLLTRSELPQSQKAMQTKDASSDTELDKCEKKTQLFLTNQRPEIQPTTNKQSFSYTKIKSEPSSPRLASSPVQPNIGPSFPVGPFLSQFSFPQDITMVPQASEILAKMSELVHRRLRHGSSSYPPVIYSPLMPKGATCFECNITFNNLDNYLVHKKHYCSSRWQQMAKSPEFPSVSEKMPEALSPNTGQTSINLLNPAAHSADPENPLLQTSCINSSTVLDLIGPNGKGHDKDFSTQTKKLSTSSNNDDKINGKPVDVKNPSVPLVDGESDPNKTTCEACNITFSRHETYMVHKQYYCATRHDPPLKRSASNKVPAMQRTMRTRKRRKMYEMCLPEQEQRPPLVQQRFLDVANLNNPCTSTQEPTEGLGECYHPRCDIFPGIVSKHLETSLTINKCVPVSKCDTTHSSVSCLEMDVPIDLSKKCLSQSERTTTSPKRLLDYHECTVCKISFNKVENYLAHKQNFCPVTAHQRNDLGQLDGKVFPNPESERNSPDVSYERSIIKCEKNGNLKQPSPNGNLFSSHLATLQGLKVFSEAAQLIATKEENRHLFLPQCLYPGAIKKAKGADQLSPYYGIKPSDYISGSLVIHNTDIEQSRNAENESPKGQASSNGCAALKKDSLPLLPKNRGMVIVNGGLKQDERPAANPQQENISQNPQHEDDHKSPSWISENPLAANENVSPGIPSAEEQLSSIAKGVNGSSQAPTSGKYCRLCDIQFNNLSNFITHKKFYCSSHAAEHVK

SEQ ID NO: 12519 - protein, 698 aa, Homo sapiens
MAANMYRVGDYVYFENSSSNPYLIRRIEELNKTANGNVEAKVVCFYRRRDISSTLIALADKHAREIEEEMENPEMVDLPEKLKHQLRHRELFLSRQLESLPATHIRGKCSVTLLNETESLKSYLEREDFFFYSLVYDPQQKTLLADKGEIRVGNRYQADITDLLKEGEEDGRDQSRLETQVWEAHNPLTDKQIDQFLVVARSVGTFARALDCSSSVRQPSLHMSAAAASRDITLFHAMDTLHKNIYDISKAISALVPQGGPVLCRDEMEEWSASEANLFEEALEKYGKDFTDIQQDFLPWKSLTSIIEYYYMWKTTDRYVQQKRLKAAEAESKLKQVYIPNYNKPNPNQISVNNVKAGVVNGTGAPGQSPGAGRACESCYTTQSYQWYSWGPPNMQCRLCASCWTYWKKYGGLKMPTRLDGERPGPNRSNMSPHGLPARSSGSPKFAMKTRQAFYLHTTKLTRIARRLCREILRPWHAARHPYLPINSAAIKAECTARLPEASQSPLVLKQAVRKPLEAVLRYLETHPRPPKPDPVKSVSSVLSSLTPAKVAPVINNGSPTILGKRSYEQHNGVDGNMKKRLLMPSRGLANHGQARHMGPSRNLLLNGKSYPTKVRLIRGGSLPPVKRRRMNWIDAPDDVFYMATEETRKIRKLLSSSETKRAARRPYKPIALRQSQALPPRPPPPAPVNDEPIVIED

SEQ ID NO: 12520 - protein, 1445 aa, Homo sapiens
LRPGIFLLELLLLLGQGTPQIHTSPRKSTLEGQLWPETLKNSPFPCNPNKLGVNMPSKSVHSLKPSDIKFVAAIGNLEIPPDPGTGDLEKQDWTERPQQVCMGVMTVLSDIIRYFSPSVPMPVCHTGKRVIPHDGAEDLWIQAQELVRNMKENLQLDFQFDWKLINVFFSNASQCYLCPSAQQAPSLSTVLLSQNGLAAGGVDELMGVLDYLQQEVPRAFVNLVDLSEVAEVSRQYHGTWLSPAPEPCNCSEETTRLAKVVMQWSYQEAWNSLLASSRYSEQESFTVVFQPFFYETTPSLHSEDPRLQDSTTLAWHLWNRMMEPAGEKDEPLSVKHGRPMKCPSQESPYLFSYRNSNYLTRLQKPQDKLEVREGAEIRCPDKDPSDTVPTSVHRLKPADINVIGALGDSLTAGNGAGSTPGNVLDVLTQYRGLSWSVGGDENIGTVTTLANILREFNPSLKGFSVGTGKETSPNAFLNQAVAGGRAEDLPVQARRLVDLMKNDTRIHFQEDWKIITLFIGGNDLCDFCNDLVPRAFVNLVTVLEIVNLRELYQEKKVYCPRMILRSLCPCVLKFDDNSTELATLIEFNKKFQEKTHQLIESGRYDTREDFTVVVQPFFENVDMPKTSEGLPDNSFFAPDCFHFSSKSHSRAASALWNNMLEPVGQKTTRHKFENKINITCPNQVQPFLRTYKNSMQGHGTWLPCRDRAPSALHPTSVHALRPADIQVVAALGDSLTAGNGIGSKPDDLPDVTTQYRGLSYSAGGDGSLENVTTLPNILREFNRNLTGYAVGTGDANDTNAFLNQAVPGAKAEDLMSQVQTLMQKMKDDHRVNFHEDWKVITVLIGGSDLCDYCTDSNLYSAANFVHHLRNALDVLHREVPRVLVNLVDFLNPTIMRQVFLGNPDKCPVQQASVLCNCVLTLRENSQELARLEAFSRAYRSSMRELVGSGRYDTQEDFSVVLQPFFQNIQLPVLADGLPDTSFFAPDCIHPNQKFHSQLARALWTNMLEPLGSKTETLDLRAEMPITCPTQNEPFLRTPRNSNYTYPIKPAIENWGSDFLCTEWKASNSVPTSVHQLRPADIKVVAALGDSLTTAVGARPNNSSDLPTSWRGLSWSIGGDGNLETHTTLPNILKKFNPYLLGFSTSTWEGTAGLNVAAEGARARDMPAQAWDLVERMKNSPDINLEKDWKLVTLFIGVNDLCHYCENPEAHLATEYVQHIQQALDILSEELPRAFVNVVEVMELASLYQGQGGKCAMLAAQNNCTCLRHSQSSLEKQELKKVNWNLQHGISSFSYWHQYTQREDFAVVVQPFFQNTLTPLNERGDTDLTFFSEDCFHFSDRGHAEMAIALWNNMLEPVGRKTTSNNFTHSRAKLKCPSPESPYLYTLRNSRLLPDQAEEAPEVLYWAVPVAAGVGLVVGIIGTVVWRCRRGGRREDPPMSLRTVAL

SEQ ID NO: 12521 - protein, 690 aa, Homo sapiens
MGSSGLGKAATLDELLCTCIEMFDDNGELDNSYLPRIVLLMHRWYLSSTELAEKLLCMYRNATGESCNEFRLKICYFMRYWILKFPAEFNLDLGLIRMTEEFREVASQLGYEKHVSLIDISSIPSYDWMRRVTQRKKVSKKGKACLLFDHLEPIELAEHLTFLEHKSFRRISFTDYQSYVIHGCLENNPTLERSIALFNGISKWVQLMVLSKPTPQQRAEVITKFINVAKKLLQLKNFNTLMAVVGGLSHSSISRLKETHSHLSSEVTKNWNEMTELVSSNGNYCNYRKAFADCDGFKIPILGVHLKDLIAVHVIFPDWTEENKVNIVKMHQLSVTLSELVSLQNASHHLEPNMDLINLLTLSLDLYHTEDDIYKLSLVLEPRNSKSQPTSPTTPNKPVVPLEWALGVMPKPDPTVINKHIRKLVESVFRNYDHDHDGYISQEDFESIAANFPFLDSFCVLDKDQDGLISKDEMMAYFLRAKSQLHCKMGPGFIHNFQEMTYLKPTFCEHCAGFLWGIIKQGYKCKDCGANCHKQCKDLLVLACRRFARAPSLSSGHGSLPGSPSLPPAQDEVFEFPGVTAGHRDLDSRAITLVTGSSRKISVRLQRATTSQATQTEPVWSEAGWGDSGSHTFPKMKSKFHDKAAKDKGFAKWENEKPRVHAGVDVVDRGTEFELDQDEGEETRQDGEDG

SEQ ID NO: 12522 - protein, 437 aa, Homo sapiens
MFVLFLCNLSLVPAAASKNKVKGSQGQFPLTQNVTVVEGGTAILTCRVDQNDNTSLQWSNPAQQTLYFDDKKALRDNRIELVRASWHELSISVSDVSLSDEGQYTCSLFTMPVKTSKAYLTVLGVPEKPQISGFSSPVMEGDLMQLTCKTSGSKPAADIRWFKNDKEIKDVKYLKEEDANRKTFTVSSTLDFRVDRSDDGVAVICRVDHESLNATPQVAMQVLEIHYTPSVKIIPSTPFPQEGQPLILTCESKGKPLPEPVLWTKDGGELPDPDRMVVSGRELNILFLNKTDNGTYRCEATNTIGQSSAEYVLIVHDVPNTLLPTTIIPSLTTATVTTTVAITTSPTTSATTSSIRDPNALAGQNGPDHALIGGIVAVVVFVTLCSIFLLGRYLARHKGTYLTNEAKGAEDAPDADTAIINAEGSQVNAEEKKEYFI

SEQ ID NO: 12523 - protein, 1036 aa, Homo sapiens
MGFALERFAEAVDPALECKLCGQVLEEPLCTPCGHVFCASCLLPWAVRRRRCPLQCQPLAPGELYRVLPLRSLIQKLRVQCDYRARGCGHSVRLHELEAHVEHCDFGPARRLRSRGGCASGLGGGEVPARGGCGPTPRAGRGGGARGGPPGGRWGRGRGPGPRVLAWRRREKALLAQLWALQGEVQLTARRYQEKFTQYMAHVRNFVGDLGGGHRRDGEHKPFTIVLERENDTLGFNIIGGRPNQNNQEGTSTEGIYVSKILENGPADRADGLEIHDKIMEVNGKDLSKATHEEAVEAFRNAKEPIVVQVLRRTPLSRPAYGMASEVQLMNASTQTDITFEHIMALAKLRPPTPPVPDICPFLLSDSCHSLHPMEHEFYEDNEYISSLPADADRTEDFEYEEVELCRVSSQEKLGLTVCYRTDDEEDTGIYVSEVDPNSIAAKDGRIREGDRILQINGEDVQNREEAVALLSNDECKRIVLLVARPEIQLDEGWLEDERNEFLEELNLEMLEEEHNEAMQPTANEVEQPKKQEEEEGTTDTATSSSNNHEKDSGVGRTDESLRNDESSEQENAAEDPNSTSLKSKRDLGQSQDTLGSVELQYNESLVSGEYIDSDCIGNPDEDCERFRQLLELKCKIRNHGEYDLYYSSSTIECNQGEQEGVEHELQLLNEELRNIELECQNIMQAHRLQKVTDQYGDIWTLHDGGFRNYNTSIDMQRGKLDDIMEHPEKSDKDSSSAYNTAESCRSTPLTVDRSPDSSLPRVINLTNKKNLRSTMAATQSSSGQSSKESTSTKAKTTEQGCSAESKEKVLEGSKLPDQEKAVSEHIPYLSPYHSSSYRYANIPAHARHYQSYMQLIQQKSAVEYAQSQLSLVSMCKESQKCSEPKMEWKVKIRSDGTRYITKRPVRDRILKERALKIKEERSGMTTDDDTMSEMKMGRYWSKEERKQHLVRAKEQRRRREFMMRSRLECLKESPQSGSEGKKEINIIELSHKKMMKKRNKKILDNWMTIQELMTHGAKSPDGTRVHNAFLSVTTV

SEQ ID NO: 12524 - protein, 1027 aa, Homo sapiens
MYEGKHIHFSEVDNKPLCSYSPKLCKQRRLNGYAFCIRHVLEDKTAPFKQCEYVAKYNSQRCTNPIPKSEDRRYCNSHLQVLGFIPKKERKKKNDPIDEVKVRHQMDTMAFSLTVPTLALKMPNGLDGMSLSPPGARVPLHYLETELEDPFAFNEEDDDLKKGATVRKKLQSKLAQNRQRQRETEILKVRQEHFSPPPAPSQQQPPQQHSHLSPLSTSLKPPAPPQGSVCKSPQPQNTSLPMQGVAPTTHTIAQARQLSHKRPLPLLPSSRAPTVDPPRTDRILMKATAFSPHFSCISRLQRLVKLCTQKHQLDTDLFPHLGLDWSEESGEEPEDSEQASPYQVAWSIRETLRYQRHASDDDDAESRSSRVTQLCTYFQQKYKHLCRLERAESRQKKCRHTFRKALLQAASKEPECTGQLIQELRRAACSRTSISRTKLREVEPAACSGTVKGEQCANKALPFTRHCFQHILLNHSQQLFSSCTAKFADGQQCSVPVFDITHQTPLCEEHAKKMDNFLRGDNSRKVQHQQQRKPRKKTKPPALTKKHKKKRRRGPRRPQKPIPPAVPQGNLSMPASVSLPVEASHIRSPSTPELSADELPDDIANEITDIPHDLELNQEDFSDVLPRLPDDLQDFDFFEGKNGDLLPTTEEAEELERALQAVTSLECLSTIGVLAQSDGVPVQELSDRGIGVFSTGTGASGIQSLSREVNTDLGELLNGRIVHDNFSSLELDENLLRSATLSNPPTPLAGQIQGQFSAPANVGLTSATLISQSALGERAFPGQFHGLHDGSHASQRPHPAQLLSKADDLITSRQQYSSDHSHSSPHGSHYDSEHVPSPYSDHITSPHTTSYSGDNMAATFSAEMPIMAQHLLPTQLEVPLGGVVNPRTHWGNLPVNLGDPSPFSNLLGADGHLLSTSLSTPPTTSNSETTQPAFATVTPSSSSVLPGLPQTSFSGMGPSAELMASTSPKQQLPQFSAAFGHQLSSHSGIPKDLQPSHSSIAPPTGFTVTGATATSTNNASSPFPSPN

SEQ ID NO: 12525 - protein, 921 aa, Homo sapiens
MAVQPKETLQLESAAEVGFVRFFQGMPEKPTTTVRLFDRGDFYTAHGEDALLAAREVFKTQGVIKYMGPAGAKNLQSVVLSKMNFESFVKDLLLVRQYRVEVYKNRAGNKASKENDWYLAYKASPGNLSQFEDILFGNNDMSASIGVVGVKMSAVDGQRQVGVGYVDSIQRKLGLCEFPDNDQFSNLEALLIQIGPKECVLPGGETAGDMGKLRQIIQRGGILITERKKADFSTKDIYQDLNRLLKGKKGEQMNSAVLPEMENQVAVSSLSAVIKFLELLSDDSNFGQFELTTFDFSQYMKLDIAAVRALNLFQGSVEDTTGSQSLAALLNKCKTPQGQRLVNQWIKQPLMDKNRIEERLNLVEAFVEDAELRQTLQEDLLRRFPDLNRLAKKFQRQAANLQDCYRLYQGINQLPNVIQALEKHEGKHQKLLLAVFVTPLTDLRSDFSKFQEMIETTLDMDQVENHEFLVKPSFDPNLSELREIMNDLEKKMQSTLISAARDLGLDPGKQIKLDSSAQFGYYFRVTCKEEKVLRNNKNFSTVDIQKNGVKFTNSKLTSLNEEYTKNKTEYEEAQDAIVKEIVNISSGYVEPMQTLNDVLAQLDAVVSFAHVSNGAPVPYVRPAILEKGQGRIILKASRHACVEVQDEIAFIPNDVYFEKDKQMFHIITGPNMGGKSTYIRQTGVIVLMAQIGCFVPCESAEVSIVDCILARVGAGDSQLKGVSTFMAEMLETASILRSATKDSLIIIDELGRGTSTYDGFGLAWAISEYIATKIGAFCMFATHFHELTALANQIPTVNNLHVTALTTEETLTMLYQVKKGVCDQSFGIHVAELANFPKHVIECAKQKALELEEFQYIGESQGYDIMEPAAKKCYLERENLRVTEPKDQCLILLTWKRKLRGGKRSACSRPERQNQGSGELS

SEQ ID NO: 12526 - protein, 671 aa, Homo sapiens
MSELEEDFAKILMLKEERIKELEKRLSEKEEEIQELKRKLHKCQSVLPVPSTHIGPRTTRAQGISAEPQTYRSFHDLRQAFRKFTKSERSKDLIKEAILDNDFMKNLELSQIQEIVDCMYPVEYGKDSCIIKEGDVGSLVYVMEDGKVEVTKEGVKLCTMGPGKVFGELAILYNCTRTATVKTLVNVKLWAIDRQCFQTIMMRTGLIKHTEYMEFLKSVPTFQSLPEEILSKLADVLEETHYENGEYIIRQGARGDTFFIISKGTVNVTREDSPSEDPVFLRTLGKGDWFGEKALQGEDVRTANVIAAEAVTCLVIDRDSFKHLIGGLDDVSNKAYEDAEAKAKYEAEAAFFANLKLSDFNIIDTLGVGGFGRVELVQLKSEESKTFAMKILKKRHIVDTRQQEHIRSEKQIMQGAHSDFIVRLYRTFKDSKYLYMLMEACLGGELWTILRDRGSFEDSTTRFYTACVVEAFAYLHSKGIIYRDLKPENLILDHRGYAKLVDFGFAKKIGFGKKTWTFCGTPEYVAPEIILNKGHDISADYWSLGILMYELLTGSPPFSGPDPMKTYNIILRGIDMIEFPKKIAKNAANLIKKLCRDNPSERLGNLKNGVKDIQKHKWFEGFNWEGLRKGTLTPPIIPSVASPTDTSNFDSFPEDNDEPPPDDNSGWDIDF

SEQ ID NO: 12527 - protein, 2458 aa, Homo sapiens
MSGSTQPVAQTWRATEPRYPPHSLSYPVQIARTHTDVGLLEYQHHSRDYASHLSPGSIIQPQRRRPSLLSEFQPGNERSQELHLRPESHSYLPELGKSEMEFIESKRPRLELLPDPLLRPSPLLATGQPAGSEDLTKDRSLTGKLEPVSPPSPPHTDPELELVPPRLSKEELIQNMDRVDREITMVEQQISKLKKKQQQLEEEAAKPPEPEKPVSPPPIESKHRSLVQIIYDENRKKAEAAHRILEGLGPQVELPLYNQPSDTRQYHENIKINQAMRKKLILYFKRRNHARKQWEQKFCQRYDQLMEAWEKKVERIENNPRRRAKESKVREYYEKQFPEIRKQRELQERMQRVGQRGSGLSMSAARSEHEVSEIIDGLSEQENLEKQMRQLAVIPPMLYDADQQRIKFINMNGLMADPMKVYKDRQVMNMWSEQEKETFREKFMQHPKNFGLIASFLERKTVAECVLYYYLTKKNENYKSLVRRSYRRRGKSQQQQQQQQQQQQQQQQQPMPRSSQEEKDEKEKEKEAEKEEEKPEVENDKEDLLKEKTDDTSGEDNDEKEAVASKGRKTANSQGRRKGRITRSMANEANSEEAITPQQSAELASMELNESSRWTEEEMETAKKGLLEHGRNWSAIARMVGSKTVSQCKNFYFNYKKRQNLDEILQQHKLKMEKERNARRKKKKAPAAASEEAAFPPVVEDEEMEASGVSGNEEEMVEEAEATVNNSSDTESIPSPHTEAAKDTGQNGPKPPATLGADGPPPGPPTPPPEDIPAPTEPTPASEATGAPTPPPAPPSPSAPPPVVPKEEKEEETAAAPPVEEGEEQKPPAAEELAVDTGKAEEPVKSECTEEAEEGPAKGKDAEAAEATAEGALKAEKKEGGSGRATTAKSSGAPQDSDSSATCSADEVDEAEGGDKNRLLSPRPSLLTPTGDPRANASPQKPLDLKQLKQRAAAIPPIQVTKVHEPPREDAAPTKPAPPAPPPPQNLQPESDAPQQPGSSPRGKSRSPAPPADKEAEKPVFFPAFAAEAQKLPGDPPCWTSGLPFPVPPREVIKASPHAPDPSAFSYAPPGHPLPLGLHDTARPVLPRPPTISNPPPLISSAKHPSVLERQIGAISQGMSVQLHVPYSEHAKAPVGPVTMGLPLPMDPKKLAPFSGVKQEQLSPRGQAGPPESLGVPTAQEASVLRGTALGSVPGGSITKGIPSTRVPSDSAITYRGSITHGTPADVLYKGTITRIIGEDSPSRLDRGREDSLPKGHVIYEGKKGHVLSYEGGMSVTQCSKEDGRSSSGPPHETAAPKRTYDMMEGRVGRAISSASIEGLMGRAIPPERHSPHHLKEQHHIRGSITQGIPRSYVEAQEDYLRREAKLLKREGTPPPPPPSRDLTEAYKTQALGPLKLKPAHEGLVATVKEAGRSIHEIPREELRHTPELPLAPRPLKEGSITQGTPLKYDTGASTTGSKKHDVRSLIGSPGRTFPPVHPLDVMADARALERACYEESLKSRPGTASSSGGSIARGAPVIVPELGKPRQSPLTYEDHGAPFAGHLPRGSPVTTREPTPRLQEGSLSSSKASQDRKLTSTPREIAKSPHSTVPEHHPHPISPYEHLLRGVSGVDLYRSHIPLAFDPTSIPRGIPLDAAAAYYLPRHLAPNPTYPHLYPPYLIRGYPDTAALENRQTIINDYITSQQMHHNAATAMAQRADMLRGLSPRESSLALNYAAGPRGIIDLSQVPHLPVLVPPTPGTPATAMDRLAYLPTAPQPFSSRHSSSPLSPGGPTHLTKPTTTSSSERERDRDRERDRDREREKSILTSTTTVEHAPIWRPGTEQSSGSSGGGGGSSSRPASHSHAHQHSPISPRTQDALQQRPSVLHNTGMKGIITAVEPSTPTVLRSTSTSSPVRPAATFPPATHCPLGGTLDGVYPTLMEPVLLPKEAPRVARPERPRADTGHAFLAKPPARSGLEPASSPSKGSEPRPLVPPVSGHATIARTPAKNLAPHHASPDPPAPPASASDPHREKTQSKPFSIQELELRSLGYHGSSYSPEGVEPVSPVSSPSLTHDKGLPKHLEELDKSHLEGELRPKQPGPVKLGGEAAHLPHLRPLPESQPSSSPLLQTAPGVKGHQRVVTLAQHISEVITQDYTRHHPQQLSAPLPAPLYSFPGASCPVLDLRRPPSDLYLPPPDHGAPARGSPHSEGGKRSPEPNKTSVLGGGEDGIEPVSPPEGMTEPGHSRSAVYPLLYRDGEQTEPSRMGSKSPGNTSQPPAFFSKLTESNSAMVKSKKQEINKKLNTHNRNEPEYNISQPGTEIFNMPAITGTGLMTYRSQAVQEHASTNMGLEAIIRKALMGGGGKAKVSGRPSSRKAKSPAPGLASGDRPPSVSSVHSEGDCNRRTPLTNRVWEDRPSSAGSTPFPYNPLIMRLQAGVMASPPPPGLPAGSGPLAGPHHAWDEEPKPLLCSQYETLSDSE

SEQ ID NO: 12528 - protein, 1565 aa, Homo sapiens
MVQKKKFCPRLLDYLVIVGARHPSSDSVAQTPELLRRYPLEDHTEFPLPPDVVFFCQPEGCLSVRQRRMSLRDDTSFVFTLTDKDTGVTRYGICVNFYRSFQKRISKEKGEGGAGSRGKEGTHATCASEEGGTESSESGSSLQPLSADSTPDVNQSPRGKRRAKAGSRSRNSTLTSLCVLSHYPFFSTFRECLYTLKRLVDCCSERLLGKKLGIPRGVQRDTMWRIFTGSLLVEEKSSALLHDLREIEAWIYRLLRSPVPVSGQKRVDIEVLPQELQPALTFALPDPSRFTLVDFPLHLPLELLGVDACLQVLTCILLEHKVVLQSRDYNALSMSVMAFVAMIYPLEYMFPVIPLLPTCMASAEQLLLAPTPYIIGVPASFFLYKLDFKMPDDVWLVDLDSNRVIAPTNAEVLPILPEPESLELKKHLKQALASMSLNTQPILNLEKFHEGQEIPLLLGRPSNDLQSTPSTEFNPLIYGNDVDSVDVATRVAMVRFFNSANVLQGFQMHTRTLRLFPRPVVAFQAGSFLASRPRQTPFAEKLARTQAVEYFGEWILNPTNYAFQRIHNNMFDPALIGDKPKWYAHQLQPIHYRVYDSNSQLAEALSVPPERDSDSEPTDDSGSDSMDYDDSSSSYSSLGDFVSEMMKCDINGDTPNVDPLTHAALGDASEVEIDELQNQKEAEEPGPDSENSQENPPLRSSSSTTASSSPSTVIHGANSEPADSTEMDDKAAVGVSKPLPSVPPSIGKSNVDRRQAEIGEGAQKLLRPNSLRLASDSDAESDSRASSPNSTVSNTSTEGFGGIMSFASSLYRNHSTSFSLSNLTLPTKGAREKATPFPSLKVFGLNTLMEIVTEAGPGSGEGNRRALVDQKSSVIKHSPTVKREPPSPQGRSSNSSENQQFLKEVVHSVLDGQGVGWLNMKKVRRLLESEQLRVFVLSKLNRMVQSEDDARQDIIPDVEISRKVYKGMLDLLKCTVLSLEQSYAHAGLGGMASIFGLLEIAQTHYYSKEPDKRKRSPTESVNTPVGKDPGLAGRGDPKAMAQLRVPQLGPRAPSATGKGPKELDTRSLKEENFIASIGPEVIKPVFDLGETEEKKSQISADSGVSLTSSSQRTDQDSVIGVSPAVMIRSSSQDSEVSTVVSNSSGETLGADSDLSSNAGDGPGGEGSVHLASSRGTLSDSEIETNSATSTIFGKAHSLKPSIKEKLAGSPIRTSEDVSQRVYLYEGLLGKERSTLWDQMQFWEDAFLDAVMLEREGMGMDQGPQEMIDRYLSLGEHDRKRLEDDEDRLLATLLHNLISYMLLMKVNKNDIRKKVRRLMGKSHIGLVYSQQINEVLDQLANLNGRDLSIWSSGSRHMKKQTFVVHAGTDTNGDIFFMEVCDDCVVLRSNIGTVYERWWYEKLINMTYCPKTKVLCLWRRNGSETQLNKFYTKKCRELYYCVKDSMERAAARQQSIKPGPELGGEFPVQDLKTGEGGLLQVTLEGINLKFMHNQVFIELNHIKKCNTVRGVFVLEEFVPEIKEVVSHKYKTPMAHEICYSVLCLFSYVAAVHSSEEDLRTPPRPVSS

SEQ ID NO: 12529 - protein, 429 aa, Homo sapiens
MASLWESPQQCIILSPLSGWWFSIGISILTSSALVLKPQMLKGELQTRPSQRPSRKAFRRNNFEYTLEASKSLRQKPGDSTMTYLNKGQFYPITLKEVSSSEGIHHPISKVRSVIMVVFAEDKSREDQLRHWKYWHSRQHTAKQRCIDIADYKESFNTISNIEEIAYNAISFTWDINDEAKVFISVNCLSTDFSSQKGVKGLPLNIQVDTYSYNNRSNKPVHRAYCQIKVFCDKGAERKIRDEERKQSKRKVSDVKVPLLPSHKRMDITVFKPFIDLDTQPVLFIPDVHFANLQRGTHVLPIASEELEGEGSVLKRGPYGTEDDFAVPPSTKLARIEEPKRVLLYVRKESEEVFDALMLKTPSLKGLMEAISDKYDVPHDKIGKIFKKCKKGILVNMDDNIVKHYSNEDTFQLQIEEAGGSYKLTLTEI

SEQ ID NO: 12530 - protein, 1843 aa, Homo sapiens
MEPAERAGVGEPPEPGGRPEPGPRGFVPQKEIVYNKLLPYAERLDAESDLQLAQIKCNLGRAVQLQELWPGGLFWTRKLSTYIRLYGRKFSKEDHVLFIKLLYELVSIPKLEISMMQGFARLLINLLKKKELLSRADLELPWRPLYDMVERILYSKTEHLGLNWFPNSVENILKTLVKSCRPYFPADATAEMLEEWRPLMCPFDVTMQKAITYFEIFLPTSLPPELHHKGFKLWFDELIGLWVSVQNLPQWEGQLVNLFARLATDNIGYIDWDPYVPKIFTRILRSLNLPVGSSQVLVPRFLTNAYDIGHAVIWITAMMGGPSKLVQKHLAGLFNSITSFYHPSNNGRWLNKLMKLLQRLPNSVVRRLHRERYKKPSWLTPVPDSHKLTDQDVTDFVQCIIQPVLLAMFSKTGSLEAAQALQNLALMRPELVIPPVLERTYPALETLTEPHQLTATLSCVIGVARSLVSGGRWFPEGPTHMLPLLMRALPGVDPNDFSKCMITFQFIATFSTLVPLVDCSSVLQERNDLTEVERELCSATAEFEDFVLQFMDRCFGLIESSTLEQTREETETEKMTHLESLVELGLSSTFSTILTQCSKEIFMVALQKVFNFSTSHIFETRVAGRMVADMCRAAVKCCPEESLKLFVPHCCSVITQLTMNDDVLNDEELDKELLWNLQLLSEITRVDGRKLLLYREQLVKILQRTLHLTCKQGYTLSCNLLHHLLRSTTLIYPTEYCSVPGGFDKPPSEYFPIKDWGKPGDLWNLGIQWHVPSSEEVSFAFYLLDSFLQPELVKLQHCGDGKLEMSRDDILQSLTIVHNCLIGSGNLLPPLKGEPVTNLVPSMVSLEETKLYTGLEYDLSRENHREVIATVIRKLLNHILDNSEDDTKSLFLIIKIIGDLLQFQGSHKHEFDSRWKSFNLVKKSMENRLHGKKQHIRALLIDRVMLQHELRTLTVEGCEYKKIHQDMIRDLLRLSTSSYSQVRNKAQQTFFAALGAYNFCCRDIIPLVLEFLRPDRQGVTQQQFKGALYCLLGNHSGVCLANLHDWDCIVQTWPAIVSSGLSQAMSLEKPSIVRLFDDLAEKIHRQYETIGLDFTIPKSCVEIAELLQQSKNPSINQILLSPEKIKEGIKRQQEKNADALRNYENLVDTLLDGVEQRNLPWKFEHIGIGLLSLLLRDDRVLPLRAIRFFVENLNHDAIVVRKMAISAVAGILKQLKRTHKKLTINPCEISGCPKPTQIIAGDRPDNHWLHYDSKTIPRTKKEWESSCFVEKTHWGYYTWPKNMVVYAGVEEQPKLGRSREDMTEAEQIIFDHFSDPKFVEQLITFLSLEDRKGKDKFNPRRFCLFKGIFRNFDDAFLPVLKPHLEHLVADSHESTQRCVAEIIAGLIRGSKHWTFEKVEKLWELLCPLLRTALSNITVETYNDWGACIATSCESRDPRKLHWLFELLLESPLSGEGGSFVDACRLYVLQGGLAQQEWRVPELLHRLLKYLEPKLTQVYKNVRERIGSVLTYIFMIDVSLPNTTPTISPHVPEFTARILEKLKPLMDVDEEIQNHVMEENGIGEEDERTQGIKLLKTILKWLMASAGRSFSTAVTEQLQLLPLFFKIAPVENDNSYDELKRDAKLCLSLMSQGLLYPHQVPLVLQVLKQTARSSSWHARYTVLTYLQTMVFYNLFIFLNNEDAVKDIRWLVISLLEDEQLEVREMAATTLSGLLQCNFLTMDSPMQIHFEQLCKTKLPKKRKRDPGSVGDTIPSAELVKRHAGVLGLGACVLSSPYDVPTWMPQLLMNLSAHLNDPQPIEMTVKKTLSNFRRTHHDNWQEHKQQFTDDQLLVLTDLLVSPCYYA

SEQ ID NO: 12531 - protein, 1058 aa, Homo sapiens
MPEFLLRSMKKEPLSSTAKKMFLIVAPLSVLYNWKDELDTWGYFRVTVLHGNRKDNELIRVKQRKCEIALTTYETLRLCLDELNSLEWSAVIVDEAHRIKNPKARVTEVMKALKCNVRIGLTGTILQNNMKELWCVMDWAVPGLLGSGTYFKKQFSDPVEHGQRHTATKRELATGRKAMQRLAKKMSGWFLRRTKTLIKDQLPKKEDRMVYCSLTDFQKAVYQTVLETEDVTLILQSSEPCTCRSGQKRRNCCYKTNSHGETVKTLYLSYLTVLQKVANHVALLQAASTSKQQETLIKRICDQVFSRFPDFVQKSKDAAFETLSDPKYSGKMKVLQQLLNHCRKNRDKVLLFSFSTKLLDVLQQYCMASGLDYRRLDGSTKSEERLKIVKEFNSTQDVNICLVSTMAGGLGLNFVGANVVVLFDPTWNPANDLQAIDRAYRIGQCRDVKVLRLISLGTVEEIMYLRQIYKQQLHCVVVGSENAKRYFEAVQGSKEHQGELFGIHNLFKFRSQGSCLTKDILEREGQVEAGIMTATTWLKEGPPAHKLEMPRQPDCQECRGTEQAAEPLAKEACDLCSDFSDEEPVGATGIKTAKNKAPDSSKASSSPGQLTLLQCGFSKLLETKCKAVEDSDGNTASDDESSDEQPTCLSTEAKDAGCEKNQDSLGTSKHQKLDNILNPKEKHIFYKSEKILEQNISSKSDEKKIKNTDKHCILQNVTESEDSDVICPTQYTTERFPDNSIRFKPPLEGSEDSETEHTVKTRNNDNSRNTDDKRNGIISKKLSPENTTLKSILKRKGTSDISDESDDIEISSKSRVRKRASSLRFKRIKETKKELHNSPKTMNKTNQVYAANEDHNSQFIDDYSSSDESLSVSHFSFSKQSHRPRTIRDRTSFSSKLPSHNKKNSTFIPRKPMKCSNEKVVNQEQSYESMDKFLDGVQEVAYIHSNQNVIGSSKAENHMSRWAAHDVFELKQFSQLPANIAVCSSKTYKEKVDADTLPHTKKGQQPSEGSISLPLYISNPVNQKKKKVYHTNQTTFIIGETPKGIRRYIVSDNTILEE

SEQ ID NO: 12532 - protein, 475 aa, Homo sapiens
MAQGSGDQRAVGVADPEESSPNMIVYCKIEDIITKMQDDKTGGVPIRTVKSFLSKIPSVVTGTDIVQWLMKNLSIEDPVEAIHLGSLIAAQGYIFPISDHVLTMKDDGTFYRFQAPYFWPSNCWEPENTDYAIYLCKRTMQNKARLELADYEAENLARLQRAFARKWEFIFMQAEAQVKIDRKKDKTERKILDSQERAFWDVHRPVPGCVNTTEMDIRKCRRLKNPQKVKKSVYGVTEESQAQSPVHVLSQPIRKTTKEDIRKQITFLNAQIDRHCLKMSKVAESLIAYTEQYVEYDPLITPAEPSNPWISDDVALWDIEMSKEPSQQRVKRWGFSFDEILKDQVGRDQFLRFLESEFSSENLRFWLAVQDLKKQPLQDVAKRVEEIWQEFLAPGAPSAINLDSHSYEITSQNVKDGGRYTFEDAQEHIYKLMKSDSYARFLRSNAYQDLLLAKKKPESEQGRRTSLEKFTRSVG

SEQ ID NO: 12533 - protein, 1192 aa, Homo sapiens
MPRRAGSGQLPLPRGWEEARDYDGKVFYIDHNTRRTSWIDPRDRLTKPLSFADCVGDELPWGWEAGFDPQIGVYYIDHINKTTQIEDPRKQWRGEQEKMLKDYLSVAQDALRTQKELYHVKEQRLALALDEYVRLNDAYKEKSSSHTSLFSGSSSSTKYDPDILKAEISTTRLRVKKLKRELSQMKQELLYKEQGFETLQQIDKKMSGGQSGYELSEAKAILTELKSIRKAISSGEKEKQDLMQSLAKLQERFHLDQNIGRSEPDLRCSPVNSHLCLSRQTLDAGSQTSISGDIGVRSRSNLAEKVRLSLQYEEAKRSMANLKIELSKLDSEAWPGALDIEKEKLMLINEKEELLKELQFVTPQKRTQDELERLEAERQRLEEELLSVRGTPSRALAERLRLEERRKELLQKLEETTKLTTYLHSQLKSLSASTLSMSSGSSLGSLASSRGSLNTSSRGSLNSLSSTELYYSSQSDQIDVDYQYKLDFLLQEKSGYIPSGPITTIHENEVVKSPSQPGQSGLCGVAAAATGHTPPLAEAPKSVASLSSRSSLSSLSPPGSPLVLEGTFPMSSSHDASLHQFTADFEDCELSSHFADISLIENQILLDSDSGGASQSLSEDKDLNECAREPLYEGTADVEKSLPKRRVIHLLGEKTTCVSAAVSDESVAGDSGVYEAFVKQPSEMEDVTYSEEDVAIVETAQVQIGLRYNAKSSSFMVIIAQLRNLHAFLIPHTSKVYFRVAVLPSSTDVSCLFRTKVHPPTESILFNDVFRVAISQTALQQKTLRVDLCSVSKHRREECLAGTQISLADLPFSSEVFTLWYNLLPSKQMPCKKNEENEDSVFQPNQPLVDSIDLDAVSALLARTSAELLAVEQELAQEEEEESGQEEPRGPDGDWLTMLREASDEIVAEKEAEVKLPEDSSCTEDLSSCTSVPEMNEDGNRKESNCAKDLRSQPPTRIPTLVDKETNTDEAANDNMAVRPKERSSLSSRQHPFVRSSVIVRSQTFSPGERNQYICRLNRSDSDSSTLAKKSLFVRNSTERRSLRVKRTVCQSVLRRTTQECPVRTSLDLELDLQASLTRQSRLNDELQALRDLRQKLEELKAQGETDLPPGVLEDERFQRLLKQAEKQAEQSKEEQKQGLNAEKLMRQVSKDVCRLREQSQKVPRQVQSFREKIAYFTRAKISIPSLPADDV

SEQ ID NO: 12534 - protein, 883 aa, Homo sapiens
MASPGAGRAPPELPERNCGYREVEYWDQRYQGAADSAPYDWFGDFSSFRALLEPELRPEDRILVLGCGNSALSYELFLGGFPNVTSVDYSSVVVAAMQARHAHVPQLRWETMDVRKLDFPSASFDVVLEKGTLDALLAGERDPWTVSSEGVHTVDQVLSEVGFQKGTRQLLGSRTQLELVLAGASLLLAALLLGCLVALGVQYHRDPSHSTCLTEACIRVAGKILESLDRGVSPCEDFYQFSCGGWIRRNPLPDGRSRWNTFNSLWDQNQAILKHLLENTTFNSSSEAEQKTQRFYLSCLQVERIEELGAQPLRDLIEKIGGWNITGPWDQDNFMEVLKAVAGTYRATPFFTVYISADSKSSNSNVIQVDQSGLFLPSRDYYLNRTANEKVLTAYLDYMEELGMLLGGRPTSTREQMQQVLELEIQLANITVPQDQRRDEEKIYHKMSISELQALAPSMDWLEFLSFLLSPLELSDSEPVVVYGMDYLQQVSELINRTEPSILNNYLIWNLVQKTTSSLDRRFESAQEKLLETLYGTKKSCVPRWQTCISNTDDALGFALGSLFVKATFDRQSKEIAEGMISEIRTAFEEALGQLVWMDEKTRQAAKEKADAIYDMIGFPDFILEPKELDDVYDGYEISEDSFFQNMLNLYNFSAKVMADQLRKPPSRDQWSMTPQTVNAYYLPTKNEIVFPAGILQAPFYARNHPKALNFGGIGVVMGHELTHAFDDQGREYDKEGNLRPWWQNESLAAFRNHTACMEEQYNQYQVNGERLNGRQTLGENIADNGGLKAAYNAYKAWLRKHGEEQQLPAVGLTNHQLFFVGFAQVWCSVRTPESSHEGLVTDPHSPARFRVLGTLSNSRDFLRHFGCPVGSPMNPGQLCEVW

SEQ ID NO: 12535 - protein, 1799 aa, Homo sapiens
MAGASVKVAVRVRPFNSREMSRDSKCIIQMSGSTTTIVNPKQPKETPKSFSFDYSYWSHTSPEDINYASQKQVYRDIGEEMLQHAFEGYNVCIFAYGQTGAGKSYTMMGKQEKDQQGIIPQLCEDLFSRINDTTNDNMSYSVEVSYMEIYCERVRDLLNPKNKGNLRVREHPLLGPYVEDLSKLAVTSYNDIQDLMDSGNKARTVAATNMNETSSRSHAVFNIIFTQKRHDAETNITTEKVSKISLVDLAGSERADSTGAKGTRLKEGANINKSLTTLGKVISALAEMDSGPNKNKKKKKTDFIPYRDSVLTWLLRENLGGNSRTAMVAALSPADINYDETLSTLRYADRAKQIRCNAVINEDPNNKLIRELKDEVTRLRDLLYAQGLGDITDTNTVPGGPKLTNALVGMSPSSSLSALSSRAASVSSLHERILFAPGSEEAIERLKETEKIIAELNETWEEKLRRTEAIRMEREALLAEMGVAMREDGGTLGVFSPKKTPHLVNLNEDPLMSECLLYYIKDGITRVGREDGERRQDIVLSGHFIKEEHCVFRSDSRGGSEAVVTLEPCEGADTYVNGKKVTEPSILRSGNRIIMGKSHVFRFNHPEQARQERERTPCAETPAEPVDWAFAQRELLEKQGIDMKQEMEQRLQELEDQYRREREEATYLLEQQRLDYESKLEALQKQMDSRYYPEVNEEEEEPEDEVQWTERECELALWAFRKWKWYQFTSLRDLLWGNAIFLKEANAISVELKKKVQFQFVLLTDTLYSPLPPDLLPPEAAKDRETRPFPRTIVAVEVQDQKNGATHYWTLEKLRQRLDLMREMYDRAAEVPSSVIEDCDNVVTGGDPFYDRFPWFRLVGSSAISGCNSYPLLNTCMSERMAALTPSPTFSSPDSDATEPAEEQSVGEEEEEEEEEEDEEEEDLEDDVFPEHALCDGRDPFYDRPPLFSLVGRAFVYLSNLLYPVPLVHRVAIVSEKGEVKGFLRVAVQAISADEEAPDYGSGVRQSGTAKISFDDQHFEKFQSESCPVVGMSRSGTSQEELRIVEGQGQGADVGPSADEVNNNTCSAVPPEGLLLDSSEKAALDGPLDAALDHLRLGNTFTFRVTVLQASSISAEYADIFCQFNFIHRHDEAFSTEPLKNTGRGPPLGFYHVQNIAVEVTKSFIEYIKSQPIVFEVFGHYQQHPFPPLCKDVLSPLRPSRRHFPRVMPLSKPVPATKLSTLTRPCPGPCHCKYDLLVYFEICELEANGDYIPAVVDHRGGMPCMGTFLLHQGIQRRITVTLLHETGSHIRWKEVRELVVGRIRNTPETDESLIDPNILSLNILSSGYIHPAQDDRVSLGNDTRTFYQFEAAWDSSMHNSLLLNRVTPYREKIYMTLSAYIEMENCTQPAVVTKDFCMVFYSRDAKLPASRSIRNLFGSGSLRASESNRVTGVYELSLCHVADAGSPGMQRRRRRVLDTSVAYVRGEENLAGWRPRSDSLILDHQWELEKLSLLQEVEKTRHYLLLREKLETAQRPVPEALSPAFSEDSESHGSSSASSPLSAEGRPSPLEAPNERQRELAVKCLRLLTHTFNREYTHSHVCVSASESKLSEMSVTLLRDPSMSPLGVATLTPSSTCPSLVEGRYGATDLRTPQPCSRPASPEPELLPEADSKKLPSPARATETDKEPQRLLVPDIQEIRVSPIVSKKGYLHFLEPHTSGWARRFVVVRRPYAYMYNSDKDTVERFVLNLATAQVEYSEDQQAMLKTPNTFAVCTEHRGILLQAASDKDMHDWLYAFNPLLAGTIRSKLSRRRSAQMRV

SEQ ID NO: 12536 - protein, 172 aa, Homo sapiens
MCTSGQIIGSLLVLSVLEIGLGVSSVAVGAVSFSLALREHKPQLGDSSPFLLCGICGILCAKKKSGLVMILFSACCICGLIGGILNFQFLRAVTKKTSSLYPLHLASMSLACIGIGGCTLSSWLTCRLASYEQRRMFSEREHSLHHSHEMAEKEITDNMSNGGPQLIFNGRV

SEQ ID NO: 12537 - protein, 689 aa, Homo sapiens
MNAVEENQGPGESQKVEEASPPAVQQPTDPASPTVATTPEPVGSDAGDKNATKAGDDEPEYEDGRGFGIGELVWGKLRGFSWWPGRIVSWWMTGRSRAAEGTRWVMWFGDGKFSVVCVEKLMPLSSFCSAFHQATYNKQPMYRKAIYEVLQVASSRAGKLFPVCHDSDESDTAKAVEVQNKPMIEWALGGFQPSGPKGLEPPEEEKNPYKEVYTDMWVEPEAAAYAPPPPAKKPRKSTAEKPKVKEIIDERTRERLVYEVRQKCRNIEDICISCGSLNVTLEHPLFVGGMCQNCKNCFLECAYQYDDDGYQSYCTICCGGREVLMCGNNNCCRCFCVECVDLLVGPGAAQAAIKEDPWNCYMCGHKGTYGLLRRREDWPSRLQMFFANNHDQEFDPPKVYPPVPAEKRKPIRVLSLFDGIATGLLVLKDLGIQVDRYIASEVCEDSITVGMVRHQGKIMYVGDVRSVTQKHIQEWGPFDLVIGGSPCNDLSIVNPARKGLYEGTGRLFFEFYRLLHDARPKEGDDRPFFWLFENVVAMGVSDKRDISRFLESNPVMIDAKEVSAAHRARYFWGNLPGMNRPLASTVNDKLELQECLEHGRIAKFSKVRTITTRSNSIKQGKDQHFPVFMNEKEDILWCTEMERVFGFPVHYTDVSNMSRLARQRLLGRSWSVPVIRHLFAPLKEYFACV

SEQ ID NO: 12538 - protein, 599 aa, Homo sapiens
MTIEDLPDFPLEGNPLFGRYPFIFSASDTPVIFSISAAPMPSDCEFSFFDPNDASCQEILFDPKTSVSELFAILRQWVPQVQQNIDIIGNEILKRGCNVNDRDGLTDMTLLHYTCKSGAHGIGDVETAVKFATQLIDLGADISLRSRWTNMNALHYAAYFDVPELIRVILKTSKPKDVDATCSDFNFGTALHIAAYNLCAGAVKCLLEQGANPAFRNDKGQIPADVVPDPVDMPLEMADAAATAKEIKQMLLDAVPLSCNISKAMLPNYDHVTGKAMLTSLGLKLGDRVVIAGQKVGTLRFCGTTEFASGQWAGIELDEPEGKNNGSVGKVQYFKCAPKYGIFAPLSKISKAKGRRKNITHTPSTKAAVPLIRSQKIDVAHVTSKVNTGLMTSKKDSASESTLSLPPGEELKTVTEKDVALLGSVSSCSSTSSLEHRQSYPKKQNAISSNKKTMSKSPSLSSRASAGLNSSATSTANNSRCEGELRLGERVLVVGQRLGTIRFFGTTNFAPGYWYGIELEKPHGKNDGSVGGVQYFSCSPRYGIFAPPSRVQRVTDSLDTLSEISSNKQNHSYPGFRRSFSTTSASSQKEINRRNAFSK

SEQ ID NO: 12539 - protein, 465 aa, Homo sapiens [sequence omitted]

SEQ ID NO: 12540 - protein, 362 aa, Homo sapiens
MTGHTRSSLPRCTGIVLLIKLRFSERLTGHLHAQGTPPYVINLDPAVHEVPFPANIDIRDTVKYKEVMKQYGLGPNGGIVTSLNLFATRFDQVMKFIEKAQNMSKYVLIDTPGQIEVFTWSASGTIITEALASSFPTVVIYVMDTSRSTNPVTFMSNMLYACSILYKTKLPFIVVMNKTDIIDHSFAVEWMQDFEAFQDALNQETTYVSNLTRSMSLVLDEFYSSLRVVGVSAVLGTGLDELFVQVTSAAEEYEREYRPEYERLKKSLANAESQQQREQLERLRKDMGSVALDAGTAKDSLSPVLHPSDLILTRGTLDEEDEEADSDTDDIDHRVTEESHEEPAFQNFMQESMAQYWKRNNK

SEQ ID NO: 12541 - protein, 393 aa, Homo sapiens
MDAATLTYDTLRFAEFEDFPETSEPVWILGRKYSIFTEKDEILSDVASRLWFTYRKNFPAIGGTGPTSDTGWGCMLRCGQMIFAQALVCRHLGRDWRWTQRKRQPDSYFSVLNAFIDRKDSYYSIHQIAQMGVGEGKSIGQWYGPNTVAQVLKKLAVFDTWSSLAVHIAMDNTVVMEEIRRLCRTSVPCAGATAFPADSDRHCNGFPAGAEVTNRPSPWRPLVLLIPLRLGLTDINEAYVETLKHCFMMPQSLGVIGGKPNSAHYFIGYVGEELIYLDPHTTQPAVEPTDGCFIPDESFHCQHPPCRMSIAELDPSIAVGFFCKTEDDFNDWCQQVKKLSLLGGALPMFELVELQPSHLACPDVLNLSLDSSDVERLERFFDSEDEDFEILSL

SEQ ID NO: 12542 - protein, 759 aa, Homo sapiens
MESRSSPRLECSGAISAHCSLHLPDSSDFQLIFVFLVEMGFHHVGQAGLELLISSDLPTSASQSAGITDMKLSMKNNIINTQQSFVTMPNVIVPDIEKEIRRMENGACSSFSEDDDSASTSEESENENPHARGSFSYKSLRKGGPSQREQYLPGAIALFNVNNSSNKDQEPEEKKKKKKEKKSKSDDKNENKNDPEKKKKKKDKEKKKKEEKSKDKKEEEKKEVVVIDPSGNTYYNWLFCITLPVMYNWTMVIARACFDELQSDYLEYWLILDYVSDIVYLIDMFVRTRTGYLEQGLLVKEELKLINKYKSNLQFKLDVLSLIPTDLLYFKLGWNYPEIRLNRLLRFSRMFEFFQRTETRTNYPNIFRISNLVMYIVIIIHWNACVFYSISKAIGFGNDTWVYPDINDPEFGRLARKYVYSLYWSTLTLTTIGETPPPVRDSEYVFVVVDFLIGVLIFATIVGNIGSMISNMNAARAEFQARIDAIKQYMHFRNVSKDMEKRVIKWFDYLWTNKKTVDEKEVLKYLPDKLRAEIAINVHLDTLKKVRIFADCEAGLLVELVLKLQPQVYSPGDYICKKGDIGREMYIIKEGKLAVVADDGVTQFVVLSDGSYFGEISILNIKGSKAGNRRTANIKSIGYSDLFCLSKDDLMEALTEYPDAKTMLEEKGKQILMKDGLLDLNIANAGSDPKDLEEKVTRMEGSVDLLQTRFARILAEYESMQQKLKQRLTKVEKFLKPLIDTEFSSIEGPGAESGPIDST

SEQ ID NO: 12543 - protein, 240 aa, Homo sapiens
MKLVLIGHSIGSYFTLQMLKRVPELPVIRAFLLFPTIERMSESPNGRIATPLLCWFRYVLYVTGYLLLKPCPETIKSLLIRRGLQVMNLENEFSPLNILEPFCLANAAYLGGQEMMEVVKRDDETIKEHLCKLTFYYGTIDPWCPKEYYEDIKKDFPEGDIRLCEKNIPHAFITHFNQEMADMIADSLKDDLSKIGNPSWHYHSLRTMRCPSAQILKPPDERFGSDLLPTYWWKNQISRD

SEQ ID NO: 12544 - protein, 342 aa, Homo sapiens; identical to SEQ ID NO: 7195

SEQ ID NO: 12545 - protein, 551 aa, Homo sapiens
MDELFPLIFPAEPAQASGPYVEIIEQPKQRGMRFRYKCEGRSAGSIPGERSTDTTKTHPTIKINGYTGPGTVRISLVTKDPPHRPHPHELVGKDCRDGFYEAELCPDRCIHSFQNLGIQCVKKRDLEQAISQRIQTNNNPFQVPIEEQRGDYDLNAVRLCFQVTVRDPSGRPLRLPPVLSHPIFDNRAPNTAELKICRVNRNSGSCLGGDEIFLLCDKVQKEDIEVYFTGPGWEARGSFSQADVHRQVAIVFRTPPYADPSLQAPVRVSMQLRRPSDRELSEPMEFQYLPDTDDRHRIEEKRKRTYETFKSIMKKSPFSGPTDPRPPPRRIAVPSRSSASVPKPAPQPYPFTSSLSTINYDEFPTMVFPSGQISQASALAPAPPQVLPQAPAPAPAPAMVSALAQAPAPVPVLAPGPPQAVAPPAPKPTQAGEGTLSEALLQLQFDDEDLGALLGNSTDPAVFTDLASVDNSEFQQLLNQGIPVAPHTTEPMLMEYPEAITRLVTGAQRPPDPAPAPLGAPGLPNGLLSGDEDFSSIADMDFSALLSQISS

SEQ ID NO: 12546 - protein, 1587 aa, Homo sapiens
MVQKKKFCPRLLDYLVIVGARHPSSDSVAQTPELLRRYPLEDHTEFPLPPDVVFFCQPEGCLSVRQRRMSLRDDTSFVFTLTDKDTGVTRYGICVNFYRSFQKRISKEKGEGGAGSRGKEGTHATCASEEGGTESSESGSSLQPLSADSTPDVNQSPRGKRRAKAGSRSRNSTLTSLCVLSHYPFFSTFRECLYTLKRLVDCCSERLLGKKLGIPRGVQRDTMWRIFTGSLLVEEKSSALLHDLREIEAWIYRLLRSPVPVSGQKRVDIEVLPQELQPALTFALPDPSRFTLVDFPLHLPLELLGVDACLQVLTCILLEHKVVLQSRDYNALSMSVMAFVAMIYPLEYMFPVIPLLPTCMASAEQLLLAPTPYIIGVPASFFLYKLDFKMPDDVWLVDLDSNRVIAPTNAEVLPILPEPESLELKKHLKQALASMSLNTQPILNLEKFHEGQEIPLLLGRPSNDLQSTPSTEFNPLIYGNDVDSVDVATRVAMVRFFNSANVLQGFQMHTRTLRLFPRPVVAFQAGSFLASRPRQTPFAEKLARTQAVEYFGEWILNPTNYAFQRIHNNMFDPALIGDKPKWYAHQLQPIHYRVYDSNSQLAEALSVPPERDSDSEPTDDSGSDSMDYDDSSSSYSSLGDFVSEMMKCDINGDTPNVDPLTHAALGDASEVEIDELQNQKEAEEPGPDSENSQENPPLRSSSSTTASSSPSTVIHGANSEPADSTEMDDKAAVGVSKPLPSVPPSIGKSNVDRRQAEIGEGSVRRRIYDNPYFEPQYGFPPEEDEDEQGESYTPRFSQHVSGNRAQKLLRPNSLRLASDSDAESDSRASSPNSTVSNTSTEGFGGIMSFASSLYRNHSTSFSLSNLTLPTKGAREKATPFPSLKGNRRALVDQKSSVIKHSPTVKREPPSPQGRSSNSSENQQFLKEVVHSVLDGQGVGWLNMKKVRRLLESEQLRVFVLSKLNRMVQSEDDARQDIIPDVEISRKVYKGMLDLLKCTVLSLEQSYAHAGLGGMASIFGLLEIAQTHYYSKEPDKRKRSPTESVNTPVGKDPGLAGRGDPKAMAQLRVPQLGPRAPSATGKGPKELDTRSLKEENFIASIGPEVIKPVFDLGETEEKKSQISADSGVSLTSSSQRTDQDSVIGVSPAVMIRSSSQDSEVSTVSNSSGETLGADSDLSSNAGDGPGGEGSVHLASSRGTLSDSEIETNSATSTIFGKAHSLKPSIKEKLAGSPIRTSEDVSQRVYLYEGLLGKERSTLWDQMQFWEDAFLDAVMLEREGMGMDQGPQEMIDRYLSLGEHDRKRLEDDEDRLLATLLHNLISYMLLMKVNKNDIRKKVRRLMGKSHIGLVYSQQINEVLDQLANLNGRDLSIWSSGSRHMKKQTFVVHAGTDTNGDIFFMEVCDDCVVLRSNIGTVYERWWYEKLINMTYCPKTKVLCLWRRNGSETQLNKFYTKKCRELYYCVKDSMERAAARQQSIKPGPELGGEFPVQDLKTGEGGLLQVTLEGINLKFMHNQVFIELNHIKKCNTVRGVFVLEEFVPEIKEVVSHKYKTPMAHEICYSVLCLFSYVAAVHSSEEDLRTPPRPVSS

SEQ ID NO: 12547 - protein, 1066 aa, Homo sapiens
MEPGKRRTKDDTWKADDLRKHLWAIQSGGSKEERKHREKKLRKESEMDLPEHKEPRCRDPDQDARSRDRVAEVHTAKESPRGERDRDRQRERRRDAKDREKEKLKEKHREAEKSHSRGKDREKEKDRRARKEELRQTVAHHNLLGQETRDRQLLERAERKGRSVSKVRSEEKDEDSERGDEDRERRYRERKLQYGDSKDNPLKYWLYKEEGERRHRKPREPDRDNKHREKSSTREKREKYSKEKSNSFSDKGEERHKEKRHKEGFHFDDERHQSNVDRKEKSAKDEPRKRESQNGEHRNRGASSKRDGTSSQHAENLVRNHGKDKDSRRKHGHEEGSSVWWKLDQRPGGEETVEIEKEETDLENARADAYTASCEDDFEDYEDDFEVCDGDDDESSNEPESREKLEELPLAQKKEIQEIQRAINAENERIGELSLKLFQKRGRTEFEKEPRTDTNSSPSRASVCGIFVDFASASHRQKSRTQALKQKMRSTKLLRLIDLDFSFTFSLLDLPPVNEYDMYIRNFGKKNTKQAYVQCNEDNVERDIQTEEIETREVWTQHPGESTVVSGGSEQRDTSDAVVMPKIDTPRLCSFLRAACQVMAVLLEEDRLAAEPSWNLRAQDRALYFSDSSSQLNTSLPFLQNRKVSSLHTSRVQRQMVVSVHDLPEKSFVPLLDSKYVLCVWDIWQPSGPQKVLICESQVTCCCLSPLKAFLLFAGTAHGSVVVWDLREDSRLHYSVTLSDGFWTFRTATFSTDGILTSVNHRSPLQAVEPISTSVHKKQSFVLSPFSTQEEMSGLSFHIASLDESGVLNVWVVVELPKADIAGSISDLGLMPGGRVKLVHSALIQLGDSLSHKGNEFWGTTQTLNVKFLPSDPNHFIIGTDMGLISHGTRQDLRVAPKLFKPQQHGIRPVKVNVIDFSPFGEPIFLAGCSDGSIRLHQLSSAFPLLQWDSSTDSHAVTGLQWSPTRPAVFLVQDDTSNIYIWDLLQSDLGPVAKQQVSPNRLVAMAAVGEPEKAGGSFLALVLARASGSIDIQHLKRRWAAPEVDECNRLRLLLQEALWPEGKLHK

SEQ ID NO: 12548 - protein, 677 aa, Homo sapiens
MAAGGGGSCDPLAPAGVPCAFSPHSQAYFALASTDGHLRVWETANNRLHQEYVPSAHLSGTCTCLAWAPARLQAKESPQRKKRKSEAVGMSNQTDLLALGTAVGSILLYSTVKGELHSKLISGGHDNRVNCIQWHQDSGCLYSCSDDKHIVEWNVQTCKVKCKWKGDNSSVSSLCISPDGKMLLSAGRTIKLWVLETKEVYRHFTGHATPVSSLMFTTIRPPNESQPFDGITGLYFLSGAVHDRLLNVWQVRSENKEKSAVMSFTVTDEPVYIDLTLSENKEEPVKLAVVCRDGQVHLFEHILNGYCKKPLTSNCTIQIATPGKGKKSTPKPIPILAAGFCSDKMSLLLVYGSWFQPTIERVALNSREPHMCLVRDISNCWAPKVETAITKVRTPVMNSEAKVLVPGIPGHHAAIKPAPPQTEQVESKRKSGGNEVSIEERLGAMDIDTHKKGKEDLQTNSFPVLLTQGLESNDFEMLNKVLQTRNVNLIKKTVLRMPLHTIIPLLQELTKRLQGHPNSAVLMVQWLKCVLTVHASYLSTLPDLVPQLGTLYQLMESRVKTFQKLSHLHGKLILLITQVTASEKTKGATSPGQKAKLVYEEESSEEESDDEIADKDSEDNWDEDEEESESEKDEDVEEEDEDAEGKDEENGEDRDTASEKELNGDSDLDPENESEEE

SEQ ID NO: 12549 - protein, 70 aa, Homo sapiens
MAEQATKSVLFVCLGNICRSPIAEAVFRKLVTDQNISENWRVDSAATSGGSLTAVLFLTGTWAGPQTQEL

SEQ ID NO: 12550 - protein, 1477 aa, Homo sapiens
MGTALLQRGGCFLLCLSLLLLGCWAELGSGLEFPGAEGQWTRFPKWNACCESEMSFQLKTRSARGLVLYFDDEGFCDFLELILTRGGRLQLSFSIFCAEPATLLADTPVNDGAWHSVRIRRQFRNTTLFIDQVEAKWVEVKSKRRDMTVFSGLFVGGLPPELRAAALKLTLASVREREPFKGWIRDVRVNSSQVLPVDSGEVKLDDEPPNSGGGSPCEAGEEGEGGVCLNGGVCSVVDDQAVCDCSRTGFRGKDCSQEDNNVEGLAHLMMGDQGKSKGKEEYIATFKGSEYFCYDLSQNPIQSSSDEITLSFKTLQRNGLMLHTGKSADYVNLALKNGAVSLVINLGSGAFEALVEPVNGKFNDNAWHDVKVTRNLRQHSGIGHAMVTISVDGILTTTGYTQEDYTMLGSDDFFYVGGSPSTADLPGSPVSNNFMGCLKEVVYKNNDVRLELSRLAKQGDPKMKIHGVVAFKCENVATLDPITFETPESFISLPKWNAKKTGSISFDFRTTEPNGLILFSHGKPRHQKDAKHPQMIKVDFFAIEMLDGHLYLLLDMGSGTIKIKALLKKVNDGEWYHVDFQRDGRSGTISVNTLRTPYTAPGESEILDLDDELYLGGLPENKAGLVFPTEVWTALLNYGYVGCIRDLFIDGQSKDIRQMAEVQSTAGVKPSCSKETAKPCLSNPCKNNGMCRDGWNRYVCDCSGTGYLGRSCEREATVLSYDGSMFMKIQLPVVMHTEAEDVSLRFRSQRAYGILMATTSRDSADTLRLELDAGRVKLTVNLDCIRINCNSSKGPETLFAGYNLNDNEWHTVRVVRRGKSLKLTVDDQQAMTGQMAGDHTRLEFHNIETGIITERRYLSSVPSNFIGHLQSLTFNGMAYIDLCKNGDIDYCELNARFGFRNIIADPVTFKTKSSYVALATLQAYTSMHLFFQFKTTSLDGLILYNSGDGNDFIVVELVKGYLHYVFDLGNGANLIKGSSNKPLNDNQWHNVMISRDTSNLHTVKIDTKITTQITAGARNLDLKSDLYIGGVAKETYKSLPKLVHAKEGFQGCLASVDLNGRLPDLISDALFCNGQIERGCEGPSTTCQEDSCSNQGVCLQQWDGFSCDCSMTSFSGPLCNDPGTTYIFSKGGGQITYKWPPNDRPSTRADRLAIGFSTVQKEAVLVRVDSSSGLGDYLELHIHQGKIGVKFNVGTDDIAIEESNAIINDGKYHVVRFTRSGGNATLQVDSWPVIERYPAGRQLTIFNSQATIIIGGKEQGQPFQGQLSGLYYNGLKVLNMAAENDANIAIVGNVRLVGEVPSSMTTESTATAMQSEMSTSIMETTTTLATSTARRGKPPTKEPISQTTDDILVASAECPSDDEDIDPCEPSSGGLANPTRAGGREPYPGSAEVIRESSSTTGMVVGIVAAAALCILILLYAMYKYRNRDEGSYHVDESRNYISNSAQSNGAVVKEKQPSSAKSSNKNKKNKDKEYYV

SEQ ID NO: 12551 - protein, 2434 aa, Homo sapiens
MDESSILRRRGLQKELSLPRRGSLIDSQKWNCLVKRCRTSNRKSLIGNGQSPALPRPHSPLSAHAGNSPQDSPRNFSPSASAHFSFARRTDGRRWSLASLPSSGYGTNTPSSTVSSSCSSQEKLHQLPYQPTPDELHFLSKHFCTTESIATENRCRNTPMRPRSRSLSPGRSPACCDHEIIMMNHVYKERFPKATAQMEERLKEIITSYSPDNVLPLADGVLSFTHHQIIELARDCLDKSHQGLITSRYFLELQHKLDKLLQEAHDRSESGELAFIKQLVRKILIVIARPARLLECLEFDPEEFYYLLEAAEGHAKEGQGIKTDIPRYIISQLGLNKDPLEEMAHLGNYDSGTAETPETDESVSSSNASLKLRRKPRESDFETIKLISNGAYGAVYFVRHKESRQRFAMKKINKQNLILRNQIQQAFVERDILTFAENPFVVSMYCSFETRRHLCMVMEYVEGGDCATLMKNMGPLPVDMARMYFAETVLALEYLHNYGIVHRDLKPDNLLVTSMGHIKLTDFGLSKVGLMSMTTNLYEGHIEKDAREFLDKQVCGTPEYIAPEVILRQGYGKPVDWWAMGIILYEFLVGCVPFFGDTPEELFGQVISDEINWPEKDEAPPPDAQDLITLLLRQNPLERLGTGGAYEVKQHRFFRSLDWNSLLRQKAEFIPQLESEDDTSYFDTRSEKYHHMETEEEDDTNDEDFNVEIRQFSSCSHRFSKVFSSIDRITQNSAEEKEDSVDKTKSTTLPSTETLSWSSEYSEMQQLSTSNSSDTESNRHKLSSGLLPKLAISTEGEQDEAASCPGDPHEEPGKPALPPEECAQEEPEVTTPASTISSSTLSVGSFSEHLDQINGRSECVDSTDNSSKPSSEPASHMARQRLESTEKKKISGKVTKSLSASALSLMIPGDMFAVSPLGSPMSPHSLSSDPSSSRDSSPSRDSSAASASPHQPIVIHSSGKNYGFTIRAIRVYVGDSDIYTVHHIVWNVEEGSPACQAGLKAGDLITHINGEPVHGLVHTEVIELLLKSGNKVSITTTPFENTSIKTGPARRNSYKSRMVRRSKKSKKKESLERRRSLFKKLAKQPSPLLHTSRSFSCLNRSLSSGESLPGSPTHSLSPRSPTPSYRSTPDFPSGTNSSQSSSPSSSAPNSPAGSGHIRPSTLHGLAPKLGGQRYRSGRRKSAGNIPLSPLARTPSPTPQPTSPQRSPSPLLGHSLGNSKIAQAFPSKMHSPPTIVRHIVRPKSAEPPRSPLLKRVQSEEKLSPSYGSDKKHLCSRKHSLEVTQEEVQREQSQREAPLQSLDENVCDVPPLSRARPVEQGCLKRPVSRKVGRQESVDDLDRDKLKAKVVVKKADGFPEKQESHQKSHGPGSDLENFALFKLEEREKKVYPKAVERSSTFENKASMQEAPPLGSLLKDALHKQASVRASEGAMSDGRVPAEHRQGGGDFRRAPAPGTLQDGLCHSLDRGISGKGEGTEKSSQAKELLRCEKLDSKLANIDYLRKKMSLEDKEDNLCPVLKPKMTAGSHECLPGNPVRPTGGQQEPPPASESRAFVSSTHAAQMSAVSFVPLKALTGRVDSGTEKPGLVAPESPVRKSPSEYKLEGRSVSCLKPIEGTLDIALLSGPQASKTELPSPESAQSPSPSGDVRASVPPVLPSSSGKKNDTTSARELSPSSLKMNKSYLLEPWFLPPSRGLQNSPAVSLPDPEFKRDRKGPHPTARSPGTVMESNPQQREGSSPKHQDHTTDPKLLTCLGQNLHSPDLARPRCPLPPEASPSREKPGLRESSERGPPTARSERSAARADTCREPSMELCFPETAKTSDNSKNLLSVGRTHPDFYTQTQAMEKAWAPGGKTNHKDGPGEARPPPRDNSSLHSAGIPCEKELGKVRRGVEPKPEALLARRSLQPPGIESEKSEKLSSFPSLQKDGAKEPERKEQPLQRHPSSIPPPPLTAKDLSSPAARQHCSSPSHASGREPGAKPSTAEPSSSPQDPPKPVAAHSESSSHKPRPGPDPGPPKTKHPDRSLSSQKPSVGATKGKEPATQSLGGSSREGKGHSKSGPDVFPATPGSQNKASDGIGQGEGGPSVPLHTDRAPLDAKPQPTSGGRPLEVLEKPVHLPRPGHPGPSEPADQKLSAVGEKQTLSPKHPKPSTVKDCPTLCKQTDNRQTDKSPSQPAANTDRRAEGKKCTEALYAPAEGDKLEAGLSFVHSENRLKGAERPAAGVGKGFPEARGKGPGPQKPPTEADKPNGMKRSPSATGQSSFRSTALPEKSLSCSSSFPETRAGVREASAASSDTSSAKAAGGMLELPAPSNRDHRKAQPAGEGRTHMTKSDSLPSFRVSTLPLESHHPDPNTMGGASHRDRALSVTATVGETKGKDPAPAQPPPARKQNVGRDVTKPSPAPNTDRPISLSNEKDFVVRQRRGKESLRSSPHKKAL

SEQ ID NO: 12552 - protein, 1937 aa, Homo sapiens
MSASSDAEMAVFGEAAPYLRKSEKERIEAQNKPFDAKTSVFVAEPKESYVKSTIQSKEGGKVTVKTEGGATLTVREDQVFPMNPPKYDKIEDMAMMTHLHEPGVLYNLKERYAAWMIYTYSGLFCVTVNPYKWLPVYKPEVVAAYRGKKRQEAPPHIFSISDNAYQFMLTDRENQSILITGESGAGKTVNTKRVIQYFATIAVTGEKKKDESGKMQGTLEDQIISANPLLEAFGNAKTVRNDNSSRFGKFIRIHFGTTGKLASADIETYLLEKSRVTFQLKAERSYHIFYQITSNKKPDLIEMLLITTNPYDYAFVSQGEITVPSIDDQEELMATDSAIDILGFTPEEKVSIYKLTGAVMHYGNMKFKQKQREEQAEPDGTEVADKAAYLQSLNSADLLKALCYPRVKVGNEYVTKGQTVQQVYNAVGALAKAVYEKMFLWMVTRINQQLDTKQPRQYFIGVLDIAGFEIFDFNSLEQLCINFTNEKLQQFFNHHMFVLEQEEYKKEGIEWTFIDFGMDLAACIELIEKPLGIFSILEEECMFPKATDTSFKNKLYDQHLGKSANFQKPKVVKGKAEAHFSLIHYAGTVDYNITGWLDKNKDPLNDTVVGLYQKSAMKTLASLFSTYASAEADSSAKKGAKKKGSSFQTVSALFRENLNKLMTNLRSTHPHFVRCIIPNETKTPGAMEHELVLHQLRCNGVLEGIRICRKGFPSRILYGDFKQRYKVLNASAIPEGQFIDSKKASEKLLASIDIDHTQYKFGHTKVFFKAGLLGLLEEMRDEKLAQIITRTQAVCRGFLMRVEYQKMLQRREALFCIQYNVRAFMNVKHWPWMKLFFKIKPLLKSAETEKEMATMKEEFQKTKDELAKSEAKRKELEEKMVTLLKEKNDLQLQVQSEADSLADAEERCEQLIKNKIQLEAKIKEVTERAEEEEEINAELTAKKRKLEDECSELKKDIDDLELTLAKVEKEKHATENKVKNLTEEMAGLDETIAKLSKEKKALQETHQQTLDDLQAEEDKVNILTKAKTKLEQQVDDLEGSLEQEKKLRMDLERAKRKLEGDLKLAQESTMDMENDKQQLDEKLEKKEFEISNLISKIEDEQAVEIQLQKKIKELQARIEELGEEIEAERASRAKAEKQRSDLSRELEEISERLEEAGGATSAQVELNKKREAEFQKLRRDLEEATLQHEAMVAALRKKHADSMAELGEQIDNLQRVKQKLEKEKSELKMETDDLSSNAEAISKAKGNLEKMCRSLEDQVSELKTKEEEQQRLINDLTAQRARLQTEAGEYSRQLDEKDALVSQLSRSKQASTQQIEELKHQLEEETKAKNALAHALQSSRHDCDLLREQYEEEQEGKAELQRALSKANSEVAQWRTKYETDAIQRTEELEEAKKKLAQRLQEAEEHVEAVNAKCASLEKTKQRLQNEVEDLMLDVERSNAACAALDKKQRNFDKVLSEWKQKYEETQAELEASQKESRSLSTELFKVKNVYEESLDQLETLRRENKNLQQEISDLTEQIAEGGKQIHELEKIKKQVEQEKCEIQAALEEAEASLEHEEGKILRIQLELNQVKSEVDRKIAEKDEEIDQLKRNHTRVVETMQSTLDAEIRSRNDALRVKKKMEGDLNEMEIQLNHANRLAAESLRNYRNTQGILKETQLHLDDALRGQEDLKEQLAIVERRANLLQAEIEELWATLEQTERSRKIAEQELLDASERVQLLHTQNTSLINTKKKLENDVSQLQSEVEEVIQESRNAEEKAKKAITDAAMMAEELKKEQDTSAHLERMKKNLEQTVKDLQHRLDEAEQLALKGGKKQIQKLEARVRELEGEVENEQKRNAEAVKGLRKHERRVKELTYQTEEDRKNVLRLQDLVDKLQAKVKSYKRQAEEAEEQSNANLSKFRKLQHELEEAEERADIAESQVNKLRVKSREVHTKISAE

SEQ ID NO: 12553 - protein, 899 aa, Homo sapiens
MPAELRQEQSPGSQASLATMPEAPDVLEETVTVEEDPGTPTSHVSIVTSEDGTTRRTETKVTKTVKTVTTRTVRQVPVGPDGLPLLDGGPPLGPFADGALDRHFLLRGGGPVATLSRAYLSSGGGFPEGPEPRDSPSYGSLSRGLGMRPPRAGPLGPGPGDGCFTLPGHREAFPVGPEPGPPGGRSLPERFQAEPYGLEDDTRSLAADDEGGPELEPDYGTATRRRPECGRGLHTRAYEDTADDGGELADERPAFPMVTAPLAQPERGSMGSLDRLVRRSPSVDSARKEPRWRDPELPEVLAMLRHPVDPVKANAAAYLQHLCFENEGVKRRVRQLRGLPLLVALLDHPRAEVRRRACGALRNLSYGRDTDNKAAIRDCGGVPALVRLLRAARDNEVRELVTGTLWNLSSYEPLKMVIIDHGLQTLTHEVIVPHSGWEREPNEDSKPRDAEWTTVFKNTSGCLRNVSSDGAEARRRLRECEGLVDALLHALQSAVGRKDTDNKSVENCVCIMRNLSYHVHKEVPGADRYQEAEPGPLGSAVGSQRRRRDDASCFGGKKAKEEWFHQGKKDGEMDRNFDTLDLPKRTEAAKGFELLYQPEVVRLYLSLLTESRNFNTLEAAAGALQNLSAGNWMWATYIRATVRKERGLPVLVELLQSETDKVVRAVAIALRNLSLDRRNKDLIGSYAMAELVRNVRNAQAPPRPGACLEEDTVVAVLNTIHEIVSDSLDNARSLLQARGVPALVALVASSQSVREAKAASHVLQTVWSYKELRGTLQKDGWTKARFQSAAATAKGPKGALSPGGFDDSTLPLVDKSLEGEKTGSRDVIPMDALGPDGYSTVDRRERRPRGASSAGEASEKEPLKLDPSRKAPPPGPSRPAVRLVDAVGDAKPQPVDSWV

SEQ ID NO: 12554 - protein, 355 aa, Homo sapiens
MEDLEETLFEEFENYSYDLDYYSLESDLEEKVQLGVVHWVSLVLYCLAFVLGIPGNAIVIWFTGFKWKKTVTTLWFLNLAIADFIFLLFLPLYISYVAMNFHWPFGIWLCKANSFTAQLNMFASVFFLTVISLDHYIHLIHPVLSHRHRTLKNSLIVIIFIWLLASLIGGPALYFRDTVEFNNHTLCYNNFQKHDPDLTLIRHHVLTWVKFIIGYLFPLLTMSICYLCLIFKVKKRSILISSRHFWTILVVVVAFVVCWTPYHLFSIWELTIHHNSYSHHVMQAGIPLSTGLAFLNSCLNPILYVLISKKFQARFRSSVAEILKYTLWEVSCSGTVSEQLRNSETKNLCLLETAQ

SEQ ID NO: 12555 - protein, 327 aa, Homo sapiens
MSDLQEEGKNAINSPMSPALVDVHPEDTQLEENEERTMIDPTSKEDPKFKELVKVLLDWINDVLVEERIIVKQLEEDLYDGQVLQKLLEKLAGCKLNVAEVTQSEIGQKQKLQTVLEAVHDLLRPRGWALRWSVDSIHGKNLVAILHLLVSLAMHFRAPIRLPEHVTVQVVVVRKREGLLHSSHISEELTTTTEMMMGRFERDAFDTLFDHAPDKLSVVKKSLITFVNKHLNKLNLEVTELETQFADGVYLVLLMGLLEDYFVPLHHFYLTPESFDQKVHNVSFAFELMLDGGLKKPKARPEDVVNLDLKSTLRVLYNLFTKYKNVE

SEQ ID NO: 12556 - protein, 536 aa, Homo sapiens
MRRKQTGTRERGRYREEEMTVVEEADDDKKRLLQIIDRDGEEEEEEEEPLDESSVKKMILTFEKRSYKNQELRIKFPDNPEKFMESELDLNDIIQEMHVVATMPDLYHLLVELNAVQSLLGLLGHDNTDVSIAVVDLLQELTDIDTLHESEEGAEVLIDALVDGQVVALLVQNLERLDESVKEEADGVHNTLAIVENMAEFRPEMCTEGAQQGLLQWLLKRLKAKMPFDANKLYCSEVLAILLQDNDENRELLGELDGIDVLLQQLSVFKRHNPSTAEEQEMMENLFDSLCSCLMLSSNRERFLKGEGLQLMNLMLREKKISRSSALKVLDHAMIGPEGTDNCHKFVDILGLRTIFPLFMKSPRKIKKVGTTEKEHEEHVCSILASLLRNLRGQQRTRLLNKFTENDSEKVDRLMELHFKYLGAMQVADKKIEGEKHDMVRRGEIIDNDTEEEFYLRRLDAGLFVLQHICYIMAEICNANVPQIRQRVHQILNMRGSSIKIVRHIIKEYAENIGDGRSPEFRENEQKRILGLLENF

SEQ ID NO: 12557 - protein, 548 aa, Homo sapiens
MATDDKTSPTLDSANDLPRSPTSPSHLTHFKPLTPDQDEPPFKSAYSSFVNLFRFNKERAEGGQGEQQPLSGSWTSPQLPSRTQSVRSPTPYKKQLNEELQRRSSALDTRRKAEPTFGGHDPRTAVQLRSLSTVLKRLKEIMEGKSQDSDLKQYWMPDSQCKECYDCSEKFTTFRRRHHCRLCGQIFCSRCCNQEIPGKFMGYTGDLRACTYCRKIALSYAHSTDSNSIGEDLNALSDSACSVSVLDPSEPRTPVGSRKASRNIFLEDDLAWQSLIHPDSSNTPLSTRLVSVQEDAGKSPARNRSASITNLSLDRSGSPMVPSYETSVSPQANRTYVRTETTEDERKILLDSVQLKDLWKKICHHSSGMEFQDHRYWLRTHPNCIVGKELVNWLIRNGHIATRAQAIAIGQAMVDGRWLDCVSHHDQLFRDEYALYRPLQSTEFSETPSPDSDSVNSVEGHSEPSWFKDIKFDDSDTEQIAEEGDDNLANSASPSKRTSVSSFQSTVDSDSAASISLNVELDNVNFHIKKPSKYPHVPPHPADQKGRR

SEQ ID NO: 12558 - protein, 693 aa, Homo sapiens
MIPPQEASARRREIEDKLKQEEETLSFIRDSLEKSDQLTKNMVSILSSFESRLMKLENSIIPVHKQTENLQRLQENVEKTLSCLDHVISYYHVASDTEKIIREGPTGRLEEYLGSMAKIQKAVEYFQDNSPDSPELNKVKLLFERGKEALESEFRSLMTRHSKVVSPVLILDLISGDDDLEAQEDVTLEHLPESVLQDVIRISRWLVEYGRNQDFMNVYYQIRSSQLDRSIKGLKEHFHKSSSSSGVPYSPAIPNKRKDTPTKKPVKRPGTIRKAQNLLKQYSQHGLDGKKGGSNLIPLEGHEHDFRVKHLSEALNDKHGPLAGRDDMLDVETDAYIHCVSAFVKLAQSEYQLLADIIPEHHQKKTFDSLIQDALDGLMLEGENIVSAARKAIVRHDFSTVLTVFPILRHLKQTKPEFDQVLQGTAASTKNKLPGLITSMETIGAKALEDFADNIKNDPDKEYNMPKDGTVHELTSNAILFLQQLLDFQETAGAMLASQETSSSATSYSSEFSKRLLSTYICKVLGNLQLNLLSKSKVYEDPALSAIFLHNNYNYILKSLEKSELIQLVAVTQKTAERSYREHIEQQIQTYQRSWLKVTDYIAEKNLPVFQPGVKGFNDGLEELCKIQKAWAIPDTEQRDRIRQAQKTIVKETYGAFLQKFGSVPFTKNPEKYIKYGVEQVGDMIDRLFDTSA

SEQ ID NO: 12559 - protein, 407 aa, Homo sapiens
MLRYPYFCRMYKECLSCWLESGIPNLGVWPNRIHTTAEKYREYEAREQTDQTQAQELHRSQDRDFETMAKLHIPVMVDEVVHCLSPQKGQIFLDMTFGSGGHTKAILQKESDIVLYALDRDPTAYALAEHLSELYPKQIRAMLGQFSQAEALLMKAGVQPGTFDGVLMDLGCSSMQLDTPERGFSLRKDGPLDMRMDGGRYPDMPTAADVVNALDQQALASILRTYGEEKHAKKIASAIVQARSIYPITRTQQLASIVAGAFPPSAIYTRKDLLQRSTHIATKTFQALRIFVNNELNELYTGLKTAQKFLRPGGRLVALSFHSLEDRIVKRFLLGISMTERFNLSVRQQVMKTSQLGSDHENTEEVSMRRAPLMWELIHKKVLSPQDQDVQDNPRGRSAKLRAAIKL

SEQ ID NO: 12560 - protein, 1340 aa, Homo sapiens
MDTKLMCLLFFFSLPPLLVSNHTGRIKVVFTPSICKVTCTKGSCQNSCEKGNTTTLISENGHAADTLTATNFRVVICHLPCMNGGQCSSRDKCQCPPNFTGKLCQIPVHGASVPKLYQHSQQPGKALGTHVIHSTHTLPLTVTSQQGVKVKFPPNIVNIHVKHPPEASVQIHQVSRIDGPTGQKTKEAQPGQSQVSYQGLPVQKTQTIHSTYSHQQVIPHVYPVAAKTQLGRCFQETIGSQCGKALPGLSKQEDCCGTVGTSWGFNKCQKCPKKPSYHGYNQMMECLPGYKRVNNTFCQDINECQLQGVCPNGECLNTMGSYRCTCKIGFGPDPTFSSCVPDPPVISEEKGPCYRLVSSGRQCMHPLSVHLTKQLCCCSVGKAWGPHCEKCPLPGTAKEEPVEALTFSREHGPGVAEPEVATAPPEKEIPSLDQEKTKLEPGQPQLSPGISTIHLHPQFPVVIEKTSPPVPVEVAPEASTSSASQVIAPTQVTEINECTVNPDICGAGHCINLPVRYTCICYEGYRFSEQQRKCVDIDECTQVQHLCSQGRCENTEGSFLCICPAGFMASEEGTNCIDVDECLRPDVCGEGHCVNTVGAFRCEYCDSGYRMTQRGRCEDIDECLNPSTCPDEQCVNSPGSYQCVPCTEGFRGWNGQCLDVDECLEPNVCANGDCSNLEGSYMCSCHKGYTRTPDHKHCRDIDECQQGNLCVNGQCKNTEGSFRCTCGQGYQLSAAKDQCEDIDECQHRHLCAHGQCRNTEGSFQCVCDQGYRASGLGDHCEDINECLEDKSVCQRGDCINTAGSYDCTCPDGFQLDDNKTCQDINECEHPGLCGPQGECLNTEGSFHCVCQQGFSISADGRTCEDIDECVNNTVCDSHGFCDNTAGSFRCLCYQGFQAPQDGQGCVDVNECELLSGVCGEAFCENVEGSFLCVCADENQEYSPMTGQCRSRTSTDVDVDQPKEEKKECYYNLNDASLCDNVLAPNVTKQECCCTSGVGWGDNCEIFPCPVLGTAEFTEMCPKGKGFVPAGESSSEAGGENYKDADECLLFGQEICKNGFCLNTRPGYECYCKQGTYYDPVKLQCFDMDECQDPSSCIDGQCVNTEGSYNCFCTHPMVLDASEKRCIRPAESNEQIEETDVYQDLCWEHLSDEYVCSRPLVGKQTTYTECCCLYGEAWGMQCALCPLKDSDDYAQLCNIPVTGRRQPYGRDALVDFSEQYTPEADPYFIQDRFLNSFEELQAEECGILNGCENGRCVRVQEGYTCDCFDGYHLDTAKMTCVDVNECDELNNRMSLCKNAKCINTDGSYKCLCLPGYVPSDKPNYCTPLNTALNLEKDSDLE

SEQ ID NO: 12561 - protein, 235 aa, Homo sapiens
MAAVAVAVREDSGSGMKAELPPGPGAVGREMTKEEKLQLRKEKKQQKKKRKEEKGAEPETGSAVSAAQCQVGPTRELPESGIQLGTPREKVPAGRSKAELRAERRAKQEAERALKQARKGEQGGPPPKASPSTAGETPSGVKRLPEYPQVDDLLLRRLVKKPERQQVPTRKDYGSKVSLFSHLPQYSRQNSLTQFMSHGATRPAVLPGPGQWLQCPVYCPASCLAAGDSGLHNTA

SEQ ID NO: 12562 - protein, 1934 aa, Homo sapiens
MDSTSFLPTFLDVDLTISHIKCLPKDILVKFQGIKSNECEFDYHVLQREIQHTPKVKNNVEIDEFCLVEERVSGEWQRGRVMEKKNELYTVLLIDRGEELRVAGPQIASACGNLFELPPRVVFGIFANILPVGEKWSPKALNYFKSLVGIQVKGYVQAILPLQMFLFEVPKIISQALELQLGRLVDGDSFRLIVEMLEEFPQQMPDLLQHKRPELSLGNKDTSLDIQHVLDKLQPSLSVGSTESVKVSSALSPSKFYCQLIKWTPELENLTAHMTLHYDTVCQETSPTCDNFGLLCVARRRNGQWHRGILQQLLPPNQVKIWFMDYGSSEAIPSIYVKKLKQDFILVPLFSFPCSLTCLHSPDRDARIFQLSIFKQALLGQVVYAHIDWFNKDECLYYVTLQTQESTVNSKCLLKTVGTQVLCPMSDSKISNILSETSVSDVNSFAVESFMGNIEWSIDSLNKKGILKVGFPIKTVQMEIEAAYIAFIAYVLNPSNFWVRTNDHRNEFQEIMKNINKFYDLCENDEMILRKPEPGLFCCARYSKDRRFYRAVITEINGYKINVYFLDYGNTDSIPFFDVKILLPEFCELPALAMCCSLAHIFPVEDLWTKAAIDYFKKLVLNKAILLQVIAKKDDKYTVNIQSVEASENIDVISLMLQAGYAEYFQVELEYFPKSVSEYSMLNSESKNKVNIKKVISALLEGPKSKKYHSNNLVENNLSLPKSLAVNISEFKNPFTLSVGPESSWPYKEYIFRPGTVLEVKCSCYYGPGDFSCQLQCKSEDLKLLMEQIQNYYSIHSDPYEIGQTACVAKYSGKWCRAAVLTQVSKEVDIVFVDYGYQKRVLIEDLCAINPRFLLLESQAFRCCLNHFIEPVSCKLFSWTRKAFRDLWNFISSSRGLLTCIIYALVIIHPNHLYNLVDLQSSFTSAKEFLMNRGSAQYITLSETFPSLFSLYSYCYSSFNIQIGSEEEVYISHIYSPQKFYCQLGRNNKDLEMIETKITESVNLQNFPKYDSNKMRVCISKYVEDGLSYRALAIPTDSSSEFQVYFVDFGNKQLVGENMLRAISAQFPELLFTPMQAIKCFLSDLRDVDIPAEISSWFKDNFLGRSLKAIILSQESDGQLGIELYDGSQYINEKIKVLLHAYGKRHCDQACCMEKSNKINENKRFTTSLKGKTGNNYRHNVINKPSPVTYSERKIDQLMHPKNIHARFLKPSVCYKMEPVSKNKMKTSLNDGLKGIKIVPGAAHILENRRVGQKSVKVVSQSFIRALNQTTSQNPYDLIRPQIKDLPQPQIYLNAKVKGYVSNISNPANFHIQLAENESVIIRLADALNATARRLRERKSVKPLVGDLVVAEYSGDNAIYRAVIKKILPGNSFEVEFIDYGNSAIVNTSKIYELQREFLTVPQLGIHAFLSGVKWNEPDEIWDDKTVDYFTSKVHNKTVYCEFLKKHDQKWEVNMICDEKCVINELLKWKACSKLQKSALQMPQVLSQKVRPGDNEMKKGKSNESEGSMNSNQQLFKIPLEEFKLGQLEKAEMLNVSKSGRFYVKLSKNKKILSDLIVLITKEEKKSPFLSMESIEKGLECLAKSKNTLKWHRSKVEEKYVDDKVLVFLVDCGIYEIVPVCNTKLLSNEIRNIPRQAVPCKWIWFENSKNISFECLFADLEINILFLKYLDAVWEVEILVDDLLLLEYLNLNTVPVEENKLRLAEIVYNIESKTPVSSCTIKSFTWVQFQNDRQYSGIATAVSDPSDFSIQLEDFFDIMKYLFMLLSDLPETLQTLPQEFIIPGSSCLFKYKSEDQWNRVEISEVSPQSLCLVLVDYGFSFYIRYSEIINLKVVPEELLNLPRLSYPCILYGILPAKGKHWSEEAKIFFRDFLSKPDLVFQFREYHSETKLKVDVIHEKNNLADILVASGLATYSKDSPHLDAITATESAKNPI

SEQ ID NO: 12563 - protein, 225 aa, Homo sapiens
MTSEFFAAQLRAQISDDTTHPISYYKPEFYTPDDGGTAHLSVVAEDGSAVSATSTINLYFGSKVRSPVSGILFNNEMDDFSSPSITNEFGVPPSPANFIQPGKQPLSSMCPTIMVGQDGQVRMVVGAAGGTQITTATALAIIYNLWFGYDVKRAVEEPRLHNQLLPNVTTVERNIDQAVTAALETRHHHTQIASTFIAVVQAIVRTAGGWAAASDSRKGGEPAGY

SEQ ID NO: 12564 - protein, 590 aa, Homo sapiens
MHSMISSVDVKSEVPVGLEPISPLDLRTDLRMMMPVVDPVVREKQLQQELLLIQQQQQIQKQLLIAEFQKQHENLTRQHQAQLQEHIKELLAIKQQQELLEKEQKLEQQRQEQEVERHRREQQLPPLRGKDRGRERAVASTEVKQKLQEFLLSKSATKDTPTNGKNHSVSRHPKLWYTAAHHTSLDQSSPPLSGTSPSYKYTLPGAQDAKDDFPLRKTASEPNLKVRSRLKQKVAERRSSPLLRRKDGNVVTSFKKRMFEVTESSVSSSSPGSGPSSPNNGPTGSVTENETSVLPPTPHAEQMVSQQRILIHEDSMNLLSLYTSPSLPNITLGLPAVPSQLNASNSLKEKQKCETQTLRQGVPLPGQYGGSIPASSSHPHVTLEGKPPNSSHQALLQHLLLKEQMRQQKLLVAGGVPLHPQSPLATKERISPGIRGTHKLPRHRPLNRTQSAPLPQSTLAQLVIQQQHQQFLEKQKQYQQQIHMNKLLSKSIEQLKQPGSHLEEAEEELQGDQAMQEDRAPSSGNSTRSDSSACVDDTLGQVGAVKVKEEPVDSDEDAQIQEMESGEQAAFMQQVIGKDLAPGFVIKVII

SEQ ID NO: 12565 - protein, 389 aa, Homo sapiens
ARSLDKLYNFADCSGLHLIFALNALRRNPNNSWNSSSALSLLKYSASKKYNISWELGNEPNNYRTMHGRAVNGSQLGKDYIQLKSLLQPIRIYSRASLYGPNIGRPRKNVIALLDGFMKVAGSTVDAVTWQHCYIDGRVVKVMDFLKTRLLDTLSDQIRKIQKVVNTYTPGKKIWLEGVVTTSAGGTNNLSDSYAAGFLWLNTLGMLANQGIDVVIRHSFFDHGYNHLVDQNFNPLPDYWLSLLYKRLIGPKVLAVHVAGLQRKPRPGRVIRDKLRIYAHCTNHHNHNYVRGSITLFIINLHRSRKKIKLAGTLRDKLVHQYLLQPYGQEGLKSKSVQLNGQPLVMVDDGTLPELKPRPLRAGRTLVIPPVTMGFYVVKNVNALACRYR

SEQ ID NO: 12566 - protein, 353 aa, Homo sapiens
MASLYQRFTGKINTSRSFPAPPEASHLLGGQGPEEDGGAGAKPLGPRAQAAAPRERGGGGGGAGGRPRFQYQARSDGDEEDELVGSNPPQRNWKGIAIALLVILVICSLIVTSVILLTPAEDNSLSQKKKVTVEDLFSEDFKIHDPEAKWISDTEFIYREQKGTVRLWNVETNTSTVLIEGKKIESLRAIRYEISPDREYALFSYNVEPMKKVKSRKLTLPHSKSCDSLAVSQACSPACHQGCFLHYITMSLPLHCLRDYVSAVNGYSTALPACHVQGGPVSDIPWRPWLEDCRRVPGGRTANGTRLRSHAPAALRQHCPLSYECGRCEASHLLTPGIMHSSYRQISGQRATE

SEQ ID NO: 12567 - protein, 959 aa, Homo sapiens
MGGGSGEEQLYADFPELDLSQLDASDFDSATCFGELQWCPENSETEPNQYSPDDSELFQIDSENEALLAELTKTLDDIPEDDVGLAAFPALDGGDALSCTSASPAPSSAPPSPAPEKPSAPAPEVDELSLADSTQDKKAPMMQSQSRSCTELHKHLTSAQCCLQDRGLQPPCLQSPRLPAKEDKEPGEDCPSPQPAPASPRDSLALGRADPGAPVSQEDMQAMVQLIRYMHTYCLPQRKLPPQTPEPLPKACSNPSQQVRSRPWSRHHSKASWAEFSILRELLAQDVLCDVSKPYRLATPVYASLTPRSRPRPPKDSQASPGRPSSVEEVRIAASPKSTGPRPSLRPLRLEVKREVRRPARLQQQEEEDEEEEEEEEEEEKEEEEEWGRKRPGRGLPWTKLGRKLESSVCPVRRSRRLNPELGPWLTFADEPLVPSEPQGALPSLCLAPKAYDVERELGSPTDEDSGQDQQLLRGPQIPALESPCESGCGDMDEDPSCPQLPPRDSPRCLMLALSQSDPTFGKKSFEQTLTVELCGTAGLTPPTTPPYKPTEEDPFKPDIKHSLGKEIALSLPSPEGLSLKATPGAAHKLPKKHPERSELLSHLRHATAQPASQAGQKRPFSCSFGDHDYCQVLRPEGVLQRKVLRSWEPSGVHLEDWPQQGAPWAEAQAPGREEDRSCDAGAPPKDSTLLRDHEIRASLTKHFGLLETALEEEDLASCKSPEYDTVFEDSSSSSGESSFLPEEEEEEGEEEEEDDEEEDSGVSPTCSDHCPYQSPPSKANRQLCSRSRSSSGSSPCHSWSPATRRNFRCESRGPCSDRTPSIRHARKRREKAIGEGRVVYIQNLSSDMSSRELKRRFEVFGEIEECEVLTRNRRGEKYGFITYRCSEHAALSLTKGAALRKRNEPSFQLSYGGLRHFCWPRYTDYDSNSEEALPASGKSKYEAMDFDSLLKEAQQSLH

SEQ ID NO: 12568 - protein, 623 aa, Homo sapiens
MLENYSNLVSVGYHIIKPDVISKLEQGEEPWIVEGEFLLQSYPDEVWQTDDLIERIQEEENKPSRQTVFIETLIEEREYISSDGSYARMKADECSGCGKSLLHIKLEKTHPGDQAYEFNQNGEPYTLNEESLYQKIRILEKPFEYIECQKAFQKDTVFVNHMEEKPYKWNGSEIAFLQMSDLTVHQTSHMEMKPYECSECGKSFCKKSKFIIHQRTHTGEKPYECNQCGKSFCQKGTLTVHQRTHTGEKPYECNECGKNFYQKLHLIQHQRTHSGEKPYECSYCGKSFCQKTHLTQHQRTHSGERPYVCHDCGKTFSQKSALNDHQKIHTGVKLYKCSECGKCFCRKSTLTTHLRTHTGEKPYECNECGKFFSRLSYLTVHYRTHSGEKPYECNECGKTFYLNSALMRHQRVHTGEKPYECNECGKLFSQLSYLTIHHRTHSGVKPYECSECGKTFYQNSALCRHRRIHKGEKPYECYICGKFFSQMSYLTIHHRIHSGEKPYECSECGKTFCQNSALNRHQRTHTGEKAYECYECGKCFSQMSYLTIHHRIHSGEKPFECNECGKAFSRMSYLTVHYRTHSGEKPYECTECGKKFYHKSAFNSHQRIHRRGNMNVIDVGRLL

SEQ ID NO: 12569 - protein, 501 aa, Homo sapiens
MRSSLAPGVWFFRAFSRDSWFRGLILLLTFLIYACYHMSRKPISIVKSRLHQNCSEQIKPINDTHSLNDTMWCSWAPFDKDNYKELLGGVDNAFLIAYAIGMFISGVFGERLPLRYYLSAGMLLSGLFTSLFGLGYFWNIHELWYFVVIQVCNGLVQTTGWPSVVTCVGNWFGKGKRGFIMGIWNSHTSVGNILGSLIAGIWVNGQWGLSFIVPGIITAVMGVITFLFLIEHPEDVDCAPPQHHGEPAENQDNPEDPGNSPCSIRESGLETVAKCSKGPCEEPAAISFFGALRIPGVVEFSLCLLFAKLVSYTFLYWLPLYIANVAHFSAKEAGDLSTLFDVGGIIGGIVAGLVSDYTNGRATTCCVMLILAAPMMFLYNYIGQDGIASSIVMLIICGGLVNGPYALITTAVSADLGTHKSLKGNAKALSTVTAIIDGTGSIGAALGPLLAGLISPTGWNNVFYMLISADVLACLLLCRLVYKEILAWKVSLSRGSGYKEI

SEQ ID NO: 12570 - protein, 976 aa, Homo sapiens
MNAGPGCEPCTKRPRWGAATTSPAASDARSFPSRQRRVLDPKDAHVQFRVPPSSPACVPGRAGQHRGSATSLVFKQKTITSWMDTKGIKTAESESLDSKENNNTRIESMMSSVQKDNFYQHNVEKLENVSQLSLDKSPTEKSTQYLNQHQTAAMCKWQNEGKHTEQLLESEPQTVTLVPEQFSNANIDRSPQNDDHSDTDSEENRDNQQFLTTVKLANAKQTTEDEQAREAKSHQKCSKSCDPGEDCASCQQDEIDVVPESPLSDVGSEDVGTGPKNDNKLTRQESCLGNSPPFEKESEPESPMDVDNSKNSCQDSEADEETSPGFDEQEDGSSSQTANKPSRFQARDADIEFRKRYSTKGGEVRLHFQFEGGESRTGMNDLNAKLPGNISSLNVECRNSKQHGKKDSKITDHFMRLPKAEDRRKEQWETKHQRTERKIPKYVPPHLSPDKKWLGTPIEEMRRMPRCGIRLPLLRPSANHTVTIRVDLLRAGEVPKPFPTHYKDLWDNKHVKMPCSEQNLYPVEDENGERTAGSRWELIQTALLNKFTRPQNLKDAILKYNVAYSKKWDFTALIDFWDKVLEEAEAQHLYQSILPDMVKIALCLPNICTQPIPLLKQKMNHSITMSQEQIASLLANAFFCTFPRRNAKMKSEYSSYPDINFNRLFEGRSSRKPEKLKTLFCYFRRVTEKKPTGLVTFTRQSLEDFPEWERCEKPLTRLHVTYEGTIEENGQGMLQVDFANRFVGGGVTSAGLVQEEIRFLINPELIISRLFTEVLDHNECLIITGTEQYSEYTGYAETYRWSRSHEDGSERDDWQRRCTEIVAIDALHFRRYLDQFVPEKMRRELNKAYCGFLRPGVSSENLSAVATGNWGCGAFGGDARLKALIQILAAAAAERDVVYFTFGDSELMRDIYSMHIFLTERKLTVGDVYKLLLRYYNEECRNCSTPGPDIKLYPFIYHAVESCAETADHSGQRTGT

SEQ ID NO: 12571 - protein, 1044 aa, Homo sapiens
MMAQKSQGSDNLQEGQEKSKREILKCTKSAWAPLDEWLPPDPEEESQSLTIPMLEDSKQESIQQWLDSGFFVSANENFQQVIDRTVSLYEQGMVQMTVKDYMRSLHQFSETPILSRGTSFNSCYSTASVPQSIPEWLEFWEIDPVEILLDLGFGADEPDICMQIPARFLGCGSAARGINIRVFLEAQKQRMDIENPNLYGRFRQLEILDHVTNAFSSLLSDVSILPNRAEEKAGGESVQRTSVSAAKEHRRRMGKLLRRASKQNIRRDCNPEVSESFKVKDEVFVPFTKPWDCGAELAATSINHKQNHLSLSVEHQSLQACDDLLPYPPHGLLSKQWPCSSMPAKQAPPSCVSEGSVKGRTQKENLFQTNKLKSLSHLAGKGPDSFEMEEVQSFEEETGNPLDMTSGTVGARVDRANSCQSDSSGFLEEPLEPLPLQMPSLPNSQSPAENGGRKPRDQSHSLVSSQDCQLESDGPDSKSRASMSFSSQEANALEQRASVSVMEEEFLLEAMEGPPELYIPDMACAKTTTRGECPRKDSHLWQLLPMPHAEYEVTRPTATSKYDHPLGFMVTHVTEMQDSFVRPEGAGKVQSHHNESQRSPGNDHTQDKFLHVDSEAPREEESSGFCPHTNHSLLVPESSSQCIPKHSEITPYATDLAQTSEKLIPHLHKLPGDPAQVKSRSGTLGQILPGTEAEMENLPLNTGSSRSVMTQMSSSLVSAAQRAVALGTGPRGTSLECTVCDPVTATETRLGTKARQLNDASIQTSALSNKTLTHGPQPLTKSVSLDSGFSSICPMGTCHAIPAHCCICCHHHPHCHGERQSPGPEPSVCRHCLCSLTGHQEAQFMTTLKALQDTTVRELCSCTVHEMEAMKTICQSFREYLEEIEQHLMGQQALFSRDMSEEEREEAEQLQTLREALRQQVAELEFQLGDRAQQIREGILLQLEVLTAEPPEHYSNLHQYNWIEESNGQTSCSKIHPGMAPRTVFPPDDGQEAPCSGGTQLAAFTPPTLENSTRMSPSSSAWAKLGPTPLSNCPVGEKDADVFL

SEQ ID NO: 12572 - protein, 653 aa, Homo sapiens
MRAGRGATPARELFRDAAFPAADSSLFCDLSTPLAQFREDITWRRPQEICATPRLFPDDPREGQVKQGLLGDCWFLCACAALQKSRHLLDQVIPPGQPSWADQEYRGSFTCRIWQFGRWVEVTTDDRLPCLAGRLCFSRCQREDVFWLPLLEKVYAKVHGSYEHLWAGQVADALVDLTGGLAERWNLKGVAGSGGQQDRPGRWEHRTCRQLLHLKDQCLISCCVLSPRAGARELGEFHAFIVSDLRELQGQAGQCILLLRIQNPWGRRCWQGLWREGGEGWSQVDAAVASELLSQLQEGEFWVEEEEFLREFDELTVGYPVTEAGHLQSLYTERLLCHTRALPGAWVKGQSAGGCRNNSGFPSNPKFWLRVSEPSEVYIAVLQRSRLHAADWAGRARALVGDSHTSWSPASIPGKHYQAVGLHLWKVEKRRVNLPRVLSMPPVAGTACHAYDREVHLRCELSPGYYLAVPSTFLKDAPGEFLLRVFSTGRVSLSAIRAVAKNTTPGAALPAGEWGTVQLRGSWRVGQTAGGSRNFASYPTNPCFPFSVPEGPGPRCVRITLHQHCRPSDTEFHPIGFHIFQVPEGGRSQDAPPLLLQEPLLSCVPHRYAQEVSRLCLLPAGTYKVVPSTYLPDTEGAFTVTIATRIDRSPSWQ

SEQ ID NO: 12573 - protein, 900 aa, Homo sapiens
MKPPRPVRTCSKVLVLLSLLAIHQTTTAEKNGIDIYSLTVDSRVSSRFAHTVVTSRVVNRANTVQEATFQMELPKKAFITNFSMIIDGMTYPGIIKEKAEAQAQYSAAVAKGKSAGLVKATGRNMEQFQVSVSVAPNAKITFELVYEELLKRRLGVYELLLKVRPQQLVKHLQMDIHIFEPQGISFLETESTFMTNQLVDALTTWQNKTKAHIRFKPTLSQQQKSPEQQETVLDGNLIIRYDVDRAISGGSIQIENGYFVHYFAPEGLTTMPKNVVFVIDKSGSMSGRKIQQTREALIKILDDLSPRDQFNLIVFSTEATQWRPSLVPASAENVNKARSFAAGIQALGGTNINDAMLMAVQLLDSSNQEERLPEGSVSLIILLTDGDPTVGETNPRSIQNNVREAVSGRYSLFCLGFGFDVSYAFLEKLALDNGGLARRIHEDSDSALQLQDFYQEVANPLLTAVTFEYPSNAVEEVTQNNFRLLFKGSEMVVAGKLQDRGPDVLTATVSGKLPTQNITFQTESSVAEQEAEFQSPKYIFHNFMERLWAYLTIQQLLEQTVSASDADQQALRNQALNLSLAYSFVTPLTSMVVTKPDDQEQSQVAEKPMEGESRNRNVHSAGAAGSRMNFRPGVLSSRQLGLPGPPDVPDHAAYHPFRRLAILPASAPPATSNPDPAVSRVMNMKIEETTMTTQTPAPIQAPSAILPLPGQSVERLCVDPRHRQGPVNLLSDPEQGVEVTGQYEREKAGFSWIEVTFKNPLVWVHASPEHVVVTRNRRSSAYKWKETLFSVMPGLKMTMDKTGLLLLSDPDKVTIGLLFWDGRGEGLRLLLRDTDRFSSHVGGTLGQFYQEVLWGSPAASDDGRRTLRVQGNDHSATRERRLDYQEGPPGVEISCWSVEL

SEQ ID NO: 12574 - protein, 1368 aa, Homo sapiens
MASWLYECLCEAELAQYYSHFTALGLQKIDELAKITMKDYSKLGVHDMNDRKRLFQLIKIIKIMQEEDKAVSIPERHLQTSSLRIKSQELRSGPRRQLNFDSPADNKDRNASNDGFEMCSLSDFSANEQKSTYLKVLEHMLPDDSQYHTKTGILNATAGDSYVQTEISTSLFSPNYLSAILGDCDIPIIQRISHVSGYNYGIPHSCIRQNTSEKQNPWTEMEKIRVCVRKRPLGMREVRRGEINIITVEDKETLLVHEKKEAVDLTQYILQHVFYFDEVFGEACTNQDVYMKTTHPLIQHIFNGGNATCFAYGQTGAGKTYTMIGTHENPGLYALAAKDIFRQLEVSQPRKHLFVWISFYEIYCGQLYDLLNRRKRLFAREDSKHMVQIVGLQELQVDSVELLLEVILKGSKERSTGATGVNADSSRSHAVIQIQIKDSAKRTFGRISFIDLAGSERAADARDSDRQTKMEGAEINQSLLALKECIRALDQEHTHTPFRQSKLTQVLKDSFIGNAKTCMIANISPSHVATEHTLNTLRYADRVKELKKGIKCCTSVTSRNRTSGNSSPKRIQSSPGALSEDKCSPKKVKLGFQQSLTVAAPGSTRGKVHPLTSHPPNIPFTSAPKVSGKRGGSRGSPSQEWVIHASPVKGTVRSGHVAKKKPEESAPLCSEKNRMGNKTVLGWESRASGPGEGLVRGKLSTKCKKVQTVQPVQKQLVSRVELSFGNAHHRAEYSQDSQRGTPARPASEAWTNIPPHQKEREEHLRFYHQQFQQPPLLQQKLKYQPLKRSLRQYRPPEGQLTNETPPLFHSYSENHDGAQVEELDDSDFSEDSFSHISSQRATKQRNTLENSEDSFFLHQTWGQGPEKQVAERQQSLFSSPRTGDKKDLTKSWVDSRDPINHRRAALDHSCSPSKGPVDWSRENSTSSGPSPRDSLAEKPYCSQVDFIYRQERGGGSSFDLRKDASQSEVSGENEGNLPSPEEDGFTISLSHVAVPGSPDQRDTVTTPLREVSADGPIQVTSTVKNGHAVPGEDPRGQLGTHAEYASGLMSPLTMSLLENPDNEGSPPSEQLVQDGATHSLVAESTGGPVVSHTVPSGDQEAALPVSSATRHLWLSSSPPDNKPGGDLPALSPSPIRQHPADKLPSREADLGEACQSRETVLFSHEHMGSEQYDADAEETGLDGSWGFPGKPFTTIHMGVPHSGPTLTPRTGSSDVADQLWAQERKHPTRLGWQEFGLSTDPIKLPCNSENVTWLKPRPISRCLARPSSPLVPSCSPKTAGTLRQPTLEQAQQVVIRAHQEQLDEMAELGFKEETLMSQLASNDFEDFVTQLDEIMVLKSKCIQSLRSQLQLYLTCHGPTAAPEGTVPS

SEQ ID NO: 12575 - protein, 567 aa, Homo sapiens
ISAYCNLHLLGSSDSPASASQVAGTTGMRHHAQGSVTFEDVAVYFSWEEWDLLDEAQKHLYFDVMLENFALTSSLGCWCGVEHEETPSEQRISGERVPQFRTSKEGSSSQNADSCEICCLVLRDILHLAEHQGTNCGQKLHTCGKQFYISANLQQHQRQHITEAPFRSYVDTASFTQSCIVHVSEKPFTCREIRKDFLANMRFLHQDATQTGEKPNNSNKCAVAFYSGKSHHNWGKCSKAFSHIDTLVQDQRILTREGLFECSKCGKACTRRCNLIQHQKVHSEERPYECNECGKFFTYYSSFIIHQRVHTGERPYACPECGKSFSQIYSLNSHRKVHTGERPYECGECGKSFSQRSNLMQHRRVHTGERPYECSECGKSFSQNFSLIYHQRVHTGERPHECNECGKSFSRSSSLIHHRRLHTGERPYECSKCGKSFKQSSSFSSHRKVHTGERPYVCGECGKSFSHSSNLKNHQRVHTGERPVECSECSKSFSCKSNLIKHLRVHTGERPYECSECGKSFSQSSSLIQHRRVHTGKRPYQCSQCGKSFGCKSVLIQHQRVHIGEKP

SEQ ID NO: 12576 - protein, 1143 aa, Homo sapiens
MEDGGLTAFEEDQRCLSQSLPLPVSAEGPAAQTTAEPSRSFSSAHRHLSRRNGLSRLCQSRTALSEDRWSSYCLSSLAAQNICTSKLHCPAAPEHTDPSEPRGSVSCCSLLRGLSSGWSSPLLPAPVCNPNKAIFTVDAKTTEILVANDKACGLLGYSSQDLIGQKLTQFFLRSDSDVVEALSEEHMEADGHAAVVFGTVVDIISRSGEKIPVSVWMKRMRQERRLCCVVVLEPVERVSTWVAFQSDGTVTSCDSLFAHLHGYVSGEDVAGQHITDLIPSVQLPPSGQHIPKNLKIQRSVGRARDGTTFPLSLKLKSQPSSEEATTGEAAPVSGYRASVWVFCTISGLITLLPDGTIHGINHSFALTLFGYGKTELLGKNITFLIPGFYSYMDLAYNSSLQLPDLASCLDVGNESGCGERTLDPWQGQDPAEGGQDPRINVVLAGGHVVPRDEIRKLMESQDIFTGTQTELIAGGQLLSCLSPQPAPGVDNVPEGSLPVHGEQALPKDQQITALGREEPVAIESPGQDLLGESRSEPVDVKPFASCEDSEAPVPAEDGGSDAGMCGLCQKAQLERMGVSGPSGSDLWAGAAVAKPQAKGQLAGGSLLMHCPCYGSEWGLWWRSQDLAPSPSGMAGLSFGTPTLDEPWLGVENDREELQTCLIKEQLSQLSLAGALDVPHAELVPTECQAVTAPVSSCDLGGRDLCGGCTGSSSACYALATDLPGGLEAVEAQEVDVNSFSWNLKELFFSDQTDQTSSNCSCATSELRETPSSLAVGSDPDVGSLQEQGSCVLDDRELLLLTGTCVDLGQGRRFRESCVGHDPTEPLEVCLVSSEHYAASDRESPGHVPSTLDAGPEDTCPSAEEPRLNVQVTSTPVIVMRGAAGLQREIQEGAYSGSCYHRDGLRLSIQFEVRRVELQGPTPLFCCWLVKDLLHSQRDSAARTRLFLASLPGSTHSTAAELTGPSLVEVLRARPWFEEPPKAVELEGLAACEGEYSQKYSTMSPLGSGAFGFVWTAVDKEKNKEVVVKFIKKEKVLEDCWIEDPKLGKVTLEIAILSRVEHANIIKVLDIFENQGFFQLVMEKHGSGLDLFAFIDRHPRLDEPLASYIFRQVRAGQSRVSVNAGLGAWVRWLQRSVIHTRFSL

SEQ ID NO: 12577 - protein, 780 aa, Homo sapiens
MGDEKDSWKVKTLDEILQEKKRRKEQEEKAEIKRLKNSDDRDSKRDSLEEGELRDHCMEITIRNSPYRREDSMEDRGEEDDSLAIKPPQQMSRKEKVHHRKDEKRKEKCRHHSHSAEGGKHARVKEREHERRKRHREEQDKARREWERQKRREMAREHSRRERDRLEQLERKRERERKMREQQKEQREQKERERRAEERRKEREARREVSAHHRTMREDYSDKVKASHWSRSPPRPPRERFELGDGRKPVKEEKMEERDLLSDLQDISDSERKTSSAESSSAESGSGSEEEEEEEEEEEEEGSTSEESEEEEEEEEEEEEETGSNSEEASEQSAEEVSEEEMSEDEERENENHLLVVPESRFDRDSGESEEAEEEVGEGTPQSSALTEGDYVPDSPALLPIELKQELPKYLPALQGCRSVEEFQCLNRIEEGTYGVVYRAKDKKTDEIVALKRLKMEKEKEGFPITSLREINTILKAQHPNIVTVREIVVGSNMDKIYIVMNYVEHDLKSLMETMKQPFLPGEVKTLMIQLLRGVKHLHDNWILHRDLKTSNLLLSHAGILKVGDFGLAREYGSPLKAYTPVVVTQWYRAPELLLGAKEYSTAVDMWSVGCIFGELLTQKPLFPGNSEIDQINKVFKELGTPSEKIWPGYSELPVVKKMTFSEHPYNNLRKRFGALLSDQGFDLMNKFLTYFPGRRISAEDGLKHEYFRETPLPIDPSMFPTWPAKSEQQRVKRGTSPRPPEGGLGYSQLGDDDLKETGFHLTTTNQGASAAGPGFSLKF

SEQ ID NO: 12578 - protein, 923 aa, Homo sapiens [sequence omitted]

SEQ ID NO: 12579 - protein, 669 aa, Homo sapiens
MCHSSHDDLEIKTKIRMSGIKGLQGVVRKTVNDELQANIWDPQHMDKIVPSLLFNLQHVEEAESRSPSPLQAPEKEKESPAELAERCLRELLGRAAFGNIKNAIKPVLIHLDNHSLWEPKVFAIRCFKIIMYSIQPQHSHLVIQQLLGHLDANSRSAATVRAGIVEVLSEAAVIAATGSVGPTVLEMFNTLLRQLRLSIDYALTGSYDGAVSLGTKIIKEHEERMFQEAVIKTVGSFASTLPTYQRSEVILFIMSKVPRPSLHQAVDTGRTGENRNRLTQIMLLKSLLQVSTGFQCNNMMSALPSNFLDRLLSTALMEDAEIRLFVLEILISFIDRHGNRHKFSTISTLSDISVLKLKVDKCSRQDTVFMKKHSQQLYRHIYLSCKEETNVQKHYEALYGLLALISIELANEEVVVDLIRLVLAVQDVAQVNEENLPVYNRCALYALGAAYLNLISQLTTVPAFCQHIHEVIETRKKEAPYMLPEDVFVERPRLSQNLDGVVIELLFRQSKISEVLGGSGYNSDRLCLPYIPQLTDEDRLSKRRSIGETISLQVEVESRNSPEKEERVPAEEITYETLKKAIVDSVAVEEQERERRRQVVEKFQKAPFEEIAAHCGARASLLQSKLNQIFEITIRPPPSPSGTITAAYGQPQNHSIPVYEMKFPDLCVY

SEQ ID NO: 12580 - protein, 836 aa, Homo sapiens
MHPLGLCNNNDEEDLYEYGWVGVVKLEQPELDPKPCLTVLGKAKRAVQRGATAVIFDVSENPEAIDQLNQGSEDPLKRPVVYVKGADAIKLMNIVNKQKVARARIQHRPPRQPTEYFDMGIFLAFFVVVSLVCLILLVKIKLKQRRSQNSMNRLAVQALEKMETRKFNSKSKGRREGSCGALDTLSSSSTSDCAICLEKYIDGEELRVIPCTHRFHRKCVDPWLLQHHTCPHCRHNIIEQKGNPSAVCVETSNLSRGRQQRVTLPVHYPGRVHRTNAIPAYPTRTSMDSHGNPVTLLTMDRHGEQSLYSPQTPAYIRSYPPLHLDHSLAAHRCGLEHRAYSPAHPFRRPKLSGRSFSKAACFSQYETMYQHYYFQGLSYPEQEGQSPPSLAPRGPARAFPPSGSGSLLFPTVVHVAPPSHLESGSTSSFSCYHGHRSVCSGYLADCPGSDSSSSSSSGQCHCSSSDSVVDCTEVSNQGVYGSCSTFRSSLSSDYDPFIYRSRSPCRASEAGGSGSSGRGPALCFEGSPPPEELPAVHSHGAGRGEPWPGPASPSGDQVSTCSLEMNYSSNSSLEHRGPNSSTSEVGLEASPGAAPDLRRTWKGGHELPSCACCCEPQPSPAGPSAGAAGSSTLFLGPHLYEGSGPAGGEPQSGSSQGLYGLHPDHLPRTDGVKYEGLPCCFYEEKQVARGGGGGSGCYTEDYSVSVQYTLTEEPPPGCYPGARDLSQRIPIIPEDVDCDLGLPSDCQGTHSLGSWGGTRGPDTPRPHRGLGATREEERALCCQARALLRPGCPPEEAGAVRANFPSALQDTQESSTTATEAAGPRSHSADSSSPGA

SEQ ID NO: 12581 - protein, 792 aa, Homo sapiens
MAEAHQAVGFRPSLTSDGAEVELSAPVLQEIYLSGLRSWKRHLSRFWNDFLTGVFPASPLSWLFLFSAIQLAWFLQLDPSLGLMEKIKELLPDWGGQHHGLRGVLAAALFASCLWGALIFTLHVALRLLLSYHGWLLEPHGAMSSPTKTWLALVRIFSGRHPMLFSYQRSLPRQPVPSVQDTVRKYLESVRPILSDEDFDWTAVLAQEFLRLQASLLQWYLRLKSWWASNYVSDWWEEFVYLRSRNPLMVNSNYYMMAARAGNAVHALLLYRHRLNRQEIPPTLLMGMRPLCSAQYEKIFNTTRIPGVQKDYIRHLHDSQHVAVFHRGRFFRMGTHSRNSLLSPRALEQQFQRILDDPSPACPHEEHLAALTAAPRGTWAQVRTSLKTQAAEALEAVEGAAFFVSLDAEPAGLTREDPAASLDAYAHALLAGRGHDRWFDKSFTLIVFSNGKLGLSVEHSWADCPISGHMWEFTLATECFQLGYSTDGHCKGHPDPTLPQPQRLQWDLPDQIHSSISLALRGAKILSENVDCHVVPFSLFGKSFIRRCHLSSDSFIQIALQLAHFRDRGQFCLTYESAMTRLFLEGRTETVRSCTREACNFVRAMEDKEKTDPQCLALFRVAVDKHQALLKAAMSGQGVDRHLFALYIVSRFLHLQSPFLTQVHSEQWQLSTSQIPVQQMHLFDVHNYPDYVSSGGGFGPADDHGYGVSYIFMGDGMITFHISSKKSSTKTDSHRLGQHIEDALLDVASLFQAGQHFKRRFRGSGKENSRHRCGFLSRQTGASKASMTSTDF

SEQ ID NO: 12582 - protein, 1740 aa, Homo sapiens
MAKPTSKDSGLKEKFKILLGLGTPRPNPRSAEGKQTEFIITAEILRELSMECGLNNRIRMIGQICEVAKTKKFEEHAVEALWKAVADLLQPERPLEARHAVLALLKAIVQGQGERLGVLRALFFKVIKDYPSNEDLHERLEVFKALTDNGRHITYLEEELADFVLQWMDVGLSSEFLLVLVNLVKFNSCYLDEYIARMVQMICLLCVRTASSVDIEVSLQVLDAVVCYNCLPAESLPLFIVTLCRTINVKELCEPCWKLMRNLLGTHLGHSAIYNMCHLMEDRAYMEDAPLLRGAVFFVGMALWGAHRLYSLRNSPTSVLPSFYQAMACPNEVVSYEIVLSITRLIKKYRKELQVVAWDILLNIIERLLQQLQTLDSPELRTIVHDLLTTVEELCDQNEFHGSQERYFELVERCADQRPESSLLNLISYRAQSIHPAKDGWIQNLQALMERFFRSESRGAVRIKVLDVLSFVLLINRQFYEEELINSVVISQLSHIPEDKDHQVRKLATQLLVDLAEGCHTHHFNSLLDIIEKVMARSLSPPPELEERDVAAYSASLEDVKTAVLGLLVILQTKLYTLPASHATRVYEMLVSHIQLHYKHSYTLPIASSIRLQAFDFLLLLRADSLHRLGLPNKDGVVRFSPYCVCDYMEPERGSEKKTSGPLSPPTGPPGPAPAGPAVRLGSVPYSLLFRVLLQCLKQESDWKVLKLVLGRLPESLRYKVLIFTSPCSVDQLCSALCSMLSGPKTLERLRGAPEGFSRTDLHLAVVPVLTALISYHNYLDKTKQREMVYCLEQGLIHRCASQCVVALSICSVEMPDIIIKALPVLVVKLTHISATASMAVPLLEFLSTLARLPHLYRNFAAEQYASVFAISLPYTNPSKFNQYIVCLAHHVIAMWFIRCRLPFRKDFVPFITKGLRSNVLLSFDDTPEKDSFRARSTSLNERPKRIQTSLTSASLGSADENSVAQADDSLKNLHLELTETCLDMMARYVFSNFTAVPKRSPVGEFLLAGGRTKTWLVGNKLVTVTTSVGTGTRSLLGLDSGELQSGPESSSSPGVHVRQTKEAPAKLESQAGQQVSRGARDRVRSMSGGHGLRVGALDVPASQFLGSATSPGPRTAPAAKPEKASAGTRVPVQEKTNLAAYVPLLTQGWAEILVRRPTGNTSWLMSLENPLSPFSSDINNMPLQELSNALMAAERFKEHRDTALYKSLSVPAASTAKPPPLPRSNTDSAVVMEEGSPGEVPVLVEPPGLEDVEAALGMDRRTDAYSRSSSVSSQEEKSLHAEELVGRGIPIERVVSSEGGRPSVDLSFQPSQPLSKSSSSPELQTLQDILGDPGDKADVGRLSPEVKARSQSGTLDGESAAWSASGEDSRGQPEGPLPSSSPRSPSGLRPRGYTISDSAPSRRGKRVERDALKSRATASNAEKVPGINPSFVFLQLYHSPFFGDESNKPILLPNESQSFERSVQLLDQIPSYDTHKIAVLYVGEGQSNSELAILSNEHGSYRYTEFLTGLGRLIELKDCQPDKVYLGGLDVCGEDGQFTYCWHDDIMQAVFHIATLMPTKDVDKHRCDKKRHLGNDFVSIVYNDSGEDFKLGTIKGQFNFVHVIVTPLDYECNLVSLQCRKDMEGLVDTSVAKIVSDRNLPFVARQMALHANMASQVHHSRSNPTDIYPSKWIARLRHIKRLRQRICEEAAYSNPSLPLVHPPSHSKAPAQTPAEPTPGYEVGQRKRLISSVEDFTEFV

SEQ ID NO: 12583 - protein, 1145 aa, Homo sapiens
MPRNQGFSEPEYSAEYSAEYSVSLPSDPDRGVGRTHEISVRNSGSCLCLPRFMRLTFVPESLENLYQTYFKRQRHETLLVLVVFAALFDCYVVVMCAVVFSSDKLASLAVAGIGLVLDIILFVLCKKGLLPDRVTRRVLPYVLWLLITAQIFSYLGLNFARAHAASDTVGWQVFFVFSFFITLPLSLSPIVIISVVSCVVHTLVLGVTVAQQQQEELKGMQLLREILANVFLYLCAIAVGIMSYYMADRKHRKAFLEARQSLEVKMNLEEQSQQQENLMLSILPKHVADEMLKDMKKDESQKDQQQFNTMYMYRHENVSILFADIVGFTQLSSACSAQELVKLLNELFARFDKLAAKYHQLRIKILGDCYYCICGLPDYREDHAVCSILMGLAMVEAISYVREKTKTGVDMRVGVHTGTVLGGVLGQKRWQYDVWSTDVTVANKMEAGGIPGRVHISQSTMDCLKGEFDVEPGDGGSRCDYLEEKGIETYLIIASKPEVKKTATQNGLNGSALPNGAPASSKSSSPALIETKEPNGSAHSSGSTSEKPEEQDAQADNPSFPNPRRRLRLQDLADRVVDASEDEHELNQLLNEALLERESAQVVKKRNTFLLSMRFMDPEMETRYSVEKEKQSGAAFSCSCVVLLCTALVEILIDPWLMTNYVTFMVGEILLLILTICSLAAIFPRAFPKKLVAFSTWIDRTRWARNTWAMLAIFILVMANVVDMLSCLQYYTGPSNATAGMETEGSCLENPKYYNYVAVLSLIATIMLVQVSHMVKLTLMLLVAGAVATINLYAWRPVFDEYDHKRFREHDLPMVALEQMQGFNPGLNGTDSRLPLVPSKYSMTVMVFLMMLSFYYFSRHVEKLARTLFLWKIEVHDQKERVYEMRRWNEALVTNMLPEHVARHFLGSKKRDEELYSQTYDEIGVMFASLPNFADFYTEESINNGGIECLRFLNEIISDFDSLLDNPKFRVITKIKTIGSTYMAASGVTPDVNTNGFASSNKEDKSERERWQHLADLADFALAMKDTLTNINNQSFNNFMLRIGMNKGGVLAGVIGARKPHYDIWGNTVNVASRMESTGVMGNIQVVEETQVILREYGFRFVRRGPIFVKGKGELLTFFLKGRDKLATFPNGPSVTLPHQVVDNS

SEQ ID NO: 12584 - protein, 1287 aa, Homo sapiens
MLSATPLYGNVHSWMNSERVRMCGASEDRKILVNDGDASKARLELREENPLNHNVVDASTAHRIDGLAALSMDRTGLIREGLRVPGNIVYSSLCGLGSEKGREAATSTLGGLGFSSERNPEMQFKPNTPETVEASAVSGKPPNGFSAIYKTPPGIQKSAVATAEALGLDRPASDKQSPLNINGASYLRLPWVNPYMEGATPAIYPFLDSPNKYSLNMYKALLPQQSYSLAQPLYSPVCTNGERFLYLPPPHYVGPHIPSSLASPMRLSTPSASPAIPPLVHCADKSLPWKMGVSPGNPVDSHAYPHIQNSKQPRVPSAKAVTSGLPGDTALLLPPSPRPSPRVHLPTQPAADTYSEFHKHYARISTSPSVALSKPYMTVSSEFPAARLSNGKYPKAPEGGEGAQPVPGHARKTAVQDRKDGSSPPLLEKQTVTKDVTDKPLDLSSKVVDVDASKADHMKKMAPTVLVHSRAGSGLVLSGSEIPKETLSPPGNGCAIYRSEIISTAPSSWVVPGPSPNEENNGKSMSLKNKALDWAIPQQRSSSCPRMGGTDAVITNVSGSVSSAGRPASASPAPNANADGTKTSRSSVETTPSVIQHVGQPPATPAKHSSSTSSKGAKASNPEPSFKANENGLPPSSIFLSPNEAFRSPPIPYPRSYLPYPAPEGIAVSPLSLHGKGPVYPHPVLLPNGSLFPGHLAPKPGLPYGLPTGRPEFVTYQDALGLGMVHPMLIPHTPIEITKEEKPERRSRSHERARYEDPTLRNRFSEILETSSTKLHPDVPTDKNLKPNPNWNQGKTVVKSDKLVYVDLLREEPDAKTDTNVSKPSFAAESVGQSAEPPKPSVEPALQQHRDFIALREELGRISDFHETYTFKQPVFTVSKDSVLAGTNKENLGLPVSTPFLEPPLGSDGPAVTFGKTQEDPKPFCVGSAPPSVDVTPTYTKDGADEAESNDGKVLKPKPSKLAKRIANSAGYVGDRFKCVTTELYADSSQLSREQRALQMEGLQEDSILCLPAAYCERAMMRFSELEMKEREGGHPATKDSEMCKFSPADWERLKGNQDKKPKSVTLEEAIAEQNESERCEYSVGNKHRDPFEAPEDKDLPVEKYFVERQPVSEPPADQVASDMPHSPTLRVDRKRKVSGDSSHTETTAEEVPEDPLLKAKRRRVSKGLHPKKQRHLLHLRERWEQQVSAADGKPGRQSRKEVTQATQPEAIPQGTNITEEKPGRKRAEAKGNRSWSEESLKPSDNEQGLPVFSGSPPMKSLSSTSAGGKKQAQPSCAPASRPPAKQ

SEQ ID NO: 12585 - protein, 412 aa, Homo sapiens
MELSAVGERVFAAESIIKRRIRKGRIEYLVKWKGWAIKYSTWEPEENILDSRLIAAFEQKERERELYGPKKRGPKPKTFLLKARAQAEALRISDVHFSVKPSASASSPKLHSSAAVHRLKKDIRRCHRMSRRPLPRPDPQGGSPGLRPPISPFSETVRIINRKVKPREPKRNRIILNLKVIDKGAGGGGAGQGAGALARPKVPSRNRVIGKSKKFSESVLRTQIRHMKFGAFALYKPPPAPLVAPSPGKAEASAPGPGLLLAAPAAPYDARSSGSSGCPSPTPQSSDPDDTPPKLLPETVSPSAPSWREPEVLDLSLPPESAATSKRAPPEVTAAAGPAPPTAPEPAGASSEPEAGDWRPEMSPCSNVVVTDVTSNLLTVTIKEFCNPEDFEKVAAGVAGAAGGGGSIGASK

SEQ ID NO: 12586 - protein, 579 aa, Homo sapiens
MRTLLPPALLTCWLLAPVSAPATPAPRRLGPGSPLPRRALLPPVFAFLPGAGARAGSGRGSGVARGPELPPGEREALSSGPAGLRDSGWEAACALPRAPPSGVCWKRDRFFLDASTMSSFGAVPGAGSCGRLRGLRVSRGDRGWRWPQMPLGPSLYLLVNSIHPECRFHLEIQEEETKCAELLRSQTEKHKACSGVWDNITCWRPANVGETVTVPCPKVFSNFYSKAGNISKNCTSDGWSETFPDFVDACGYSDPEDESKITFYILVKAIYTLGYSVSLMSLATGSIILCLFRKLHCTRNYIHLNLFLSFILRAISVLVKDDVLYSSSGTLHCPDQPSSWVGCKLSLVFLQYCIMANFFWLLVEGLYLHTLLVAMLPPRRCFLAYLLIGWGLPTVCIGAWTAARLYLEDTGCWDTNDHSVPWWVIRIPILISIIVNFVLFISIIRILLQKLTSPDVGGNDQSQYKRLAKSTLLLIPLFGVHYMVFAVFPISISSKYQILFELCLGSFQGLVVAVLYCFLNSEVQCELKRKWRSRCPTPSASRDYRVCGSSFSRNGSEGALQFHRGSRAQSFLQTETSVI

SEQ ID NO: 12587 - protein, 1249 aa, Homo sapiens
MMAQFPTAMNGGPNMWAITSEERTKHDRQFDNLKPSGGYITGDQARNFFLQSGLPAPVLAEIWALSDLNKDGKMDQQEFSIAMKLIKLKLQGQQLPVVLPPIMKQPPMFSPLISARFGMGSMPNLSIPQPLPPAAPITSLSSATSGTNLPPLMMPTPLVPSVSTSSLPNGTASLIQPLPIPYSSSTLPHGSSYSLMMGGFGGASIQKAQSLIDLGSSSSTSSTASLSGNSPKTGTSEWAVPQPTRLKYRQKFNTLDKSMSGYLSGFQARNALLQSNLSQTQLATIWTLADVDGDGQLKAEEFILAMHLTDMAKAGQPLPLTLPPELVPPSFRGGKQIDSINGTLPSYQKMQEEEPQKKLPVTFEDKRKANYERGNMELEKRRQALMEQQQREAERKAQKEKEEWERKQRELQEQEWKKQLELEKRLEKQRELERQREEERRKDIERREAAKQELERQRRLEWERIRRQELLNQKNREQEEIVRLNSKKKNLHLELEALNGKHQQISGRLQDVRLKKQTQKTELEVLDKQCDLEIMEIKQLQQELQEYQNKLIYLVPEKQLLNERIKNMQFSNTPDSGVSLLHKKSLEKEELCQRLKEQLDALEKETASKLSEMDSFNNQLKCGNMDDSVLQCLLSLLSCLNNLFLLLKELRETYNTQQLALEQLYKIKRDKLKEIERKRLELMQKKKLEDEAARKAKQGKENLWKENLRKEEEEKQKRLQEEKTQEKIQEEERKAEEKQRKDKDTLKAEEKKRETASVLVNYRALYPFEARNHDEMSFNSGDIIQVDEKTVGEPGWLYGSFQGNFGWFPCNYVEKMPSSENEKAVSPKKALLPPTVSLSATSTSSEPLSSNQPASVTDYQNVSFSNLTVNTSWQKKSAFTRTVSPGSVSPIHGQGQVVENLKAQALCSWTAKKDNHLNFSKHDIITVLEQQENWWFGEVHGGRGWFPKSYVKIIPGSEVKREEPEALYAAVNKKPTSAAYSVGEEYIALYPYSSVEPGDLTFTEGEEILVTQKDGEWWTGSIGDRSGIFPSNYVKPKDQESFGSASKSGASNKKPEIAQVTSAYVASGSEQLSLAPGQLILILKKNTSGWWQGELQARGKKRQKGWFPASHVKLLGPSSERATPAFHPVCQVIAMYDYAANNEDELSFSKGQLINVMNKDDPDWWQGEINGVTGLFPSNYVKMTTDSDPSQQWCADLQTLDTMQPIERKRQGYIHELIQTEERYMADLQLVVEVRRLLLASSRGICCLS

SEQ ID NO: 12588 - protein, 2162 aa, Homo sapiens
MAALVLEDGSVLRGQPFGAAVSTAGEVVFQTGMVGYPEALTDPSYKAQILVLTYPLIGNYGIPPDEMDEFGLCKWFESSGIHVAALVVGECCPTPSHWSATRTLHEWLQQHGIPGLQGVDTRELTKKLREQGSLLGKLVQNGTEPSSLPFLDPNARPLVPEVSIKTPRVFNTGGAPRILALDCGLKYNQIRCLCQRGAEVTVVPWDHALDSQEYEGLFLSNGPGDPASYPSVVSTLSRVLSEPNPRPVFGICLGHQLLALAIGAKTYKMRYGNRGHNQPCLLVGSGRCFLTSQNHGFAVETDSLPADWAPLFTNANDGSNEGIVHNSLPFFSVQFHPEHQAGPSDMELLFDIFLETVKEATAGNPGGQTVRERLTERLCPPGIPTPGSGLPPPRKVLILGSGGLSIGQAGEFDYSGSQAIKALKEENIQTLLINPNIATVQTSQGLADKVYFLPITPHYVTQVIRNERPDGVLLTFGGQTALNCGVELTKAGVLARYGVRVLGTPVETIELTEDRRAFAARMAEIGEHVAPSEAANSLEQAQAAAERLGYPVLVRAAFALGGLGSGFASNREELSALVAPAFAHTSQVLVDKSLKGWKEIEYEVVRDAYGNCVTYYIIEVNARLSRSSALASKATGYPLAYVAAKLALGIPLPELRNSVTGGTAAFEPSVDYCVVKIPRWDLSKFLRVSTKIGSCMKSVGEVMGIGRSFEEAFQKALRMVDENCVGFDHTVKPVSDMELETPTDKRIFVVAAALWAGYSVDRLYELTRIDRWFLHRMKRIIAHAQLLEQHRGQPLPPDLLQQAKCLGFSDKQIALAVLSTELAVRKLRQELGICPAVKQIDTVAAEWPAQTNYLYLTYWGTTHDLTFRTPHVLVLGSGVYRIGSSVEFDWCAVGCIQQLRKMGYKTIMVNYNPETVSTDYDMCDRLYFDEISFEVVMDIYELENPEGVILSMGGQLPNNMAMALHRQQCRVLGTSPEAIDSAENRFKFSRLLDTIGISQPQWRELSDLESARQFCQTVGYPCVVRPSYVLSGAAMNVAYTDGDLERFLSSAAAVSKEHPVVISKFIQEAKEIDVDAVASDGVVAAIAISEHVENAGVHSGDATLVTPPQDITAKTLERIKAIVHAVGQELQVTGPFNLQLIAKDDQLKVIECNVRVSRSFPFVSKTLGVDLVALATRVIMGEEVEPVGLMTGSGVVGVKVPQFSFSRLAGADVVLGVEMTSTGEVAGFGESRCEAYLKAMLSTGFKIPKKNILLTIGSYKNKSELLPTVRLLESLGYSLYASLGTADFYTEHGVKVTAVDWHFEEAVDGECPPQRSILEQLAEKNFELVINLSMRGAGGRRLSSFVTKGYRTRRLAADFSVPLIIDIKCTKLFVEALGQIGPAPPLKVHVDCMTSQKLVRLPGLIDVHVHLREPGGTHKEDFASGTAAALAGGITMVCAMPNTRPPIIDAPALALAQKLAEAGARCDFALFLGASSENAGTLGTVAGSAAGLKLYLNETFSELRLDSVVQWMEHFETWPSHLPIVAHAEQQTVAAVLMVAQLTQRSVHICHVARKEEILLIKAAKARGLPVTCEVAPHHLFLSHDDLERLGPGKGEVRPELGSRQDVEALWENMAVIDCFASDHAPHTLEEKCGSRPPPGFPGLETMLPLLLTAVSEGRLSLDDLLQRLHHNPRRIFHLPPQEDTYVEVDLEHEWTIPSHMPFSKAHWTPFEGQKVKGTVRRVVLRGEVAYIDGQVLVPPGYGQDVRKWPQGAVPQLPPSAPATSEMTTTPERPRRGIPGLPDGRFHLPPRIHRASDPGLPAEEPKEKSSRKVAEPELMGTPDGTCYPPPPVPRQASPQNLGTPGLLHPQTSPLLHSLVGQHILSVQQFTKDQMSHLFNVAHTLRMMVQKERSLDILKGKVMASMFYEVSTRTSSSFAAAMARLGGAVLSFSEATSSVQKGESLADSVQTMSCYADVVVLRHPQPGAVELAAKHCRRPVINAGDGVGEHPTQALLDIFTIREELGTVNGMTITMVGDLKHGRTVHSLACLLTQYRVSLRYVAPPSLRMPPTVRAFVASRGTKQEEFESIEEALPDTDVLYMTRIQKERFGSTQEYEACFGQFILTPHIMTRAKKKMVVMHPMPRVNEISVEVDSDPRAAYFRQAENGMYIRMALLATVLGRF

SEQ ID NO: 12589 - protein, 651 aa, Homo sapiens
MGDLSSLTPGGSMGLQVNRGSQSSLEGAPATAPEPHSLGILHASYSVSHRVRPWWDITSCRQQWTRQILKDVSLYVESGQIMCILGSSGSGKTTLLDAMSGRLGRAGTFLGEVYVNGRALRREQFQDCFSYVLQSDTLLSSLTVRETLHYTALLAIRRGNPGSFQKKVEAVMAELSLSHVADRLIGNYSLGGISTGERRRVSIAAQLLQDPKVMLFDEPTTGLDCMTANQIVVLLVELARRNRIVVLTIHQPRSELFQLFDKIAILSFGELIFCGTPAEMLDFFNDCGYPCPEHSNPFDFYMDLTSVDTQSKEREIETSKRVQMIESAYKKSAICHKTLKNIERMKHLKTLPMVPFKTKDSPGVFSKLGVLLRRVTRNLVRNKLAVITRLLQNLIMGLFLLFFVLRVRSNVLKGAIQDRVGLLYQFVGATPYTGMLNAVNLFPVLRAVSDQESQDGLYQKWQMMLAYALHVLPFSVVATMIFSSVCYWTLGLHPEVARFGYFSAALLAPHLIGEFLTLVLLGIVQNPNIVNSVVALLSIAGVLVGSGFLRNIQEMPIPFKIISYFTFQKYCSEILVVNEFYGLNFTCGSSNVSVTTNPMCAFTQGIQFIEKTCPGATSRFTMNFLILYSFIPALVILGIVVFKIRDHLISR

SEQ ID NO: 12590 - protein, 397 aa, Homo sapiens
MHHVFKDHQRGEKRGFLSPENKNCRRLELRRGCSCSWGLCSQALMASLAGSLLPGSDRSGVETSEYAQGGVSDLQEEGKNAINSPMSPALVDVHPEDTQLEENEERTMIDPTSKEDPKFKELVKVLLDWINDVLVEERIIVKQLEEDLYDGQVLQKLLEKLAGCKLNVAEVTQSEIGQKQKLQTVLEAVHDLLRPRGWALRWSVDSIHGKNLVAILHLLVSLAMHFRAPIRLPEHVTVQVVVVRKREGLLHSSHISEELTTTTEMMMGRFERDAFDTLFDHAPDKLSVVKKSLITFVNKHLNKLNLEVTELETQFADGVYLVLLMGLLEDYFVPLHHFYLTPESFDQKVHNVSFAFELMLDGGLKKPKARPEDVVNLDLKSTLRVLYNLFTKYKNVE

SEQ ID NO: 12591 - protein, 626 aa, Homo sapiens
MADQRMDISSTISDFMSPGPTDLLSSSLGTSGVDCNRKRKGSSTDYQESMDTDKDDPHGRLEYTEHQGRIKNAREAHSQIEKRRRDKMNSFIDELASLVPTCNAMSRKLDKLTVLRMAVQHMKTLRGATNPYTEANYKPTFLSDDELKHLILRAADGFLFVVGCDRGKILFVSESVFKILNYSQNDLIGQSLFDYLHPKDIAKVKEQLSSSDTAPRERLIDAKTGLPVKTDITPGPSRLCSGARRSFFCRMKCNRPSVKVEDKDFPSTCSKKKADRKSFCTIHSTGYLKSWPPTKMGLDEDNEPDNEGCNLSCLVAIGRLHSHVVPQPVNGEIRVKSMEYVSRHAIDGKFVFVDQRATAILAYLPQELLGTSCYEYFHQDDIGHLAECHRQVLQTREKITTNCYKFKIKDGSFITLRSRWFSFMNPWTKEVEYIVSTNTVVLANVLEGGDPTFPQLTASPHSMDSMLPSGEGGPKRTHPTVPGIPGGTRAGAGKIGRMIAEEIMEIHRIRGSSPSSCGSSPLNITSTPPPDASSPGGKKILNGGTPDIPSSGLLSGQAQENPGYPYSDSSSILGENPHIGIDMIDNDQGSSSPSNDEAAMAVIMSLLEADAGLGGPVDFSDLPWPL

SEQ ID NO: 12592 - protein, 881 aa, Homo sapiens
MVLRRMHRPRSCSYQLLLEHQRPSCIQGLRWTPLTNSEESLDFSESLEQASTERVLRAGRQLHRHLLATCPNLIRDRKYHLRLYRQCCSGRELVDGILALGLGVHSRSQVVGICQVLLDEGALCHVKHDWAFQDRDAQFYRFPGPEPEPVRTHEMEEELAEAVALLSQRGPDALLTVALRKPPGQRTDEELDLIFEELLHIKAVAHLSNSVKRELAAVLLFEPHSKAGTVLFSQGDKGTSWYIIWKGSVNVVTHGKGLVTTLHEGDDFGQLALVNDAPRAATIILREDNCHFLRVDKQDFNRIIKDVEAKTMRLEEHGKVVLVLERASQGAGPSRPPTPGRNRYTVMSGTPEKILELLLEAMGPDSSAHDPTETFLSDFLLTHRVFMPSAQLCAALLHHFHVEPAGGSEQERSTYVCNKRQQILRLVSQWVALYGSMLHTDPVATSFLQKLSDLVGRDTRLSNLLREQWPERRRCHRLENGCGNASPQMKARNLPVWLPNQDEPLPGSSCAIQVGDKVPYDICRPDHSVLTLQLPVTASVREVMAALAQEDGWTKGQVLVKVNSAGDAIGLQPDARGVATSLGLNERLFVVNPQEVHELIPHPDQLGPTVGSAEGLDLVSAKDLAGQLTDHDWSLFNSIHQVELIHYVLGPQHLRDVTTANLERFMRRFNELQYWVATELCLCPVPGPRAQLLRKFIKLAAHLKEQKNLNSFFAVMFGLSNSAISRLAHTWERLPHKVRKLYSALERLLDPSWNHRVYRLALAKLSPPVIPFMPLLLKDMTFIHEGNHTLVENLINFEKMRMMARAARMLHHCRSHNPVPLSPLRSRVSHLHEDSQVARISTCSEQSLSTRSPASTWAYVQQLKVIDNQRELSRLSRELEP

SEQ ID NO: 12593 - protein, 509 aa, Homo sapiens
MYSPLCLTQDEFHPFIEALLPHVRAFAYTWFNLQARKRKYFKKHEKRMSKEEERAVKDELLSEKPEVKQKWASRLLAKLRKDIRPEYREDFVLTVTGKKPPCCVLSNPDQKGKMRRIDCLRQADKVWRLDLVMVILFKGIPLESTDGERLVKSPQCSNPGLCVQPHHIGVSVKELDLYLAYFVHAADSSQSESPSQPSDADIKDQPENGHLGFQDSFVTSGVFSVTELVRVSQTPIAAGTGPNFSLSDLESSSYYSMSPGAMRRSLPSTSSTSSTKRLKSVEDEMDSPGEEPFYTGQGRSPGSGSQSSGWHEVEPGMPSPTTLKKSEKSGFSSPSPSQTSSLGTAFTQHHRPVITGPRASPHATPSTLHFPTSPIIQQPGPYFSHPAIRYHPQETLKEFVQLVCPDAGQQAGQVGFLNPNGSSQGKVHNPFLPTPMLPPPPPPPMARPVPLPVPDTKPPTTSTEGGAASPTSPTYSTPSTSPANRFVSVGPRDPSFVNIPQQTQSWYLG

SEQ ID NO: 12594 - protein, 608 aa, Homo sapiens
MAYQIVLELHFSHCAAMGAALLMLIENALITQSRLMLLESVLIFFNLLAVLSYLKFFNCQKHSPFSLSWWFWLTLTGVACSCAVGIKYMGVFTYVLVLGVAAVHAWHLLGDQTLSNVCVFCHLLARAVALLVIPVVLYLLFFYVHLILVFRSGPHDQIMSSAFQASLEGGLARITQGQPLEVAFGSQVTLRNVFGKPVPCWLHSHQDTYPMIYENGRGSSHQQQVTCYPFKDVNNWWIVKDPRRHQLVVSSPPRPVRHGDMVQLVHGMTTRSLNTHDVAAPLSPHSQEVSCYIDYNISMPAQNLWRLEIVNRGSDTDVWKTILSEVRFVHVNTSAVLKLSGAHLPDWGYRQLEIVGEKLSRGYHGSTVWNVEEHRYGASQEQRERERELHSPAQVDVSRNLSFMARFSELQWRMLALRSDDSEHKYSSSPLEWVTLDTNIAYWLHPRTSAQIHLLGNIVIWVSGSLALAIYALLSLWYLLRRRRNVHDLPQDAWLRWVLAGALCAGGWAVNYLPFFLMEKTLFLYHYLPALTFQILLLPVVLQHISDHLCRSQLQRSIFSALVVAWYSSACHVSNTLRPLTYGDKSLSPHELKALRWKDSWDILIRKH

SEQ ID NO: 12595 - protein, 684 aa, Homo sapiens
LETRRVGTEGLVDSFSQGLERSYAVSSSVLHGIEPRLKDFHQLLLNPPKKKAILTTIGVLEEPLGNARLHGARLMAALLHTNTPSINQELCRLNTMDLLLDLFFKYTWNNFLHFQVELCIAAILSHAAREERTEASGSESRVEPPHENGNRSLETPQPAASLPDNTMVTHLFQKCCLVQRILEAWEANDHTQAAGGMRRGNMGHLTRIANAVVQNLERGPVQTHISEVIRGLPADCRGRWESFVEETLTETNRRNTVDLVSTHHLHSSSEDEDIEGAFPNELSLQQAFSDYQIQQMTANFVDQFGFNDEEFADQDDNINAPFDRIAEINFNIDADEDSPSAALFEACCSDRIQPFDDDEDEDIWEDSDTRCAARVMARPRFGAPHASESCSKNGPERGGQDGKASLEAHRDAPGAGAPPAPGKKEAPPVEGDSEGAMWTAVFDEPANSTPTAPGVVRDVGSSVWAAGTSAPEEKGWAKFTDFQPFCCSESGPRCSSPVDTECSHAEGSRSQGPEKAFSPASPCAWNVCVTRKAPLLASDSSSSGGSHSEDGDQKAASAMDAVSRGPGREAPPLPTVARTEEAVGRVGCADSRLLSPACPAPKEVTAAPAVAVPPEATVAITTALSKAGPAIPTPAVSSALAVAVPLGPIMAVTAAPAMVATLGTVTKDGKTDAPPEGAALNGPV

SEQ ID NO: 12596 - protein, 271 aa, Homo sapiens
MQAACWYVLFLLQPTVYLVTCANLTNGGKSELLKSGSSKSTLKHIWTESSKDLSISRLLSQTFRGKENDTDLDLRYDTPEPYSEQDLWDWLRNSTDLQEPRPRAKRRPIVKTGKFKKMFGWGDFHSNIKTVKLNLLITGKIVDHGNGTFSVYFRHNSTGQGNVSVSLVPPTKIVEFDLAQQTVIDAKDSKSFNCRIEYEKVDKATKNTLCNYDPSKTCYQEQTQSHVSWLCSKPFKVICIYISFYSTDYKLVQKVCPDYNYHSDTPYFPSG

SEQ ID NO: 12597 - protein, 461 aa, Homo sapiens
MSWSLHPRNLILYFYALLFLSSTCVAYVATRDNCCILDERFGSYCPTTCGIADFLSTYQTKVDKDLQSLEDILHQVENKTSEVKQLIKAIQLTYNPDESSKPNMIDAATLKSRKMLEEIMKYEASILTHDSSIRYLQEIYNSNNQKIVNLKEKVAQLEAQCQEPCKDTVQIHDITGKVKVDSPSLDCQDIANKGAKQSGLYFIKPLKANQQFLVYCEIDGSGNGWTVFQKRLDGSVDFKKNWIQYKEGFGHLSPTGTTEFWLGNEKIHLISTQSAIPYALRVELEDWNGRTSTADYAMFKVGPEADKYRLTYAYFAGGDAGDAFDGFDFGDDPSDKFFTSHNGMQFSTWDNDNDKFEGNCAEQDGSGWWMNKCHAGHLNGVYYQGGTYSKASTPNGYDNGIIWATWKTRWYSMKKTTMKIIPFNRLTIGEGQQHHLGGAKQVRPEHPAETEYDSLYPEDDL

SEQ ID NO: 12598 - protein, 702 aa, Homo sapiens
MEGAHASLSLEDEVSGAGSRQRPLEGKGGETPAAEEPGSLKNYAVFATRDVSAAPEKEEEEAEGPLRAQDLRESYIQLVQGVQEWQDGCMYQGEFGLNMKLGYGKFSWPTGESYHGQFYRDHCHGLGTYMWPDGSSFTGTFYLSHREGYGTMYMKTRLFQTHCHNDIVNLLLDCGADVNKCSDEGLTALSMCFLLHYPAQSFKPNVAERTIPEPQEPPKFPVVPILSSSFMDTNLESLYYELSQAMLERSAQSHSLLKMASPSPCTSSFDKGTMRRMALSMIERRKRWRTIKLLLRRGADPNLCCVPMQVLFLAVKAGDVDGVRLLLEHGARTDICFPPQLSTLTPLHIAAALPGEEGVQIVELLLHAITDVDAKASDEDDTYKPGKLDLLPSSLKLSNEPGPPQAYYSTDTALPEEGGRTALHMACEREDDNKCARDIVRLLLSHGANPNLLWSGHSPLSLSIASGNELVVKELLTQGADPNLPLTKGLGSALCVACDLTYEHQRNMDSKLALIDRLISHGADILKPVMLRQGEKEAVGTAVDYGYFRFFQDRRIARCPFHTLMPAERETFLARKRLLEYMGLQLRQAVFAKESQWDPTWLYLCKRAELIPSHRMKKKGPSLPRGLDVKEQGQIPFFKFCYQCGRSIGVRLLPCPRCYGILTCSKYCKTKAWTEFHKKDCGDLVAIVTQLEQVSRRREEFQ

SEQ ID NO: 12599 - protein, 435 aa, Homo sapiens
MIWKRSAVLRFYSVCGLLLQGSQGQFPLTQNVTVVEGGTAILTCRVDQNDNTSLQWSNPAQQTLYFDDKKALRDNRIELVRASWHELSISVSDVSLSDEGQYTCSLFTMPVKTSKAYLTVLGVPEKPQISGFSSPVMEGDLMQLTCKTSGSKPAADIRWFKNDKEIKDVKYLKEEDANRKTFTVSSTLDFRVDRSDDGVAVICRVDHESLNATPQVAMQVLEIHYTPSVKIIPSTPFPQEGQPLILTCESKGKPLPEPVLWTKDGGELPDPDRMVVSGRELNILFLNKTDNGTYRCEATNTIGQSSAEYVLIVHDVPNTLLPTTIIPSLTTATVTTTVAITTSPTTSATTSSIRDPNALAGQNGPDHALIGGIVAVVVFVTLCSIFLLGRYLARHKGTYLTNEAKGAEDAPDADTAIINAEGSQVNAEEKKEYFI

SEQ ID NO: 12600 - protein, 6306 aa, Homo sapiens
MSVFLGPGMPSASLLVNLLSALLILFVFGETEIRFTGQTEFVVNETSTTVIRLIIERIGEPANVTAIVSLYGEDAGDFFDTYAAAFIPAGETNRTVYIAVCDDDLPEPDETFIFHLTLQKPSANVKLGWPRTVTVTILSNDNAFGIISFNMLPSIAVSEPKGRNESMPLTLIREKGTYGMVMVTFEVEGGPNPPDEDLSPVKGNITFPPGRATVIYNLTVLDDEVPENDEIFLIQLKSVEGGAEINTSRNSIEIIIKKNDSPVRFLQSIYLVPEEDHILIIPVVRGKDNNGNLIGSDEYEVSISYAVTTGNSTAHAQQNLDFIDLQPNTTVVFPPFIHESHLKFQIVDDTIPEIAESFHIMLLKDTLQGDAVLISPSVVQVTIKPNDKPYGVLSFNSVLFERTVIIDEDRISRYEEITVVRNGGTHGNVSANWVLTRNSTDPSPVTADIRPSSGVLHFAQGQMLATIPLTVVDDDLPEEAEAYLLQILPHTIRGGAEVSEPAELLFYIQDSDDVYGLITFFPMENQKIESSPGERYLSLSFTRLGGTKGDVRLLYSVLYIPAGAVDPLQAKEGILNISRRNDLIFPEQKTQVTTKLPIRNDAFLQNGAHFLVQLETVELLNIIPLIPPISPRFGEICNISLLVTPAIANGEIGFLSNLPIILHEPEDFAAEVVYIPLHRDGTDGQATVYWSLKPSGFNSKAVTPDDIGPFNGSVLFLSGQSDTTINITIKGDDIPEMNETVTLSLDRVNVENQVLKSGYTSRDLIILENDDPGGVFEFSPASRGPYVIKEGESVELHIIRSRGSLVKQFLHYRVEPRDSNEFYGNTGVLEFKPGEREIVITLLARLDGIPELDEHYWVVLSSHGERESKLGSATIVNITILKNDDPHGIIEFVSDGLIVMINESKGDAIYSAVYDVVRNRGNFGDVSVSWVVSPDFTQDVFPVQGTVVFGDQEFSKNITIYSLPDEIPEEMEEFTVILLNGTGGAKVGNRTTATLRIRRNDDPIYFAEPRVVRVQEGETANFTVLRNGSVDVTCMVQYATKDGKATARERDFIPVEKGETLIFEVGSRQQSISIFVNEDGIPETDEPFYIILLNSTGDTVVYQYGVATVIIEANDDPNGIFSLEPIDKAVEEGKTNAFWILRHRGYFGSVSVSWQLFQNDSALQPGQEFYETSGTVNFMDGEEAKPIILHAFPDKIPEFNEFYFLKLVNISGGSPGPGGQLAETNLQVTVMVPFNDDPFGVFILDPECLEREVAEDVLSEDDMSYITNFTILRQQGVFGDVQLGWEILSSEFPAGLPPMIDFLLVGIFPTTVHLQQHMRRHHSGTDALYFTGLEGAFGTVNPKYHPSRNNTIANFTFSAWVMPNANTNGFIIAKDDGNGSIYYGVKIQTNESHVTLSLHYKTLGSNATYIAKTTVMKYLEESVWLHLLIILEDGIIEFYLDGNAMPRGIKSLKGEAITDGPGILRIGAGINGNDRFTGLMQDVRSYERKLTLEEIYELHAMPAKSDLHPISGYLEFRQGETNKSFIISARDDNDEEGEELFILKLVSVYGGARISEENTTARLTIQKSDNANGLFGFTGACIPEIAEEGSTISCVVERTRGALDYVHVFYTISQIETDGINYLVDDFANASGTITFLPWQRSEVLNIYVLDDDIPELNEYFRVTLVSAIPGDGKLGSTPTSGASIDPEKETTDITIKASDHPYGLLQFSTGLPPQPKDAMTLPASSVPHITVEEEDGEIRLLVIRAQGLLGRVTAEFRTVSLTAFSPEDYQNVAGTLEFQPGERYKYIFINITDNSIPELEKSFKVELLNLEGGVAELFRVDGSGSGDGDMEFFLPTIHKRASLGVASQILVTIAASDHAHGVFEFSPESLFVSGTEPEDGYSTVTLNVIRHHGTLSPVTLHWNIDSDPDGDLAFTSGNITFEIGQTSANITVEILPDEDPELDKAFSVSVLSVSSGSLGAHINATLTVLASDDPYGIFIFSEKNRPVKVEEATQNITLSIIRLKGLMGKVLVSYATLDDMEKPPYFPPNLARATQGRDYIPASGFALFGANQSEATIAISILDDDEPERSESVFIELLNSTLVAKVQSRSIPNSPRLGPKVETIAQLIIIANDDAFGTLQLSAPIVRVAENHVGPIINVTRTGGAFADVSVKFKAVPITAIAGEDYSIASSDVVLLEGETSKAVPIYVINDIYPELEESFLVQLMNETTGGARLGALTEAVIIIEASDDPYGLFGFQITKLIVEEPEFNSVKVNLPIIRNSGTLGNVTVQWVATINGQLATGDLRVVSGNVTFAPGETIQTLLLEVLADDVPEIEEVIQVQLTDASGGGTIGLDRIANIIIPANDDPYGTVAFAQMVYRVQEPLERSSCANITVRRSGGHFGRLLLFYSTSDIDVVALAMEEGQDLLSYYESPIQGVPDPLWRTWMNVSAVGEPLYTCATLCLKEQACSAFSFFSASEGPQCFWMTSWISPAVNNSDFWTYRKNMTRVASLFSGQAVAGSDYEPVTRQWAIMQEGDEFANLTVSILPDDFPEMDESFLISLLEVHLMNISASLKNQPTIGQPNISTVVIALNGDAFGVFVIYNISPNTSEDGLFVEVQEQPQTLVELMIHRTGGSLGQVAVEWRVVGGTATEGLDFIGAGEILTFAEGETKKTVILTILDDSEPEDDESIIVSLVYTEGGSRILPSSDTVRVNILANDNVAGIVSFQTASRSVIGHEGEILQFHVIRTFPGRGNVTVNWKIIGQNLELNFANFSGQLFFPEGSLNTTLFVHLLDDNIPEEKEVYQVILYDVRTQGVPPAGIALLDAQGYAAVLTVEASDEPHGVLNFALSSRFVLLQEANITIQLFINREFGSLGAINVTYTTVPGMLSLKNQTVGNLAEPEVDFVPIIGFLILEEGETAAAINITILEDDVPELEEYFLVNLTYVGLTMAASTSFPPRLDSEGLTAQVIIDANDGARGVIEWQQSRFEVNETHGSLTLVAQRSREPLGHVSLFVYAQNLEAQVGLDYIFTPMILHFADGERYKNVNIMILDDDIPEGDEKFQLILTNPSPGLELGKNTIALIIVLANDDGPGVLSFNNSEHFFLREPTALYVQESVAVLYIVREPAQGLFGTVTVQFIVTEVNSSNESKDLTPSKGYIVLEEGVRFKALQISAILDTEPEMDEYFVCTLFNPTGGARLGVHVQTLITVLQNQAPLGLFSISAVENRATSIDIEEANRTVYLNVSRTNGIDLAVSVQWETVSETAFGMRGMDVVFSVFQSFLDESASGWCFFTLENLIYGIMLRKSSVTVYRWQGIFIPVEDLNIENPKTCEAFNIGFSPYFVITHEERNEEKPSLNSVFTFTSGFKLFLVQTIIILESSQVRYFTSDSQDYLIIASQRDDSELTQVFRWNGGSFVLHQKLPVRGVLTVALFNKGGSVFLAISQANARLNSLLFRWSGSGFINFQEVPVSGTTEVEALSSANDIYLIFAENVFLGDQNSIDIFIWEMGQSSFRYFQSVDFAAVNRIHSFTPASGIAHILLIGQDMSALYCWNSERNQFSFVLEVPSAYDVASVTVKSLNSSKNLIALVGAHSHIYELAYISSHSDFIPSSGELIFEPGEREATIAVNILDDTVPEKEESFKVQLKNPKGGAEIGINDSVTITILSNDDAYGIVAFAQNSLYKQVEEMEQDSLVTLNVERLKGTYGRITIAWEADGSISDIFPTSGVILFTEGQVLSTITLTILADNIPELSEVVIVTLTRITTEGVEDSYKGATIDQDRSKSVITTLPNDSPFGLVGWRAASVFIRVAEPKENTTTLQLQIARDKGLLGDIAIHLRAQPNFLLHVDNQATENEDYVLQETIIIMKENIKEAHAEVSILPDDLPELEEGFIVTITEVNLVNSDFSTGQPSVRRPGMEIAEIMIEENDDPRGIFMFHVTRGAGEVITAYEVPPPLNVLQVPVVRLAGSFGAVNVYWKASPDSAGLEDFKPSHGILEFADKQVTAMIEITIIDDAEFELTETFNISLISVAGGGRLGDDVVVTVVIPQNDSPFGVFGFEEKTVMIDESLSSDDPDSYVTLTVVRSPGGKGTVRLEWTIDEKAKHNLSPLNGTLHFDETESQKTIVLHTLQDTVLEEDRRFTIQLISIDEVEISPVKGSASIIIRGDKRASGEVGIAPSSRHILIGEPSAKYNGTAIISLVRGPGILGEVTVFWRIFPPSVGEFAETSGKLTMRDEQSAVIVVIQALNDDIPEEKSFYEFQLTAVSEGGVLSESSSTANITVVASDSPYGRFAFSHEQLRVSEAQRVNITIIRSSGDFGHVRLWYKTMSGTAEAGLDFVPAAGELLFEAGEMRKSLHVEILDDDYPEGPEEFSLTITKVELQGRGYDFTIQENGLQIDQPPEIGNISIVRIIIMKNDNAEGIIEFDPKYTAFEVEEDVGLIMIPVVRLHGTYGYVTADFISQSSSASPGGVDYILHGSTVTFQHGQNLSFINISIIDDNESEFEEPIEILLTGATGGAVLGRHLVSRIIIAKSDSPFGVIRFLNQSKISIANPNSTMILSLVLERTGGLLGEIQVNWETVGPNSQEALLPQNRDIADPVSGLFYFGEGEGGVRTIILTIYPHEEIEVEETFIIKLHLVKGEAKLDSRAKDVTLTIQEFGDPNGVVQFAPETLSKKTYSEPLALEGPLLITFFVRRVKGTFGEIMVYWELSSEFDITEDFLSTSGFFTIADGESEASFDVHLLPDEVPEIEEDYVIQLVSVEGGAELDLEKSITWFSVYANDDPHGVFALYSDRQSILIGQNLIRSIQINITRLAGTFGDVAVGLRISSDHKEQPIVTENAERQLVVKDGATYKVDVVPIKNQVFLSLGSNFTLQLVTVMLVGGRFYGMPTILQEAKSAVLPVSEKAANSQVGFESTAFQLMNITAGTSHVMISRRGTYGALSVAWTTGYAPGLEIPEFIVVGNMTPTLGSLSFSHGEQRKGVFLWTFPSPGWPEAFVLHLSGVQSSAPGGAQLRSGFIVAEIEPMGVFQFSTSSRNIIVSEDTQMIRLHVQRLFGFHSDLIKVSYQTTAGSAKPLEDFEPVQNGELFFQKFQTEVDFEITIINDQLSEIEEFFYINLTSVEIRGLQKFDVNWSPRLNLDFSVAVITILDNDDLAGMDISFPETTVAVAVDTTLIPVETESTTYLSTSKTTTILQPTNVVAIVTEATGVSAIPEKLVTLHGTPAVSEKPDVATVTANVSIHGTFSLGPSIVYIEEEMKNGTFNTAEVLIRRTGGFTGNVSITVKTFGERCAQMEPNALPFRGIYGISNLTWAVEEEDFEEQTLTLIFLDGERERKVSVQILDDDEPEGQEFFYVFLTNPQGGAQIVEEKDDTGFAAFAMVIITGSDLHNGIIGFSEESQSGLELREGAVMRRLHLIVTRQPNRAFEDVKVFWRVTLNKTVVVLQKDGVNLVEELQSVSGTTTCTMGQTKCFISIELKPEKVPQVEVYFFVELYEATAGAAINNSARFAQIKILESDESQSLVYFSVGSRLAVAHKKATLISLQVARDSGTGLMMSVNFSTQELRSAETIGRTIISPAISGKDFVITEGTLVFEPGQRSTVLDVILTPETGSLNSFPKRFQIVLFDPKGGARIDKVYGTANITLVSDADSQAIWGLADQLHQPVNDDILNRVLHTISMKVATENTDEQLSAMMHLIEKITTEGKIQAFSVASRTLFYEILCSLINPKRKDTRGFSHFAEVTENFAFSLLTNVTCGSPGEKSKTILDSCPYLSILALHWYPQQINGHKFEGKEGDYIRIPERLLDVQDAEIMAGKSTCKLVQFTEYSSQQWFISGNNLPTLKNKVLSLSVKGQSSQLLTNDNEVLYRIYAAEPRIIPQTSLCLLWNQAAASWLSDSQFCKVVEETADYVECACSHMSVYAVYARTDNLSSYNEAFFTSGFICISGLCLAVLSHIFCARYSMFAAKLLTHMMAASLGTQILFLASAYASPQLAEESCSAMAAVTHYLYLCQFSWMLIQSVNFWYVLVMNDEHTERRYLLFFLLSWGLPAFVVILLIVILKGIYHQSMSQIYGLIHGDLCFIPNVYAALFTAALVPLTCLVVVFVVFIHAYQVKPQWKAYDDVFRGRTNAAEIPLILYLFALISVTWLWGGLHMAYRHFWMLVLFVIFNSLQGLYVFMVYFILHNQMCCPMKASYTVEMNGHPGPSTAFFTPGSGMPPAGGEISKSTQNLIGAMEEVPPDWERASFQQGSQASPDLKPSPQNGATFPSSGGYGQGSLIADEESQEFDDLIFALKTGAGLSVSDNESGQGSQEGGTLTDSQIVELRRIPIADTHL

SEQ ID NO: 12601 - protein, 495 aa, Homo sapiens
MAGVGRSGGPWGRTRGGRSGRLGVSLGALSSLPLEELPRPLCCRRCRRHFGFALRGETIPVSVAGSASSQFAPLALHLSLLLSRISASRLTRWPPPDKREGSAVDPGKRRSLAATPSSSLPCTLIALGLRHEKEANELMEDLFETFQDEMGFSNMEDDGPEEEERVAEPQANFNTPQALRFEELLANLLNEQHQIAKELFEQLKMKKPSAKQQKEVEKVKPQCKEVHQTLILDPAQRKRLQQQMQQHVQLLTQIHLLATCNPNLNPEASSTRICLKELGTFAQSSIALHHQYNPKFQTLFQPCNLMGAMQLIEDFSTHVSIDCSPHKTVKKTANEFPCLPKQVAWILATSKVFMYPELLPVCSLKAKNPQDKILFTKAEDNLLALGLKHFEGTEFLNPLISKYLLTCKTARQLTVRIKNLNMNRAPDNIIKFYKKTKQLPVLGKCCEEIQPHQWKPPIEREEHRLPFWLKVQPSSSKSVGGRRSLKVLREYQGLP

SEQ ID NO: 12602 - protein, 677 aa, Homo sapiens
GGLCIAQSVRIPQERKDRTIDFDRIIKQLLDTPNSRAVVIFANDEDIKQILAAAKRADQVGHFLWVGSDSWGSKINPLHQHEDIAEGAITIQPKRATVEGFDAYFTSRTLENNRRNVWFAEYWEENFNCKLTISGSKKEDTDRKCTGQERIGKDSNYEQEGKVQFVIDAVYAMAHALHHMNKDLCADYRGVCPEMEQAGGKKLLKYIRNVNFNGSAGTPVMFNKNGDAPGRYDIFQYQTTNTSNPGYRLIGQWTDELQLNIEDMQWGKGVREIPASVCTLPCKPGQRKKTQKGTPCCWTCEPCDGYQYQFDEMTCQHCPYDQRPNENRTGCQDIPIIKLEWHSPWAVIPVFLAMLGIIATIFVMATFIRYNDTPIVRASGRELSYVLLTGIFLCYIITFLMIAKPDVAVCSFRRVFLGLGMCISYAALLTKTNRIYRIFEQGKKSVTAPRLISPTSQLAITSSLISVQLLGVFIWFGVDPPNIIIDYDEHKTMNPEQARGVLKCDITDLQIICSLGYSILLMVTCTVYAIKTRGVPENFNEAKPIGFTMYTTCIVWLAFIPIFFGTAQSAEKLYIQTTTLTISMNLSASVALGMLYMPKVYIIIFHPELNVQKRKRSFKAVVTAATMSSRLSHKPSDRPNGEAKTELCENVDPNNCIPPVRKSVQKSVTWYTIPPTV

SEQ ID NO: 12603 - protein, 874 aa, Homo sapiens
MEKLAAGLAGLRWSMGAFPLDLIVSRCRLPTLACLGPGEYAEGVSERDILLIHSCRQWTTVTAHTLEEGHYVIGPKIDIPLQYPGKFKLLEQARDVREPVRYFSSVEEVASVFPDRIFVMEAITFSVKVVSGEFSEDSEVYNFTLHAGDELTLMGQAEILCAKTTKERSRFTTLLRKLGRAGALAGVGGGGPASAGAAGGTGGGGARPVKGKMPCLICMNHRTNESLSLPFQCQGRFSTRSPLELQMQEGEHTVRAIIERVRLPVNVLVPSRPPRNPYDLHPVREGHCYKLVSIISKTVVLGLALRREGPAPLHFLLLTDTPRFALPQGLLAGDPRVERLVRDSASYCRERFDPDEYSTAVREAPAELAEDCASPRRARLCLPAPRAPGLARAPGPLAPAPAGEGDQEYVSPDWAAAPEPAAPPAEIPYEELWAHQGPEGLVRPPPGLDLISFGAAGPPRREPEAPPPPVPPKSEAVKEECRLLNAPPVPPRGGNGSGRLSSSPPVPPRFPKLQPVHSPSSSLSYYSSGLQDGAGSRSGSGSPSPDTYSLYCYPCTWGDCKVGESSSRPAPGPLPSTTQPSQASRALTEPLSGRAASLLGADTPVKTYHSCPPLFKPSHPQKRFAPFGALNPFSGPAYPSGPSAALSSGPRTTSGPVATSGPAYSPGPASPGQAYSAAPPSSCAPSSSSSSEWQEPVLEPFDPFELGQGSSPEPELLRSQEPRAVGTPGPGPRLSPLGPSKAFEPEGLVLHQVPTPLSPAALQGPEAGGALFLTQGRLEGPPASPRDGATGFGVRDASSWQPPADLSALSLEEVSRSLRFIGLSEDVVSFFARERIDGSIFVQLSEDILADDFHLTKLQVKKIMQFIKGWRPKI

SEQ ID NO: 12604 - protein, 393 aa, Homo sapiens
MLLPGRARQPPTPQPVQHPGLRRQVEPPGQLLRLFYCTVLVCSKEISALTDFSGYLTKLLQNHTTYACDGDYLNLQCPRHSTISVQSAFYGQDYQMCSSQKPASQREDSLTCVAATTFQKVLDECQNQRACHLLVNSRVFGPDLCPGSSKYLLVSFKCQPNELKNKTVCEDQELKLHCHESKFLNIYSATYGRRTQERDICSSKAERLPPFVPKNILTAIDPAIANLKPSLKQKDGEYGINFDPSGSKVLRKDGILVSNSLAAFAYIRAHPERAALLFVSSVCIGLALTLCALVIRESCAKDFRDLQLGREQLVPGSDKVEEDSEDEEEEEDPSESDFPGELSGFCRTSYPIYSSIEAAELAERIERREQIIQEIWMNSGLDTSLPRNMGQFY

SEQ ID NO: 12605 - protein, 478 aa, Homo sapiens
MACLNPVPKLYRSVIEDVIEGVRNLFAEEGIEEQVLKDLKQLWETKVLQSKATEDFFRNSIQSPLFTLQLPHSLHQTLQSSTASLVIPAGRTLPSFTTAELGTSNSSANFTFPGYPIHVPAGVTLQTVSGHLYKVNVPIMVTETSGRAGILQHPIQQVFQQLGQPSVIQTSVPQLNPWSLQATTEKSQRIETVLQQPAILPSGPVDRKHLENATSDILVSPGNEHKIVPEALLCHQESSHYISLPGVVFSPQVSQTNSNVESVLSGSASMAQNLHDESLSTSPHGALHQHVTDIQLHILKNRMYGCDSVKQPRNIEEPSNIPVSEKDSNSQVDLSIRVTDDDIGEIIQVDGSGDTSSNEEIGSTRDADENEFLGNIDGGDLKVPEEEADSISNEDSATNSSDNEDPQVNIVEEDPLNSGDDVSEQDVPDLFDTDNVIVCQYDKIHRSKNKWKFYLKDGVMCFGGRDYVFAKAIGDAEW

SEQ ID NO: 12606 - protein, 1535 aa, Homo sapiens
MSDRLGQITKGKDGKSKYSTLSLFDKYKGKSVDAIRSSVIPRHGLQSLGKVAAARRMPPPANLPSLKSENKGNDPNIVIVPKDGTGWANKQDQQDPKSSSATASQPPESLPQPGLQKSVSNLQKPTQSISQENTNSVPGGPKSWAQLNGKPVGHEGGLRGSSRLLSFSPEEFPTLKAAGGQDKAGKEKGVLDLSYGPGPSLRPQNVTSWREGGGRHIISATSLSTSPTELGSRNSSTGDGAPSSACTSDSKDPSLRPAQPVRKGASQFMGNVYHPPTYHDMLPAFMCSPKSSENQGTVERGSFPLPQLRLEPRVPFRQFQMNDQDGKENRLGLSRPLRPLRQLVERAPRPTIINAENLKGLDDLDADADDGWAGLHEEVDYSEKLKFSDDEEEEEVVKDGRPKWNSWDPRRQRQLSMSSADSADAKRTREEGKDWAEAVGASRVVRKAPDPQPPPRKLHGWAPGPDYQKSSMGSMFRQQSIEDKEDKPPPRQKFIQSEMSEAVERARKRREEEERRAREERLAACAAKLKQLDQKCKQARKAGEARKQAEKEVPWSPSAEKASPQENGPAVHKGSPEFPAQETPTTFPEEAPTVSPAVAQSNSSEEEAREAGSPAQEFKYQKSLPPRFQRQQQQQQQEQLYKMQHWQPVYPPPSHPQRTFYPHHPQMLGFDPRWMMMPSYMDPRITPTRTPVDFYPSALHPSGLMKPMMPQESLNGTGCRSEDQNCVPPLQERKVTPIDSPPVWSPEGYMALQSKGYPLPHPKSSDTLAMDMRVRSPDEALPGGLSGCSSGSGHSPYALERAAHASADLPEASSKKAEKEAKLAAPRAGEQGEAMKQFDLNYGSAIIENCGSSPGEESEVGSMVGEGFIEVLTKKQRRLLEEERRKKEQAVQVPVKGRGLSSRIPPRFAKKQNNLCLEQGDVTVPGSSLGTEIWESSSQALPVQAPANDSWRKAVTAFSSTETGSAEQGFKSSQGDSGVDLSAESRESSATSSQRSSPYGTLKPEEMSGPGLAEPKADSHKEQAPKPSEQKDSEQGSGQSKEHRPGPIGNERSLKNRKGSEGAERLQGAVVPPVNGVEIHVDSVLPVPPIEFGVSPKDSDFSLPPGSASGPTGSPVVKLQDALASNAGLTQSIPILRRDHHIQRAIGLSPMSFPTADLTLKMESARKAWENSPSLPEQSSPGGAGSGIQPPSSVGASSGVNYSSFGGVSMPPMPVASVAPSASMPGSHLPPLYLDGHVFASQPRLVPQTIPQQQSYQQAAAAQQIPISLHTSLQAQAQLGLRGGLPVSQSQEIFSSLQPFRSQVYMHPSLSPPSTMILSGGTALKPPYSAFPGMQPLEMVKPQSGSPYQPMSGNQALVYEGQLSQAAGLGASQMLDSQLPQLTMPLPRYGSGQQPLILPQSIQLPPGQSLSVGAPRRIPPPGSQPPVLNTSREPSQMEMKGFHFADSKQNVPSGGPVPSPQTYRPSSASPSGKPSGSAVNMGSVQGHYVQQAKQRVDEKPSLGAVKLQEAPSAASQMKRTGAIKPRAVKVEESKA

SEQ ID NO: 12607 - protein, 1342 aa, Homo sapiens
MEEEKDDSPQADFCLGTALHSWGLWFTEEGSPSTMLTGIAVGALLALALVGVLILFMFRRLRQFRQAQPTPQYRFRKRDKVMFYGRKIMRKVTTLPNTLVENTALPRQRARKRTKVLSLAKRILRFKKEYPALQPKEPPPSLLEADLTEFDVKNSHLPSEVLYMLKNVRVLGHFEKPLFLELCKHIVFVQLQEGEHVFQPREPDPSICVVQDGRLEVCIQDTDGTEVVVKEVLAGDSVHSLLSILDIITGHAAPYKTVSVRAAIPSTILRLPAAAFHGVFEKYPETLVRVVQIIMVRLQRVTFLALHNYLGLTTELFNAESQAIPLVSVASVAAGKAKKQVFYGEEERLKKPPRLQESCDSDHGGGRPAAAGPLLKRSHSVPAPSIRKQILEELEKPGAGDPDPSAPQGGPGSATSDLGMACDRARVFLHSDEHPGSSVASKSRKSVMVAEIPSTVSQHSESHTDETLASRKSDAIFRAAKKDLLTLMKLEDSSLLDGRVALLHVPAGTVVSRQGDQDASILFVVSGLLHVYQRKIGSQEDTCLFLTRPGEMVGQLAVLTGEPLIFTVKANRDCSFLSISKAHFYEIMRKQPTVVLGVAHTVVKRMSSFVRQIDFALDWVEVEAGRAIYRQGDKSDCTYIMLSGRLRSVIRKDDGKKRLAGEYGRGDLVGVVETLTHQARATTVHAVRDSELAKLPAGALTSIKRRYPQVVTRLIHLLGEKILGSLQQGPVTGHQLGLPTEGSKWDLGNPAVNLSTVAVMPVSEEVPLTAFALELEHALSAIGPTLLLTSDNIKRRLGSAALDSVHEYRLSSWLGQQEDTHRIVLYQADGTLTPWTQRCVRQADCILIVGLGDQEPTVGELERMLESTAVRAQKQLILLHREEGPAPARTVEWLNMRSWCSGHLHLCCPRRVFSRRSLPKLVEMYKHVFQRPPDRHSDFSRLARVLTGNAIALVLGGGGARGCAQVGVLKALAECGIPVDMVGGTSIGAFVGALYSEERNYSQMRIRAKQWAEGMTSLMKAALDLTYPITSMFSGAGFNSSIFSVFKDQQIEDLWIPYFAITTDITASAMRVHTDGSLWWYVRASMSLSGYMPPLCDPKDGHLLMDGGYINNLPADVARSMGAKVVIAIDVGSRDETDLTNYGDALSGWWLLWKRWNPLATKVKVLNMAEIQTRLAYVCCVRQLEVVKSSDYCEYLRPPIDSYSTLDFGKFNEICEVGYQHGRTVFDIWGRSGVLEKMLRDQQGPSKKPASAVLTCPNASFTDLAEIVSRIEPAKPAMVDDESDYQTEYEEELLDVPRDAYADFQSTSAQQGSDLEDESSLRHRHPSLAFPKLSEGSSDQDG

SEQ ID NO: 12608 - protein, 477 aa, Homo sapiens
MAQGSGDQRAVGVADPEESSPNMIVYCKIEDIITKMQDDKTGGVPIRTVKSFLSKIPSVVTGTDIVQWLMKNLSIEDPVEAIHLGSLIAAQGYIFPISDHVLTMKDDGTFYRFQAPYFWPSNCWEPENTDYAIYLCKRTMQNKARLELADYEAENLARLQRAFARKWEFIFMQAEAQVKIDRKKDKTERKILDSQERAFWDVHRPVPGCVNTTEMDIRKCRRLKNPQKVKKSVYGVTEESQAQSPVHVLSQPIRKTTKEDIRKQITFLNAQIDRHCLKMSKVAESLIAYTEQYVEYDPLITPAEPSNPWISDDVALWDIEMSKEPSQQRVKRWGFSFDEILKDQVGRDQFLRFLESEFSSENLRFWLAVQDLKKQPLQDVAKRVEEIWQEFLAPGAPSAINLDSHSYEITSQNVKDGGRYTFEDAQEHIYKLMKSDSYARFLRSNAYQDLLLAKKKPESEQGRRTSLEKFTRSVLLF

SEQ ID NO: 12609 - protein, 735 aa, Homo sapiens
MCSTNPGKWVTFDDDPAVQSSQKSKNFPLENQGVCRPNGLKLNLPGLREFPSGSSSTSSTPLSSPIVDFYFSPGPPSNSPLSTPTKDFPGFPGIPKAGTHVLYPIPESSSDSPLAISGGESSLLPTRPTCLSHALLPSDHSCTHPTPKVGLPDEVNPQQAESLGFQSDDLPQFQYFREDCAFSSPFWKDEGSDSHFTLDPPGSKKMFSSRNKEMPIDQKSLNKCSLNYICEKLEHLQSAENQDSLRSLSMHCLCAEENASSFVPHTLFRSQPKSGWSFMLRIPEKKNMMSSRQWGPIFLKVLPGGILQMYYEQGLEKPFKEIQLDPYCRLSEPKVENFSVAGKIHTVKIEHVSYTEKRKYHSKTEVVHEPDIEQMLKLGSTSYHDFLDFLTTVEEELMKLPAVSKPKKNYEEQEISLEIVDNFWGKVTKEGKFVESAVITQIYCLCFVNGNLECFLTLNDLELPKRDESYYEKDSEKKGIDILDYHFHKCVNVQEFEQSRIIKFVPLDACRFELMRFKTLYNGDNLPFSLKSVVVVQGAYVELQAFVNMASLAQRSSYAGSLRSCDNIRIHFPVPSQWIKALWTMNLQRQKSLKAKMNRRACLGSLQELESEPVIQVTVGSAKYESAYQAVVWKIDRLPDKNSSLDHPHCLSYKLELGSDQEIPSDWYPFATVQFSVPDTCASRTEVRSLGVESDVQPQKHVQQRACYNIQVEIEKKWIKIDGEDPDKIGDCITQ

SEQ ID NO: 12610 - protein, 640 aa, Homo sapiens
MSERKEGRGKGKGKKKERGSGKKPESAAGSQSPALPPRLKEMKSQESAAGSKLVLRCETSSEYSSLRFKWFKNGNELNRKNKPQNIKIQKKPGKSELRINKASLADSGEYMCKVISKLGNDSASANITIVESNEIITGMPASTEGAYVSSESPIRISVSTEGANTSSSTSTSTTGTSHLVKCAEKEKTFCVNGGECFMVKDLSNPSRYLCKCQPGFTGARCTENVPMKVQNQEKAEELYQKRVLTITGICIALLVVGIMCVVAYCKTKKQRKKLHDRLRQSLRSERNNMMNIANGPHHPNPPPENVQLVNQYVSKNVISSEHIVEREAETSFSTSHYTSTAHHSTTVTQTPSHSWSNGHTESILSESHSVIVMSSVENSRHSSPTGGPRGRLNGTGGPRECNSFLRHARETPDSYRDSPHSERYVSAMTTPARMSPVDFHTPSSPKSPPSEMSPPVSSMTVSMPSMAVSPFMEEERPLLLVTPPRLREKKFDHHPQQFSSFHHNPAHDSNSLPASPLRIVEDEEYETTQEYEPAQEPVKKLANSRRAKRTKPNGHIANRLEVDSNTSSQSSNSESETEDERVGEDTPFLGIQNPLAASLEATPAFRLADSRTNPAGRFSTQEEIQARLSSVIANQDPIAV

SEQ ID NO: 12611 - protein, 953 aa, Homo sapiens
MTSATSPIILKWDPKSLEIRTLTVERLLEPLVTQVTTLVNTSNKGPSGKKKGRSKKAHVLAASVEQATQNFLEKGEQIAKESQDLKEELVAAVEDVRKQGETMRIASSEFADDPCSSVKRGTMVRAARALLSAVTRLLILADMADVMRLLSHLKIVEEALEAVKNATNEQDLANRFKEFGKEMVKLNYVAARRQQELKDPHCRDEMAAARGALKKNATMLYTASQAFLRHPDVAATRANRDYVFKQVQEAIAGISNAAQATSPTDEAKGHTGIGELAAALNEFDNKIILDPMTFSEARFRPSLEERLESIISGAALMADSSCTRDDRRERIVAECNAVRQALQDLLSEYMNNTGRKEKGDPLNIAIDKMTKKTRDLRRQLRKAVMDHISDSFLETNVPLLVLIEAAKSGNEKEVKEYAQVFREHANKLVEVANLACSISNNEEGVKLVRMAATQIDSLCPQVINAALTLAARPQSKVAQDNMDVFKDQWEKQVRVLTEAVDDITSVDDFLSVSENHILEDVNKCVIALQEGDVDTLDRTAGAIRGRAARVIHIINAEMENYEAGVYTEKVLEATKLLSETVMPRFAEQVEVAIEALSANVPQPFEENEFIDASRLVYDGVRDIRKAVLMIRTPEELEDDSDFEQEDYDVRSRTSVQTEDDQLIAGQSARAIMAQLPQEEKAKIAEQVEIFHQEKSKLDAEVAKWDDSGNDIIVLAKQMCMIMMEMTDFTRGKGPLKNTSDVINAAKKIAEAGSRMDKLARAVADQCPDSACKQDLLAYLQRIALYCHQLNICSKVKAEVQNLGGELIVSGTGVQSTFTTFYEVDCDVIDGGRASQLSTHLPTCAEGAPIGSGSSDSSMLDSATSLIQAAKNLMNAVVLTVKASYVASTKYQKVYGTAAVNSPVVSWKMKAPEKKPLVKREKPEEFQTRVRRGSQKKHISPVQALSEFKAMDSF

SEQ ID NO: 12612 - protein, 1198 aa, Homo sapiens
MDEETRHSLECIQANQIFPRKQLIREDENLQVPFLELHGESTEFVGRAEDAIIALSNYRLHIKFKESLVNVPLQLIESVECRDIFQLHLTCKDCKVIRCQFSTFEQCQEWLKRLNNAIRPPAKIEDLFSFAYHAWCMEVYASEKEQHGDLCRPGEHVTSRFKNEVERMGFDMNNAWRISNINEKYKLCGSYPQELIVPAWITDKELESVSSFRSWKRIPAVIYRHQSNGAVIARCGQPEVSWWGWRNADDEHLVQSVAKACASDSRSSGSKLSTRNTSRDFPNGGDLSDVEFDSSLSNASGAESLAIQPQKLLILDARSYAAAVANRAKGGGCECPEYYPNCEVVFMGMANIHSIRRSFQSLRLLCTQMPDPGNWLSALESTKWLHHLSVLLKSALLVVHAVDQDQRPVLVHCSDGWDRTPQIVALAKLLLDPYYRTIEGFQVLVEMEWLDFGHKFADRCGHGENSDDLNERCPVFLQWLDCVHQLQRQFPCSFEFNEAFLVKLVQHTYSCLFGTFLCNNAKERGEKHTQERTCSVWSLLRAGNKAFKNLLYSSQSEAVLYPVCHVRNLMLWSAVYLPCPSPTTPVDDSCAPYPAPGTSPDDPPLSRLPKTRSYDNLTTACDNTVPLASRRCSDPSLNEKWQEHRRSLELSSLAGPGEDPLSADSLGKPTRVPGGAELSVAAGVAEGQMENILQEATKEESGVEEPAHRAGIEIQEGKEDPLLEKESRRKTPEASAIGLHQDPELGDAALRSHLDMSWPLFSQGISEQQSGLSVLLSSLQVPPRGEDSLEVPVEQFRIEEIAEGREEAVLPIPVDAKVGYGTSQSCSLLPSQVPFETRGPNVDSSTDMLVEDKVKSVSGPQGHHRSCLVNSGKDRLPQTMEPSPSETSLVERPQVGSVVHRTSLGSTLSLTRSPCALPLAECKEGLVCNGAPETENRASEQPPGLSTLQMYPTPNGHCANGEAGRSKDSLSRQLSAMSCSSAHLHSRNLHHKWLHSHSGRPSATSSPDQPSRSHLDDDGMSVYTDTIQQRLRQIESGHQQEVETLKKQVQELKSRLESQYLTSSLHFNGDFGDEVTSIPDSESNLDQNCLSRCSTEIFSEASWEQVDKQDTEMTRWLPDHLAAHCYACDSAFWLASRKHHCRNCGNVFCSSCCNQKVPVPSQQLFEPSRVCKSCYSSLHPTSSSIDLELDKPIAATSN

SEQ ID NO: 12613 - protein, 1066 aa, Homo sapiens
MHSMISSVDVKSEVPVGLEPISPLDLRTDLRMMMPVVDPVVREKQLQQELLLIQQQQQIQKQLLIAEFQKQHENLTRQHQAQLQEHIKELLAIKQQQELLEKEQKLEQQRQEQEVERHRREQQLPPLRGKDRGRERAVASTEVKQKLQEFLLSKSATKDTPTNGKNHSVSRHPKLWYTAAHHTSLDQSSPPLSGTSPSYKYTLPGAQDAKDDFPLRKTASEPNLKVRSRLKQKVAERRSSPLLRRKDGNVVTSFKKRMFEVTESSVSSSSPGSGPSSPNNGPTGSVTENETSVLPPTPHAEQMVSQQRILIHEDSMNLLSLYTSPSLPNITLGLPAVPSQLNASNSLKEKQKCETQTLRQGVPLPGQYGGSIPASSSHPHVTLEGKPPNSSHQALLQHLLLKEQMRQQKLLVAGGVPLHPQSPLATKERISPGIRGTHKLPRHRPLNRTQSAPLPQSTLAQLVIQQQHQQFLEKQKQYQQQIHMNKLLSKSIEQLKQPGSHLEEAEEELQGDQAMQEDRAPSSGNSTRSDSSACVDDTLGQVGAVKVKEEPVDSDEDAQIQEMESGEQAAFMQQPFLEPTHTRALSVRQAPLAAVGMDGLEKHRLVSRTHSSPAASVLPHPAMDRPLQPGSATGIAYDPLMLKHQCVCGNSTTHPEHAGRIQSIWSRLQETGLLNKCERIQGRKASLEEIQLVHSEHHSLLYGTNPLDGQKLDPRILLGDDSQKFFSSLPCGGLGVDSDTIWNELHSSGAARMAVGCVIELASKVASGELKNGFAVVRPPGHHAEESTAMGFCFFNSVAITAKYLRDQLNISKILIVDLDVHHGNGTQQAFYADPSILYISLHRYDEGNFFPGSGAPNEVGTGLGEGYNINIAWTGGLDPPMGDVEYLEAFRTIVKPVAKEFDPDMVLVSAGFDALEGHTPPLGGYKVTAKCFGHLTKQLMTLADGRVVLALEGGHDLTAICDASEACVNALLGNELEPLAEDILHQSPNMNAVISLQKIIEIQSKYWKSVRMVAVPRGCALAGAQLQEETETVSALASLTVDVEQPFAQEDSRTAGEPMEEEPAL

SEQ ID NO: 12614 - protein, 521 aa, Homo sapiens
MSAVSQPQAAPSPLEKSPSTAILCNTCGNVCKGEVLRVQDKYFHIKCFVCKACGCDLAEGGFFVRQGEYICTLDYQRLYGTRCFSCDQFIEGEVVSALGKTYHPDCFVCAVCRLPFPPGDRVTFNGKECMCQKCSLPVSVGSSAHLSQGLRSCGGCGTEIKNGQALVALDKHWHLGCFKCKSCGKLLNAEYISKDGLPYCEADYHAKFGIRCDSCEKYITGRVLEAGEKHYHPSCALCVRCGQMFAEGEEMYLQGSSIWHPACRQAARTEDRNKETRTSSESIISVPASSTSGSPSRVIYAKLGGEILDYRDLAALPKSKAIYDIDRPDMISYSPYISHSAGDRQSYGEGDQDDRSYKQCRTSSPSSTGSVSLGRYTPTSRSPQHYSRPAARRSDGEDGSLDQDNRKQKSSWLMLKGDADTRTNSPDLDTQSLSHSSGTDRDPLQRMAGDSFHSQYKIYPYDSLIVTNRIRVKLPKDVDRTRLERHLSPEEFQEVFGMSIEEFDRLALWKRNDLKKKALLF

SEQ ID NO: 12615 - protein, 331 aa, Homo sapiens
MLRCGQMIFAQALVCRHLGRDWRWTQRKRQPDSYFSVLNAFIDRKDSYYSIHQIAQMGVGEGKSIGQWYGPNTVAQVLKKLAVFDTWSSLAVHIAMDNTVVMEEIRRLCRTSVPCAGATAFPADSDRHCNGFPAGAEVTNRPSPWRPLVLLIPLRLGLTDINEAYVETLKHCFMMPQSLGVIGGKPNSAHYFIGYVGEELIYLDPHTTQPAVEPTDGCFIPDESFHCQHPPCRMSIAELDPSIAVGFFCKTEDDFNDWCQQVKKLSLLGGALPMFELVELQPSHLACPDVLNLSLGESCQVQVGSLGDSSDVERLERFFDSEDEDFEILSL

SEQ ID NO: 12616 - protein, 351 aa, Homo sapiens
MVIMGQCYYNETIGFFYNNSGKELSSHWRPKDVVVVALGLTVSVLVLLTNLLVIAAIASNRRFHQPIYYLLGNLAAADLFAGVAYLFLMFHTGPRTARLSLEGWFLRQGLLDTSLTASVATLLAIAVERHRSVMAVQLHSRLPRGRVVMLIVGVWVAALGLGLLPAHSWHCLCALDRCSRMAPLLSRSYLAVWALSSLLVFLLMVAVYTRIFFYVRRRVQRMAEHVSCHPRYRETTLSLVKTVVIILGAFVVCWTPGQVVLLLDGLGCESCNVLAVEKYFLLLAEANSLVNAAVYSCRDAEMRRTFRRLLCCACLRQSTRESVHYTSSAQGGASTRIMLPENGHPLMDSTL

SEQ ID NO: 12617 - protein, 1709 aa, Homo sapiens
MRAGWTPRGFSAFHASLLPGRHPYLAHLGPRDRGARIGSRAYSQGCCSCLWLTYKGKKEGSTKGELGPAAVTDLEIPSYSRGFLPCTPRFPTTWCRGPGCFCGTAVIAGNLGDLARIVGPSHHASQLLLLQEQDSGNHPTMAESLSEISDSLDVLEAGDEGKKKCKFKALKSFFVKKKEKEAEDTQEEEMLELSLSSSNINISSLQPVRENQPTKARAKSSMGSKALSHDSIFMLGPEPERSASKMFPSMDPQRGRPQQRSHISRTLPKPRSKVPGVVSGAMSGAVLQNVPTSAVWVAGPKITENPPSRRRRLSIIPPVIQPEIISKNLVEISLDDESPKNPQKKALPHKSLTATQSFSELSSGPDCSQSLTAFATLASTSSTQLPIGFSTPATTQGCLDSSAARHKMTLNPRKQKKNLQVIIRGLPVWFSHFQGILEGSLQCVTQTLETPNLDEPLPVEPKEEEPNLPLVSEEEKSITKPKEINEKKLGMDSADSSSQKQNNKTEMYDKKTTDQAPNTDASRSQGYPMSAAYGRRWRRKGASVSGLSGCEFKGRSLKQSSEGYGLGDRAGSSPTNKTARNVPFSHLSLEKDNMEQPTTSQPETTTPQGLLSDKDDMGRRNAGIDFGSRKASAAQPIPENMDNSMVSDPQPYHEDAASGAEKTEARASLSLMVESLSTTQEEAILSVAAEAQVFMNPSHIQLEDQEAFSFDLQKAQSKMESAQDVQTICKEKPSGNVHQTFTASVLGMTSTTAKGDVYAKTLPPRSLFQSSRKPDAEEVSSDSENIPEEGDGSEELAHGHSSQSLGKFEDEQEVFSESKSFVEDLSSSEEELDLRCLSQALEEPEDAEVFTESSSYVEKYNTSDDCSSSEEDLPLRHPAQALGKPKNQQEVSSASNNTPEEQNDFMQQLPSRCPSQPIMNPTVQQQVPTSSVGTSIKQSDSVEPIPPRHPFQPWVNPKVEQEVSSSPKSMAVEESISMKPLPPKLLCQPLMNPKVQQNMFSGSEDIAVERVISVEPLLPRYSPQSLTDPQIRQISESTAVEEGTYVEPLPPRCLSQPSERPKFLDSMSTSAEWSSPVAPTPSKYTSPPWVTPKFEELYQLSAHPESTTVEEDISKEQLLPRHLSQLTVGNKVQQLSSNFERAAIEADISGSPLPPQYATQFLKRSKVQEMTSRLEKMAVEGTSNKSPIPRRPTQSFVKFMAQQIFSESSALKRGSDVAPLPPNLPSKSLSKPEVKHQVFSDSGSANPKGGISSKMLPMKHPLQSLGRPEDPQKVFSYSERAPGKCSSFKEQLSPRQLSQALRKPEYEQKVSPVSASSPKEWRNSKKQLPPKHSSQASDRSKFQPQMSSKGPVNVPVKQSSGEKHLPSSSPFQQQVHSSSVNAAARRSVFESNSDNWFLGRDEAFAIKTKKFSQGSKNPIKSIPAPATKPGKFTIAPVRQTSTSGGIYSKKEDLESGDGNNNQHANLSNQDDVEKLFGVRLKRAPPSQKYKSEKQDNFTQLASVPSGPISSSVGRGHKIRSTSQGLLDAAGNLTKISYVADKQQSRPKSESMAKKQPACKTPGKPAGQQSDYAVSEPVWITMAKQKQKSFKAHISVKELKTKSNAGADAETKEPKYEGAGSANENQPKKMFTSSVHKQEKTAQMKPPKPTKSVGFEAQKILQVPAMEKETKRSSTLPAKFQNPVEPIEPVWFSLARKKAKAWSHMAEITQ

SEQ ID NO: 12618 - protein, 509 aa, Homo sapiens
MEEKRRKYSISSDNSDTTDSHATSTSASRCSKLPSSTKSGWPRQNEKKPSEVFRTDLITAMKIPDSYQLSPDDYYILADPWRQEWEKGVQVPAGAEAIPEPVVRILPPLEGPPAQASPSSTMLGEGSQPDWPGGSRYDLDEIDAYWLELINSELKEMERPELDELTLERVLEELETLCHQNMARAIETQEGLGIEYDEDVVCDVCRSPEGEDGNEMVFCDKCNVCVHQACYGILKVPTGSWLCRTCALGVQPKCLLCPKRGGALKPTRSGTKWVHVSCALWIPEVSIGCPEKMEPITKISHIPASRWALSCSLCKECTGTCIQCSMPSCVTAFHVTCAFDHGLEMRTILADNDEVKFKSFCQEHSDGGPRNEPTSEPTEPSQAGEDLEKVTLRKQRLQQLEEDFYELVEPAEVAERLDLAEALVDFIYQYWKLKRKANANQPLLTPKTDEVDNLAQQEQDVLYRRLKLFTHLRQDLERSGLGGEQRARRVTRRGRAARAPRAALRRKRK

SEQ ID NO: 12619 - protein, 1727 aa, Homo sapiens
MNGGKECDGGDKEGGLPAIQVPVGWQRRVDQNGVLYVSPSGSLLSCLEQVKTYLLTDGTCKCGLECPLILPKVFNFDPGAAVKQRTAEDVKADEDVTKLCIHKRKIIAVATLHKSMEAPHPSLVLTSPGGGTNATPVVPSRAATPRSVRNKSHEGITNSVMPECKNPFKLMIGSSNAMGRLYVQELPGSQQQELHPVYPRQRLGSSEHGQKSPFRGSHGGLPSPASSGSQIYGDGSISPRTDPLGSPDVFTRSNPGFHGAPNSSPIHLNRTPLSPPSVMLHGSPVQSSCAMAGRTNIPLSPTLTTKSPVMKKPMCNFSTNMEIPRAMFHHKPPQGPPPPPPPSCALQKKPLTSEKDPLGILDPIPSKPVNQNPVIINPTSFHSNVHSQVPMMNVSMPPAVVPLPSNLPLPTVKPGHMNHGSHVQRVQHSASTSLSPSPVTSPVHMMGTGIGRIEASPQRSRSSSTSSDHGNFMMPPVGPQATSSGIKVPPRSPRSTIGSPRPSMPSSPSTKSDGHHQYKDIPNPLIAGISNVLNTPSSAAFPTASAGSSSVKSQPGLLGMPLNQILNQHNAASFPASSLLSAAAKAQLANQNKLAGNNSSSSSNSGAVAGSGNTEGHSTLNTMFPPTANMLLPTGEGQSGRAALRDKLMSQQKDALRKRKQPPTTVLSLLRQSQMDSSAVPKPGPDLLRKQGQGSFPISSMSQLLQSMSCQSSHLSSNSTPGCGASNTALPCSANQLHFTDPSMNSSVLQNIPLRGEAVHCHNANTNFVHSNSPVPNHHLAGLINQIQASGNCGMLSQSGMALGNSLHPNPPQSRISTSSTPVIPNSIVSSYNQTSSEAGGSGPSSSIAIAGTNHPAITKTTSVLQDGVIVTTAAGNPLQSQLPIGSDFPFVGQEHALHFPSNSTSNNHLPHPLNPSLLSSLPISLPVNQQHLLNQNLLNILQPSAGEGKSEINLHPLGFLNPNVNAALAFLSSDMDGQVLQPVHFQLLAALLQNQAQAAAMLPLPSFNLTISDLLQQQNTPLPSLTQMTAPPDHLPSNQSDNSRAETLLTSPLGNPLPSFAGSDTTFNPLFLPAVNGASGLMTLNPQLLGGVLNSASANTANHPEVSIATSSQATTTTTTTSSAVAALTVSTLGGTAVVSMAETLLNISNNAGNTPGPAKLNSNSVVPQLLNPLLGTGLLGDMSSINNTLSNHQLTHLQSLLNNNQMFPPNQQQQQLLQGYQNLQAFQGQSTIPCPANNNPMACLFQNFQVRMQEDAALLNKRISTQPGLTALPENPNTTLPPFQDTPCELQPRIDPSLGQQVKDGLVVGGPGDASVDAIYKAVVDAASKGMQVVITTAVNSTTQISPIPALSAMSAFTASIGDPLNLSSAVSAVIHGRNMGGVDHDGRLRNSRGARLPKNLDHGKNVNEGDGFEYFKSASCHTSKKQWDGEQSPRGERNRWKYEEFLDHPGHIHSSPCHERPNNVSTLPFLPGEQHPILLPPRNCPGDKILEENFRYNNYKRTMMSFKERLENTVERCAHINGNRPRQSRGFGELLSTAKQDLVLEEQSPSSSNSLENSLVKDYIHYNGDFNAKSVNGCVPSPSDAKSISSEDDLRNPDSPSSNELIHYRPRTFNVGDLVWGQIKGLTSWPGKLVREDDVHNSCQQSPEEGKVEPEKLKTLTEGLEAYSRVRKRNRKSGKLNNHLEAAIHEAMSELDKMSGTVHQIPQGDRQMRPPKPKRRKISR

SEQ ID NO: 12620 - protein, 1333 aa, Homo sapiens [sequence omitted]

SEQ ID NO: 12621 - protein, 501 aa, Homo sapiens
MDEFHPFIEALLPHVRAFAYTWFNLQARKRKYFKKHEKRMSKEEERAVKDELLSEKPEVKQKWASRLLAKLRKDIRPEYREDFVLTVTGKKPPCCVLSNPDQKGKMRRIDCLRQADKVWRLDLVMVILFKGIPLESTDGERLVKSPQCSNPGLCVQPHHIGVSVKELDLYLAYFVHAADSSQSESPSQPSDADIKDQPENGHLGFQDSFVTSGVFSVTELVRVSQTPIAAGTGPNFSLSDLESSSYYSMSPGAMRRSLPSTSSTSSTKRLKSVEDEMDSPGEEPFYTGQGRSPGSGSQSSGWHEVEPGMPSPTTLKKSEKSGFSSPSPSQTSSLGTAFTQHHRPVITGPRASPHATPSTLHFPTSPIIQQPGPYFSHPAIRYHPQETLKEFVQLVCPDAGQQAGQVGFLNPNGSSQGKVHNPFLPTPMLPPPPPPPMARPVPLPVPDTKPPTTSTEGGAASPTSPTYSTPSTSPANRFVSVGPRDPSFVNIPQQTQSWYLG

SEQ ID NO: 12622 - protein, 210 aa, Homo sapiens
MSAGKMMRTLITTHPLPLLLLPQQLLQLVQFQEVDTDFDFPEEDKKEEFEECLEKFFSTGPARPPTKEKVKRRVLIEPGMPLNHIEYCNHEIMGKNVYYKHRWVAEHYFLLMQYDELQKICYNRFVPCKNGIRKCNRSKGLVEGVYCNLTEAFEIPACKYESLYRKGYVLITCSWQNEMQKRIPHTINDLVEPPEHRSFLSEDGVFVISP

SEQ ID NO: 12623 - protein, 1556 aa, Homo sapiens
MASELGARDDGGCTELAKPLYLQYLERALRLDHFLRQTSAIFNRNISSDDSEDGLDDSNPLLPQSGDPLIQVKEEPPNSLLGETSGAGSSGMLNTYSLNGVLQSESKCDKGNLYNFSKLKKSRKWLKSILLSDESSEADSQSEDDDEEELNLSREELHNMLRLHKYKKLHQNKYSKDKELQQYQYYSAGLLSTYDPFYEQQRHLLGPKKKKFKEEKKLKAKLKKVKKKRRRDEELSSEESPRRHHHQTKVFAKFSHDAPPPGTKKKHLSIEQLNARRRKVWLSIVKKELPKANKQKASARNLFLTNSRKLAHQCMKEVRRAALQAQKNCKETLPRARRLTKEMLLYWKKYEKVEKEHRKRAEKEALEQRKLDEEMREAKRQQRKLNFLITQTELYAHFMSRKRDMGHDGIQEEILRKLEDSSTQRQIDIGGGVVVNITQEDYDSNHFKAQALKNAENAYHIHQARTRSFDEDAKESRAAALRAANKSGTGFGESYSLANPSIRAGEDIPQPTIFNGKLKGYQLKGMNWLANLYEQGINGILADEMGLGKTVQSIALLAHLAERENIWGPFLIISPASTLNNWHQEFTRFVPKFKVLPYWGNPHDRKVIRRFWSQKTLYTQDAPFHVVITSYQLVVQDVKYFQRVKWQYMVLDEAQALKSSSSVRWKILLQFQCRNRLLLTGTPIQNTMAELWALLHFIMPTLFDSHEEFNEWFSKDIESHAENKSAIDENQLSRLHMILKPFMLRRIKKDVENELSDKIEILMYCQLTSRQKLLYQALKNKISIEDLLQSSMGSTQQAQNTTSSLMNLVMQFRKVCNHPELFERQETWSPFHISLKPYHISKFIYRHGQIRVFNHSRDRWLRVLSPFAPDYIQRSLFHRKGINEESCFSFLRFIDISPAEMANLMLQGLLARWLALFLSLKASYRLHQLRSWGAPEGESHQRYLRNKDFLLGVNFPLSFPNLCSCPLLKSLVFSSHCKAVSGYSDQVVHQRRSATSSLRRCLLTELPSFLCVASPRVTAVPLDSYCNDRSAEYERRVLKEGGSLAAKQCLLNGAPELAADWLNRRSQFFPEPAGGLWSIRPQNGWSFIRIPGKESLITDSGKLYALDVLLTRLKSQGHRVLIYSQMTRMIDLLEEYMVYRKHTYMRLDGSSKISERRDMVADFQNRNDIFVFLLSTRAGGLGINLTAADTVIFYDSDWNPTVDQQAMDRAHRLGQTKQVTVYRLICKGTIEERILQRAKEKSEIQRMVISGGNFKPDTLKPKEVVSLLLDDEELEKKLRLRQEEKRQQEETNRVKERKRKREKYAEKKKKEDELDGKRRKEGVNLVIPFVPSADNSNLSADGDDSFISVDSAMPSPFSEISISSELHTGSIPLDESSSDMLVIVDDPASSAPQSRATNSPASITGSVSDTVNGISIQEMPAAGRGHSARSRGRPKGSGSTAKGAGKGRSRKSTAGSAAAMAGAKAGAAAASAAAYAAYGYNVSKGISASSPLQTSLVRPAGLADFGPSSASSPLSSPLSKGNNVPGNPKNLHMTSSLAPDSLVRKQGKGTNPSGGR

SEQ ID NO: 12624 - protein, 270 aa, Homo sapiens
MFAPRLLDFQKTKYARFMNHRVPAHKRYQPTEYEHAANCATHAFWIIPSILGSSNLYFLSDDDWETISAWIYGLGLCGLFVVSTVFHTISWKKSHLRMVEHCLHMFDRMVIYFFIAASYAPWLNLRELGPWASHMRWLVWIMASVGTIYVFFFHERTGSCVQFLRGEACPKAGTACLPARYKLVELLCYVVMGFFPALVILSMPNTEGIWELVTGGVFYCLGMVFFKSDGRIPFAHAIWHLFVAFGAGTHYYAIWRYLYLPSTLQTKVSK

SEQ ID NO: 12625 - protein, 2141 aa, Homo sapiens
MIRIAALNASSTIEDDHEGSFKSHKTQTKEAQEAEAFALYHKALDLQKHDRFEESAKAYHELLEASLLREAVSSGDEKEGLKHPGLILKYSTYKNLAQLAAQREDLETAMEFYLEAVMLDSTDVNLWYKIGHVALRLIRIPLARHAFEEGLRCNPDHWPCLDNLITVLYTLSDYTTCLYFICKALEKDCRYSKGLVLKEKIFEEQPCLRKDSLRMFLKCWKCLGESLLAMYNHLTTCEPPRPSLGKRIDLSDYQDPSQPLESSMVVTPVNVIQPSTVSTNPAVAVAEPVVSYTSVATTSFPLHSPGLLETGAPVGDISGGDKSKKGVKRKKISEESGETAKRRSARVRNTKCKKEEKVDFQELLMKFLPSRLRKLDPEEEDDSFNNYEVQSEAKLESFPSIGPQRLSFDSATFMESEKQDVHEFLLENLTNGGILELMMRYLKAMGHKFLVRWPPGLAEVVLSVYHSWRRHSTSLPNPLLRDCSNKHIKDMMLMSLSCMELQLDQWLLTKGRSSAVSPRNCPAGMVNGRFGPDFPGTHCLGDLLQLSFASSQRDLFEDGWLEFVVRVYWLKARFLALQGDMEQALENYDICTEMLQSSTAIQVEAGAERRDIVIRLPNLHNDSVVSLEEIDKNLKSLERCQSLEEIQRLYEAGDYKAVVHLLRPTLCTSGFDRAKHLEFMTSIPERPAQLLLLQDSLLRLKDYRQCFECSDVALNEAVQQMVNSGEAAAKEEWVATVTQLLMGIEQALSADSSGSILKVSSSTTGLVRLTNNLIQVIDCSMAVQEEAKEPHVSSVLPWIILHRIIWQEEDTFHSLCHQQQLQNPAEEGMSETPMLPSSLMLLNTAHEYLGRRSWCCNSDGALLRFYVRVLQKELAASTSEDTHPYKEELETALEQCFYCLYSFPSKKSKARYLEEHSAQQVDLIWEDALFMFEYFKPKTLPEFDSYKTSTVSADLANLLKRIATIVPRTERPALSLDKVSAYIEGTSTEVPCLPEGADPSPPVVNELYYLLADYHFKNKEQSKAIKFYMHDICICPNRFDSWAGMALARASRIQDKLNSNELKSDGPIWKHATPVLNCFRRALEIDSSNLSLWIEYGTMSYALHSFASRQLKQWRGELPPELVQQMEGRRDSMLETAKHCFTSAARCEGDGDEEEWLIHYMLGKVAEKQQQPPTVYLLHYRQAGHYLHEEAARYPKKIHYHNPPELAMEALEVYFRLHASILKLLGKPDSGVGAEVLVNFMKEAAEGPFARGEEKNTPKASEKEKACLVDEDSHSSAGTLPGPGASLPSSSGPDRSQDSTAVALSDSSSTQDFFNEPTSLLEGSRKSYTEKRLPILSSQAGATGKDLQGATEERGKNEESLESTEGFRAAEQGVQKPAAETPASACIPGKPSASTPTLWDGKKRGDLPGEPVAFPQGLPAGAEEQRQFLTEQCIASFRLCLSRFPQHYKSLYRLAFLYTYSKTHRNLQWARDVLLGSSIPWQQLQHMPAQGLFCERNKTNFFNGIWRIPVDEIDRPGSFAWHMNRSIVLLLKVLAQLRDHSTLLKVSSMLQRTPDQGKKYLRDADRQVLAQRAFILTVKVLEDTLSELAEGSERPGPKVCGLPGARMTTDVSHKASPEDGQEGLPQPKKPPLADGSGPGPEPGGKVGLLNHRPVAMDAGDSADQSGERKDKESPRAGPTEPMDTSEATVCHSDLERTPPLLPGRPARDRGPESRPTELSLEELSISARQQPTPLTPAQPAPAPAPATTTGTRAGGHPEEPLSRLSRKRKLLEDTESGKTLLLDAYRVWQQGQKGVAYDLGRVERIMSETYMLIKQVDEEAALEQAVKFCQVHLGAAAQRQASGDTPTTPKHPKDSRENFFPVTVVPTAPDPVPADSVQRPSDAHTKPRPALAAATTIITCPPSASASTLDQSKDPGPPRPHRPEATPSMASLGPEGEELARVAEGTSFPPQEPRHSPQVKMAPTSSPAEPHCWPAEAALGTGAEPTCSQEGKLRPEPRRDGEAQEAASETQPLSSPPTAASSKAPSSGSAQPPEGHPGKPEPSRAKSRPLPNMPKLVIPSAATKFPPEITVTPPTPTLLSPKGSISEETKQKLKSAILSAQSAANVRKESLCQPALEVLETSSQESSLESETDEDDDYMDI

SEQ ID NO: 12626 - protein, 494 aa, Homo sapiens
MKWVTFISLLFLFSSAYSRGVFRRDAHKSEVAHRFKDLGEENFKALYLYEIARRHPYFYAPELLFFAKRYKAAFTECCQAADKAACLLPKLDELRDEGKASSAKQRLKCASLQKFGERAFKAWAVARLSQRFPKAEFAEVSKLVTDLTKVHTECCHGDLLECADDRADLAKYICENQDSISSKLKECCEKPLLEKSHCIAEVENDEMPADLPSLAADFVESKDVCKNYAEAKDVFLGMFLYEYARRHPDYSVVLLLRLAKTYETTLEKCCAAADPHECYAKVFDEFKPLVEEPQNLIKQNCELFEQLGEYKFQNALLVRYTKKVPQVSTPTLVEVSRNLGKVGSKCCKHPEAKRMPCAEDYLSVVLNQLCVLHEKTPVSDRVTKCCTESLVNRRPCFSALEVDETYVPKEFNAETFTFHADICTLSEKERQIKKQTALVELVKHKPKATKEQLKAVMDDFAAFVEKCCKADDKETCFAEEGKKLVAASQAALGL

SEQ ID NO: 12627 - protein, 637 aa, Homo sapiens
MMPFPVTTQGPPQPAPPPNRYGVSSPISLAVPKETDCLLTQRLIETLRPFGVFEEEEELQRRILVLEKLNNLVKEWIREISESKSLPQSVIENVGGKIFTFGSYRLGVHTKGADIDALCVAPSHVDRSDFFTSFYAKLKLQEEVKDLRAVEEAFVPVIKLCFDGIEIDILFARLALQTIPEDLDLRDDSLLKNLDIRCIRSLNGCRVTDEILHLVPNIDNFRLTLRAIKLWAKCHNIYSNILGFLGGVSWAMLVARTCQLYPNAVASTLVRKFFLVFSEWEWPNPVLLKEPEERNLNLPVWDPRVNPSDRYHLMPIITPAYPQQNSTYNVSISTRMVMIEEFKQGLAITHEILLSKAEWSKLFEAPSFFQKYKHYIVLLASASTEKQHLEWVGLVESKIRILVGSLEKNEFITLAHVNPQSFPAPKENPDMEEFRTMWVIGLGLKKPDNSEILSIDLTYDIQSFTDTVYRQAVNSKMFEMGMKITAMHLRRKELHQLLPHHVLQDKKAHSTEGRRLTDLNDSSFDLSAGCENSMSVPSSTSTMKTGPLISSSQGRNSPALAVMTASVANIQATEFSLQQVNTNESSGVALNESIPHAVSQPAISPSPKAMVARVVSSTCLISHPDLQETQQQTYLIL

SEQ ID NO: 12628 - protein, 309 aa, Homo sapiens
MMGIFLVYVGFVFFSVLYVQQGLSSQAKFTEFPRNVTATEGQNVEMSCAFQSGSASVYLEIQWWFLRGPEDLDPGAEGAGAQVELLPDRDPDSDGTKISTVKVQGNDISHKLQISKVRKKDEGLYECRVTDANYGELQEHKAQAYLKVNANSHARRMQAFEASPMWLQDMKPRKNVSAAIPSSIHGSANQRTHSTSSPQVVAKIPKQSPQSVSPILPEVKHLHRPPLLVLPFFSLSSLFSTDPLPTFPTSHRTVKRLPAPLPQPGHGSTPGVQSCVLAPPAKSKSPVKSTERTAKLTLNSKHHPAPTVL

SEQ ID NO: 12629 - protein, 399 aa, Homo sapiens
MAFVTSGELVRHRRYKHTHEKPFKCSMCDYASVEVSKLKRHIRSHTGERPFQCSLCSYASRDTYKLKRHMRTHSGEKPYECYICHARFTQSGTMKMHILQKHTENVAKFHCPHCDTVIARKSDLGVHLRKQHSYIEQGKKCRYCDAVFHERYALIQHQKSHKNEKRFKCDQCDYACRQERHMIMHKRTHTGEKPYACSHCDKTFRQKQLLDMHFKRYHDPNFVPAAFVCSKCGKTFTRRNTMARHADNCAGPDGVEGENGGETKKSKRGRKRKMRSKKEDSSDSENAEPDLDDNEDEEEPAVEIEPEPEPQPVTPAPPPAKKRRGRPPGRTNQPKQNQPTAIIQVEDQNTGAIENIIVEVKKEPDAEPAEGEEEEAQPAATDAPNGDLTPEMILSMMDR

SEQ ID NO: 12630 - protein, 695 aa, Homo sapiens
MALLLVSLLAFLSLGSGCHHRICHCSNRVFLCQESKVTEIPSDLPRNAIELRFVLTKLRVIQKGAFSGFGDLEKIEISQNDVLEVIEADVFSNLPKLHEIRIEKANNLLYINPEAFQNLPNLQYLLISNTGIKHLPDVHKIHSLQKVLLDIQDNINIHTIERNSFVGLSFESVILWLNKNGIQEIHNCAFNGTQLDELNLSDNNNLEELPNDVFHGASGPVILDISRTRIHSLPSYGLENLKKLRARSTYNLKKLPTLEKLVALMEASLTYPSHCCAFANWRRQISELHPICNKSILRQEVDYMTQARGQRSSLAEDNESSYSRGFDMTYTEFDYDLCNEVVDVTCSPKPDAFNPCEDIMGYNILRVLIWFISILAITGNIIVLVILTTSQYKLTVPRFLMCNLAFADLCIGIYLLLIASVDIHTKSQYHNYAIDWQTGAGCDAAGFFTVFASELSVYTLTAITLERWHTITHAMQLDCKVQLRHAASVMVMGWIFAFAAALFPIFGISSYMKVSICLPMDIDSPLSQLYVMSLLVLNVLAFVVICGCYIHIYLTVRNPNIVSSSSDTRIAKRMAMLIFTDFLCMAPISFFAISASLKVPLITVSKAKILLVLFHPINSCANPFLYAIFTKNFRRDFFILLSKCGCYEMQAQIYRTETSSTVHNTHPRNGHCSSAPRVTSGSTYILVPLSHLAQN

SEQ ID NO: 12631 - protein, 778 aa, Homo sapiens
MPRSPGTRLKPAKYIPVATAAALLVGSSTLFFVFTCPWLTRAVSPAVPVYNGIIFLFVLANFSMATFMDPGVFPRADEDEDKEDDFRAPLYKNVDVRGIQVRMKWCATCHFYRPPRCSHCSVCDNCVEDFDHHCPWVNNCIGRRNYRYFFLFLLSLSAHMVGVVAFGLVYVLNHAEGLGAAHTTITMAVMCVAGLFFIPVIGLTGFHVVLVTRGRTTNEQVTGKFRGGVNPFTRGCCGNVEHVLCSPLAPRYVVEPPRLPLAVSLKPPFLRPELLDRAAPLKVKLSDNGLKAGLGRSKSKGSLDRLDEKPLDLGPPLPPKIEAGTFSSDLQTPRPGSAESALSVQRTSPPTPAMYKFRPAFPTGPKVPFCGPGEQVPGPDSLTLGDDSIRSLDFVSEPSLDLPDYGPGGLHAAYPPSPPLSASDAFSGALRSLSLKASSRRGGDHVALQPLRSEGGPPTPHRSIFAPHALPNRNGSLSYDSLLNPGSPGGHACPAHPAVGVAGYHSPYLHPGATGDPPRPLPRSFSPVLGPRPREPSPVRYDNLSRTIMASIQERKDREERERLLRSQADSLFGDSGVYDAPSSYSLQQASVLSEGPRGPALRYGSRDDLVAGPGFGGARNPALQTSLSSLSSSVSRAPRTSSSSLQADQASSNAPGPRPSSGSHRSPARQGLPSPPGTPHSPSYAGPKAVAFIHTDLPEPPPSLTVQRGRIGTCTRGWGRRGQPWVPPGLHLCHLGRPEDRPPLRAPWSQAAGAPPRGAMCRLHLAASSLFPSLSGP

SEQ ID NO: 12632 - protein, 387 aa, Homo sapiens
MVGGSVPVFDEIILSTARMNRVLSFHSVSGILVCQAGCVLEELSRYVEERDFIMPLDLGAKGSCHIGGNVATNAGGLRFLRYGSLHGTVLGLEVVLADGTVLDCLTSLRKDNTGYDLKQLFIGSEGTLGIITTVSILCPPKPRAVNVAFLGCPGFAEVLQTFSTCKGMLGEILSAFEFMDAVCMQLVGRHLHLASPVQESPFYVLIETSGSNAGHDAEKLGHFLEHALGSGLVTDGTMATDQRKVKMLWALRERITEALSRDGYVYKYDLSLPVERLYDIVTDLRARLGPHAKHVVGYGHLGDGNLHLNVTAEAFSPSLLAALEPHVYEWTAGQQGSVSAEHGVGFRKRDVLGYSKPPGALQLMQQLKALLDPKGILNPYKTLPSQA

SEQ ID NO: 12633 - protein, 595 aa, Homo sapiens
MLKPGDPGGSAFLKVDPAYLQHWQQLFPHGGAGPLKGSGAAGLLSAPQPLQPPPPPPPPERAEPPPDSLRPRPASLSSASSTPASSSTSASSASSCAAAAAAAALAGLSALPVSQLPVFAPLAAAAVAAEPLPPKELCLGATSGPGPVKCGGGGGGGGEGRGAPRFRCSAEELDYYLYGQQRMEIIPLNQHTSDPNNRCDMCADNRNGECPMHGPLHSLRRLVGTSSAAAAAPPPELPEWLRDLPREVCLCTSTVPGLAYGICAAQRIQQGTWIGPFQGVLLPPEKVQAGAVRNTQHLWEIYDQDGTLQHFIDGGEPSKSSWMRYIRCARHCGEQNLTVVQYRSNIFYRACIDIPRGTELLVWYNDSYTSFFGIPLQCIAQDENLNVPSTVMEAMCRQDALQPFNKSSKLAPTTQQRSVVFPQTPCSRNFSLLDKSGPIESGFNQINVKNQRVLASPTSTSQLHSEFSDWHLWKCGQCFKTFTQRILLQMHVCTQNPDRPYQCGHCSQSFSQPSELRNHVVTHSSDRPFKCGYCGRAFAGATTLNNHIRTHTGEKPFKCERCERSFTQATQLSRHQRMPNECKPITESPESIEVD

SEQ ID NO: 12634 - protein, 893 aa, Homo sapiens
MPAELRQEQSPGSQASLATMPEAPDVLEETVTVEEDPGTPTSHVSIVTSEDGTTRRTETKVTKTVKTVTTRTVRQVPVGPDGLPLLDGGPPLGPFADGALDRHFLLRGGGPVATLSRAYLSSGGGFPEGPEPRDSPSYGSLSRGLGMRPPRAGPLGPGPGDGCFTLPGHREAFPVGPEPGPPGGRSLPERFQAEPYGLEDDTRSLAADDEGGPELEPDYGTATRRRPECGRGLHTRAYEDTADDGGELADERPAFPMVTAPLAQPERGSMGSLDRLVRRSPSVDSARKEPRWRDPELPEVLAMLRHPVDPVKANAAAYLQHLCFENEGVKRRVRQLRGLPLLVALLDHPRAEVRRRACGALRNLSYGRDTDNKAAIRDCGGVPALVRLLRAARDNEVRELVTGTLWNLSSYEPLKMVIIDHGLQTLTHEVIVPHSGWEREPNEDSKPRDAEWTTVFKNTSGCLRNVSSDGAEARRRLRECEGLVDALLHALQSAVGRKDTDNKSVENCVCIMRNLSYHVHKEVPGADRYQEAEPGPLGSAVGSQRRRRDDASCFGGKKAKGKKDGEMDRNFDTLDLPKRTEAAKGFELLYQPEVVRLYLSLLTESRNFNTLEAAAGALQNLSAGNWMWATYIRATVRKERGLPVLVELLQSETDKVVRAVAIALRNLSLDRRNKDLIGSYAMAELVRNVRNAQAPPRPGACLEEDTVVAVLNTIHEIVSDSLDNARSLLQARGVPALVALVASSQSVREAKAASHVLQTVWSYKELRGTLQKDGWTKARFQSAAATAKGPKGALSPGGFDDSTLPLVDKSLEGEKTGSRDVIPMDALGPDGYSTVDRRERRPRGASSAGEASEKEPLKLDPSRKAPPPGPSRPAVRLVDAVGDAKPQPVDSWV

SEQ ID NO: 12635 - protein, 796 aa, Homo sapiens
MAQEAPQEDTSPMALMDKGENELTGSASEESQETTTSTIITTTVITTEQAPALCSVSFSNPEGYIDSSDYPLLPLNNFLECTYNVTVYTGYGVELQVKSVNLSDGELLSIRGVDGPTLTVLANQTLLVEGQVIRSPTNTISVYFRTFQDDGLGTFQLHYQAFMLSCNFPRRPDSGDVTVMDLHSGGVAHFHCHLGYELQGAKMLTCINASKPHWSSQEPICSAPCGGAVHNATIGRVLSPSYPENTNGSQFCIWTIEAPEGQKLHLHFERLLLHDKDRMTVHSGQTNKSALLYDSLQTESVPFEGLLSEGNTIRIEFTSDQARAASTFNIRFEAFEKGHCYEPYIQNGNFTTSDPTYNIGTIVEFTCDPGHSLEQGPAIIECINVRDPYWNDTEPLCRAMCGGELSAVAGVVLSPNWPEPYVEGEDCIWKIHVGEEKRIFLDIQFLNLSNSDILTIYDGDEVMPHILGQYLGNSGPQKLYSSTPDLTIQFHSDPAGLIFGKGQGFIMNYIEVSRNDSCSDLPEIQNGWKTTSHTELVRGARITYQCDPGYDIVGSDTLTCQWDLSWSSDPPFCEKIMYCTDPGEVDHSTRLISDPVLLVGTTIQYTCNPGFVLEGSSLLTCYSRETGTPIWTSRLPHCVSEESLACDNPGLPENGYQILYKRLYLPGESLTFMCYEGFELMGEVTIRCILGQPSHWNGPLPVCKVNQDSFEHALEAEAAAETSLEGGNMALAIFIPVLIISLLLGGAYIYITRCRYYSNLRLPLMYSHPYSQITVETEFDNPIYETGETREYEVSI

SEQ ID NO: 12636 - protein, 387 aa, Homo sapiens
MSLWLGAPVPDIPPDSAVELWKPGAQDASSQAQGGSSCILREEARMPHSAGGTAGVGLEAAEPTALLTRAEPPSEPTEIRPQKRKKGPAPKMLGNELCSVCGDKASGFHYNVLSCEGCKGFFRRSVIKGAHYICHSGGHCPMDTYMRRKCQECRLRKCRQAGMREECVLSEEQIRLKKLKRQEEEQAHATSLPPRASSPPQILPQLSPEQLGMIEKLVAAQQQCNRRSFSDRLRVTVMLLETSRRYNPGSESITFLKDFSYNREDFAKAGLQVEFINPIFEFSRAMNELQLNDAEFALLIAISIFSADRPNVQDQLQVERLQHTYVEALHAYVSIHHPHDRLMFPRMLMKLVSLRTLSSVHSEQVFALRLQDKKLPPLLSEIWDVHE

SEQ ID NO: 12637 - protein, 385 aa, Homo sapiens
MCSEARLARRLRDALREEEPWAVEELLRCGADPNLVLEDGAAAVHLAAGARHPRGLRCLGALLRQGGDPNARSVEALTPLHVAAAWGCRRGLELLLSQGADPALRDQDGLRPLDLALQQGHLECARVLQDLDTRTRTRTRIGAETQEPEPAPGTPGLSGPTDETLDSIALQKQPCRGDNRDIGLEADPGPPSLPVPLETVDKHGSSASPPGHWDYSSDASFVTAVEVSGAEDPASDTPPWAGSLPPTRQGLLHVVHANQRVPRSQGTEAELNARLQALTLTPPNAAGFQSSPSSMPLLDRSPAHSPPRTPTPGASDCHCLWEHQTSIDSDMATLWLTEDEASSTGGREPVGPCRHLPVSTVSDLELLKGLRALGRLRTCQPEPSH

SEQ ID NO: 12638 - protein, 419 aa, Homo sapiens
MGPLSAPPCTQRITWKGVLLTASLLNFWNPPTTAQVTIEAQPPKVSEGKDVLLLVHNLPQNLAGYIWYKGQMTYLYHYITSYVVDGQRIIYGPAYSGRERVYSNASLLIQNVTQEDAGSYTLHIIKRRDGTGGVTGHFTFTLHLETPKPSISSSNLNPREAMEAVILTCDPATPAASYQWWMNGQSLPMTHRLQLSKTNRTLFIFGVTKYIAGPYECEIRNPVSASRSDPVTLNLLPKLSKPYITINNLNPRENKDVLTFTCEPKSKNYTYIWWLNGQSLPVSPRVKRPIENRILILPNVTRNETGPYQCEIRDRYGGIRSDPVTLNVLYGPDLPSIYPSFTYYRSGENLYLSCFAESNPRAQYSWTINGKFQLSGQKLSIPQITTKHSGLYACSVRNSATGKESSKSITVKVSDWILP

SEQ ID NO: 12639 - protein, 1023 aa, Homo sapiens
MPAARPPAAGLRGISLFLALLLGSPAAALERDALPEGDASPLGPYLLPSGAPERGSPGKEHPEERVVTAPPSSSQSAEVLGELVLDGTAPSAHHDIPALSPLLPEEARPKHALPPKKKLPSLKQVNSARKQLRPKATSAATVQRAGSQPASQGLDLLSSSTEKPGPPGDPDPIVASEEASEVPLWLDRKESAVPTTPAPLQISPFTSQPYVAHTLPQRPEPGEPGPDMAQEAPQEDTSPMALMDKGENELTGSASEESQETTTSTIITTTVITTEQAPALCSVSFSNPEGYIDSSDYPLLPLNNFLECTYNVTVYTGYGVELQVKSVNLSDGELLSIRGVDGPTLTVLANQTLLVEGQVIRSPTNTISVYFRTFQDDGLGTFQLHYQAFMLSCNFPRRPDSGDVTVMDLHSGGVAHFHCHLGYELQGAKMLTCINASKPHWSSQEPICSAPCGGAVHNATIGRVLSPSYPENTNGSQFCIWTIEAPEGQKLHLHFERLLLHDKDRMTVHSGQTNKSALLYDSLQTESVPFEGLLSEGNTIRIEFTSDQARAASTFNIRFEAFEKGHCYEPYIQNGNFTTSDPTYNIGTIVEFTCDPGHSLEQGPAIIECINVRDPYWNDTEPLCRAMCGGELSAVAGVVLSPNWPEPYVEGEDCIWKIHVGEEKRIFLDIQFLNLSNSDILTIYDGDEVMPHILGQYLGNSGPQKLYSSTPDLTIQFHSDPAGLIFGKGQGFIMNYIEVSRNDSCSDLPEIQNGWKTTSHTELVRGARITYQCDPGYDIVGSDTLTCQWDLSWSSDPPFCEKIMYCTDPGEVDHSTRLISDPVLLVGTTIQYTCNPGFVLEGSSLLTCYSRETGTPIWTSRLPHCVSEESLACDNPGLPENGYQILYKRLYLPGESLTFMCYEGFELMGEVTIRCILGQPSHWNGPLPVCKVNQDSFEHALEAEAAAETSLEGGNMALAIFIPVLIISLLLGGAYIYITRCRYYSNLRLPLMYSHPYSQITVETEFDNPIYETGETREYEVSI

SEQ ID NO: 12640 - protein, 1523 aa, Homo sapiens
MAAVGSGGYARNDAGEKLPSVMAGVPARRGQSSPPPAPPICLRRRTRLSTASEETVQNRVSLEKVLGITAQNSSGLTCDPGTGHVAYLAGCVVVILDPKENKQQHIFNTARKSLSALAFSPDGKYIVTGENGHRPAVRIWDVEEKNQVAEMLGHKYGVACVAFSPNMKHIVSMGYQHDMVLNVWDWKKDIVVASNKVSCRVIALSFSEDSSYFVTVGNRHVRFWFLEVSTETKVTSTVPLVGRSGILGELHNNIFCGVACGRGRMAGSTFCVSYSGLLCQFNEKRVLEKWINLKVSLSSCLCVSQELIFCGCTDGIVRIFQAHSLHYLANLPKPHYLGVDVAQGLEPSFLFHRKAEAVYPDTVALTFDPIHQWLSCVYKDHSIYIWDVKDINRVGKVWSELFHSSYVWNVEVYPEFEDQRACLPSGSFLTCSSDNTIRFWNLDSSPDSHWQKNIFSNTLLKVVYVENDIQHLQDMSHFPDRGSENGTPMDVKAGVRVMQVSPDGQHLASGDRSGNLRIHELHFMDELVKVEAHDAEVLCLEYSKPETGLTLLASASRDRLIHVLNVEKNYNLEQTLDDHSSSITAIKFAGNRDIQMISCGADKSIYFRSAQQGSDGLHFVRTHHVAEKTTLYDMDIDITQKYVAVACQDRNVRVYNTVNGKQKKCYKGSQGDEGSLLKVHVDPSGTFLATSCSDKSISVIDFYSGECIAKMFGHSEIITSMKFTYDCHHLITVSGDSCVFIWHLGPEITNCMKQHLLEIDHRQQQQHTNDKKRSGHPRQDTYVSTPSEIHSLSPGEQTEDDLEEECEPEEMLKTPSKDSLDPDPRCLLTNGKLPLWAKRLLGDDDVADGLAFHAKRSYQPHGRWAERAGQEPLKTILDAQDLDCYFTPMKPESLENSILDSLEPQSLASLLSESESPQEAGRGHPSFLPQQKESSEASELILYSLEAEVTVTGTDSQYCRKEVEAGPGDQQGDSYLRVSSDSPKDQSPPEDSGESEADLECSFAAIHSPAPPPDPAPRFATSLPHFPGCAGPTEDELSLPEGPSVPSSSLPQTPEQEKFLRHHFETLTESPCRELFPAALGDVEASEAEDHFFNPRLSISTQFLSSLQKASRFTHTFPPRATQCLVKSPEVKLMDRGGSQPRAGTGYASPDRTHVLAAGKAEETLEAWRPPPPCLTSLASCVPASSVLPTDRNLPTPTSAPTPGLAQGVHAPSTCSYMEATASSRARISRSISLGDSEGPIVATLAQPLRRPSSVGELASLGQELQAITTATTPSLDSEGQEPALRSWGNHEARANLRLTLSSACDGLLQPPVDTQPGVTVPAVSFPAPSPVEESALRLHGSAFRPSLPAPESPGLPAHPSNPQLPEARPGIPGGTASLLEPTSGALGLLQGSPARWSEPWVPVEALPPSPLELSRVGNILHRLQTTFQEALDLYRVLVSSGQVDTGQQQARTELVSTFLWIHSQLEAECLVGTSVAPAQALPSPGPPSPPTLYPLASPDLQALLEHYSELLVQAVRRKARGH

SEQ ID NO: 12641 - protein, 720 aa, Homo sapiens
MSEGAAAASPPGAASAAAASAEEGTAAAAAAAAAGGGPDGGGEGAAEPPRELRCSDCIVWNRQQTWLCVVPLFIGFIGLGLSLMLLKWIVVGSVKEYVPTDLVDSKGMGQDPFFLSKPSSFPKAMETTTTTTSTTSPATPSAGGAASSRTPNRISTRLTTITRAPTRFPGHRVPIRASPRSTTARNTAAPATVPSTTAPFFSSSTLGSRPPVPGTPSTQAMPSWPTAAYATSSYLHDSTPSWTLSPFQDAASSSSSSSSSATTTTPETSTSPKFHTTTYSTERSEHFKPCRDKDLAYCLNDGECFVIETLTGSHKHCRCKEGYQGVRCDQFLPKTDSILSDPTDHLGIEFMESEEVYQRQVLSISCIIFGIVIVGMFCAAFYFKSKKQAKQIQEQLKVPQNGKSYSLKASSTMAKSENLVKSHVQLQNYSKVERHPVTALEKMMESSFVGPQSFPEVPSPDRGSQSVKHHRSLSSCCSPGQRSGMLHRNAFRRTPPSPRSRLGGIVGPAYQQLEESRIPDQDTIPCQGIEVRKTISHLPIQLWCVERPLDLKYSSSGLKTQRNTSINMQLPSRETNPYFNSLEQKDLVGYSSTRASSVPIIPSVGLEETCLQMPGISEVKSIKWCKNSYSADVVNVSIPVSDCLIAEQQEVKILLETVQEQIRILTDARRSEDYELASVETEDSASENTAFLPLSPTAKSEREAQFVLRNEIQRDSALTK

SEQ ID NO: 12642 - protein, 1172 aa, Homo sapiens
MSPDVPLLNDYKQDFFLKRFPQTVLGGPRFKLGYCAPPYIYVNQIILFLMPWVWGGVGTLLYQLGILKDYYTAALSGGLMLFTAFVIQFTSLYAKNKSTTVERILTTDILAEEDEHEFTSCTGAETVKFLIPGKKYVANTVFHSILAGLACGLGTWYLLPNRITLLYGSTGGTALLFFFGWMTLCIAEYSLIVNTATETATFQTQDTYEIIPLMRPLYIFFFVSVDLAHRFVVNMPALEHMNQILHILFVFLPFLWALGTLPPPDALLLWAMEQVLEFGLGGSSMSTHLRLLVMFIMSAGTAIASYFIPSTVGVVLFMTGFGFLLSLNLSDMGHKIGTKSKDLPSGPEKHFSWKECLFYIIILVLALLETSLLHHFAGFSQISKSNSQAIVGYGLMILLIILWILREIQSVYIIGIFRNPFYPKDVQTVTVFFEKQTRLMKIGIVRRILLTLVSPFAMIAFLSLDSSLQGLHSVSVCIGFTRAFRMVWQNTENALLETVIVSTVHLISSTDIWWNRSLDTGLRLLLVGIIRDRLIQFISKLQFAVTVLLTSWTEKKQRRKTTATLCILNIVFSPFVLVIIVFSTLLSSPLLPLFTLPVFLVGFPRPIQSWPGAAGTTACVCADTVYYYQMVPRLTAVLQTAMAAGSLGLLLPGSHYLGRFQDRLMWIMILECGYTYCSINIKGLELQETSCHTAEARRVDEVFEDAFEQEYTRVCSLNEHFGNVLTPCTVLPVKLYSDARNVLSGIIDSHENLKEFKGDLIKVLVWILVQYCSKRPGMKENVHNTENKGKAPLMLPALNTLPPPKSPEDIDSLNSETFNDWSDDNIFDDEPTIKKVIEEKHQLKDLPGTNLFIPGSVESQRVGDHSTGTVPENDLYKAVLLGYPAVDKGKQEDMPYIPLMEFSCSHSHLVCLPAEWRTSCMPSSKMKEMSSLFPEDWYQFVLRQLECYHSEEKASNVLEEIAKDKVLKDFYVHTVMTCYFSLFGIDNMAPSPGHILRVYGGVLPWSVALDWLTEKPELFQLALKAFRYTLKLMIDKASLGPIEDFRELIKYLEEYERDWYIGLVSDEKWKEAILQEKPYLFSLGYDSNMGIYTGRVLSLQELLIQVGKLNPEAVRGQWANLSWELLYATNDDEERYSIQAHPLLLRNLTVQAAEPPLGYPIYSSKPLHIHLY

SEQ ID NO: 12643 - protein, 687 aa, Homo sapiens
MAFVWDPLGATVPGPSTRAKSRLRFSKSYSFDVDNGTSAGRSPLDPMTSPGSGLILQANFVHSQRRESFLYRSDSDYDLSPKSMSRNSSIASDIHGDDLIVTPFAQVLASLRTVRNNFAALTNLQDRAPSKRSPMCNQPSINKATITEEAYQKLASETLEELDWCLDQLETLQTRHSVSEMASNKFKRMLNRELTHLSEMSRSGNQVSEFISNTFLDKQHEVEIPSPTQKEKEKKKRPMSQISGVKKLMHSSSLTNSSIPRFGVKTEQEDVLAKELEDVNKWGLHVFRIAELSGNRPLTVIMHTIFQERDLLKTFKIPVDTLITYLMTLEDHYHADVAYHNNIHAADVVQSTHVLLSTPALEAVFTDLEILAAIFASAIHDVDHPGVSNQFLINTNSELALMYNDSSVLENHHLAVGFKLLQEENCDIFQNLTKKQRQSLRKMVIDIVLATDMSKHMNLLADLKTMVETKKVTSSGVLLLDNYSDRIQVLQNMVHCADLSNPTKPLQLYRQWTDRIMEEFFRQGDRERERGMEISPMCDKHNASVEKSQVGFIDYIVHPLWETWADLVHPDAQDILDTLEDNREWYQSTIPQSPSPAPDDPEEGRQGQTEKFQFELTLEEDGESDTEKDSGSQVEEDTSCSDSKTLCTQDSESTEIPLDEQVEEEAVGEEEESQPEACVIDDRSPDT

SEQ ID NO: 12644 - protein, 770 aa, Homo sapiens
MANSMNGRNPGGRGGNPRKGRILGIIDAIQDAVGPPKQAAADRRTVEKTWKLMDKVVRLCQNPKLQLKNSPPYILDILPDTYQHLRLILSKYDDNQKLAQLSENEYFKIYIDSLMKKSKRAIRLFKEGKERMYEEQSQDRRNLTKLSLIFSHMLAEIKAIFPNGQFQGDNFRITKADAAEFWRKFFGDKTIVPWKVFRQCLHEVHQISSGLEAMALKSTIDLTCNDYISVFEFDIFTRLFQPWGSILRNWNFLAVTHPGYMAFLTYDEVKARLQKYSTKPGSYIFRLSCTRLGQWAIGYVTGDGNILQTIPHNKPLFQALIDGSREGFYLYPDGRSYNPDLTGLCEPTPHDHIKVTQEQYELYCEMGSTFQLCKICAENDKDVKIEPCGHLMCTSCLTAWQESDGQGCPFCRCEIKGTEPIIVDPFDPRDEGSRCCSIIDPFGMPMLDLDDDDDREESLMMNRLANVRKCTDRQNSPVTSPGSSPLAQRRKPQPDPLQIPHLSLPPVPPRLDLIQKGIVRSPCGSPTGSPKSSPCMVRKQDKPLPAPPPPLRDPPPPPPERPPPIPPDNRLSRHIHHVESVPSRDPPMPLEAWCPRDVFGTNQLVGCRLLGEGSPKPGITASSNVNGRHSRVGSDPVLMRKHRRHDLPLEGAKVFSNGHLGSEEYDVPPRLSPPPPVTTLLPSIKCTGPLANSLSEKTRDPVEEDDDEYKIPSSHPVSLNSQPSHCHNVKPPVRSCDNGHCMLNGTHGPSSEKKSNIPDLSIYLKGTYRI

SEQ ID NO: 12645 - protein, 927 aa, Homo sapiens
MNSVRAANRRPRRVSRPRPVQQQQQQPPQQPPPQPPQQQPPQQQPPPPPQQQQQQQPPPPPPPPPPLPQERNNVGERDDDVPADMVAEESGPGAQNSPYQLRRKTLLPKRTACPTKNSMEGASTSTTENFGHRAKRARVSGKSQDLSAAPAEQYLQEKLPDEVVLKIFSYLLEQDLCRAACVCKRFSELANDPILWKRLYMEVFEYTRPMMHPEPGKFYQINPEEYEHPNPWKESFQQLYKGAHVKPGFAEHFYSNPARYKGRENMLYYDTIEDALGGVQEAHFDGLIFVHSGIYTDEWIYIESPITMIGAAPGKVADKVIIENTRDSTFVFMEGSEDAYVGYMTIRFNPDDKSAQHHNAHHCLEITVNCSPIIDHCIIRSTCTVGSAVCVSGQGACPTIKHCNISDCENVGLYITDHAQGIYEDNEISNNALAGIWVKNHGNPIIRRNHIHHGRDVGVFTFDHGMGYFESCNIHRNRIAGFEVKAYANPTVVRCEIHHGQTGGIYVHEKGRGQFIENKIYANNFAGVWITSNSDPTIRGNSIFNGNQGGVYIFGDGRGLIEGNDIYGNALAGIQIRTNSCPIVRHNKIHDGQHGGIYVHEKGQGVIEENEVYSNTLAGVWVTTGSTPVLRRNRIHSGKQVGVYFYDNGHGVLEDNDIYNHMYSGVQIRTGSNPKIRRNKIWGGQNGGILVYNSGLGCIEDNEIFDNAMAGVWIKTDSNPTLRRNKIHDGRDGGICIFNGGRGLLEENDIFRNAQAGVLISTNSHPILRKNRIFDGFAAGIEITNHATATLEGNQIFNNRFGGLFLASGVNVTMKDNKIMNNQDAIEKAVSRGQCLYKISSYTSYPMHDFYRCHTCNTTDRNAICVNCIKKCHQGHDVEFIRHDRFFCDCGAGTLSNPCTLAGEPTHDTDTLYDSAPPIESNTLQHN

SEQ ID NO: 12646 - protein, 720 aa, Homo sapiens
MAQEAPQEDTSPMALMDKGENELTGSASEESQETTTSTIITTTVITTEQAPALCSVSFSNPEGYIDSSDYPLLPLNNFLECTYNVTVYTGYGVELQVKSVNLSDGELLSIRGVDGPTLTVLANQTLLVEGQVIRSPTNTISVYFRTFQDDGLGTFQLHYQAFMLSCNFPRRPDSGDVTVMDLHSGGVAHFHCHLGYELQGAKMLTCINASKPHWSSQEPICSAPCGGAVHNATIGRVLSPSYPENTNGSQFCIWTIEAPEGQKLHLHFERLLLHDKDRMTVHSGQTNKSALLYDSLQTESVPFEGLLSEGNTIRIEFTSDQARAASTFNIRFEAFEKGHCYEPYIQNGNFTTSDPTYNIGTIVEFTCDPGHSLEQGPAIIECINVRDPYWNDTEPLCRAMCGGELSAVAGVVLSPNWPEPYVEGEDCIWKIHVGEEKRIFLDIQFLNLSNSDILTIYDGDEVMPHILGQYLGNSGPQKLYSSTPDLTIQFHSDPAGLIFGKGQGFIMNYIEVSRNDSCSDLPEIQNGWKTTSHTELVRGARITYQCDPGYDIVGSDTLTCQWDLSWSSDPPFCEKIMYCTDPGEVDHSTRLISDPVLLVGTTIQYTCNPGFVLEGSSLLTCYSRETGTPIWTSRLPHCVSEAAAETSLEGGNMALAIFIPVLIISLLLGGAYIYITRCRYYSNLRLPLMYSHPYSQITVETEFDNPIYETGETREYEVSI

SEQ ID NO: 12647 - protein, 1113 aa, Homo sapiens
MGPIIVPPGGHSVPSTPPVVTIAPTKTVNGVWRSESRQDAGSRSSSGGRERLIVEPPLPQEKAGGPAIPSHLLSTPYPFGLSPSSVVQDSRFPPLNLQRPVHHVVPPSTVTEDYLRSFRPYHTTDDLRMSSLPPLGLDPATAAAYYHPSYLAPHPFPHPAFRMDDSYCLSALRSPFYPIPTPGSLPPLHPSAMHLHLSGVRYPPELSHSSLAALHSERMSGLSAERLQMDEELRREREREREREREREADREREKEREREREKEREQEKEREREKERERELERQREQRAREKELLAAKALEPSFLPVAELHGLRGHATEERGKPSEQLTPTRAEKLKDAGLQAPKPVQHPLHPVPTPHHTVPSLISNHGIFSLPSSSAATALLIQRTNEEEKWLARQRRLRQEKEDRQSQVSEFRQQVLEQHLDMGRPPVPAEAEHRPESTTRPGPNRHEPGGRDPPQHFGGPPPLISPKPQLHAAPTALWNPVSLMDNTLETRRAESHSLHSHPAAFEPSRQAAVPLVKVERVFCPEKAEEGPRKREPAPLDKYQPPPPPPREGGSLEHQPFLPGPGPFLAELEKSTQTILGQQRASLPQAATFGELSGPLKPGSPYRPPVPRAPDPAYIYDEFLQQRRRLVSKLDLEERRRREAQEKGYYYDLDDSYDESDEEEVRAHLRCVAEQPPLKLDTSSEKLEFLQLFGLTTQQQKEELVAQKRRKRRRMLRERSPSPPTIQSKRQTPSPRLALSTRYSPDEMNNSPNFEEKKKFLTIFNLTHISAEKRKDKERLVEMLRAMKQKALSAAVADSLTNSPRDSPAVSLSEPATQQASLDVEKPVGVAASLSDIPKAAEPGKLEQVRPQELSRVQELAPASGEKARLSEAPGGKKSLSMLHYIRGAAPKDIPVPLSHSTNGKSKPWEPFVAEEFAHQFHESVLQSTQKALQKHKGSVAVLSAEQNHKVDTSVHYNIPELQSSSRAPPPQHNGQQEPPTARKGPPTQELDRDSEEEEEEDDEDGEDEEEVPKRKWQGIEAVFEAYQEHIEEQNLERQVLQTQCRRLEARHYSLSLTAEQLSHSVAELRSQKQKMVSERERLQAELDHLRKCLALPAMHWPRGYLKGYPR

SEQ ID NO: 12648 - protein, 878 aa, Homo sapiens
MATGTGKHKLLSTGPTEPWSIREKLCLASSVMRSGDQNWVSVSRAIKPFAEPGRPPDWFSQKHCASQYSELLETTETPKRKRGEKGEVVETVEDVIVRKLTAERVEELKKVIKETQERYRRLKRDAELIQAGHMDSRLDELCNDIATKKKLEEEEAEVKRKATDAAYQARQAVKTPPRRLPTVMVRSPIDSASPGGDYPLGDLTPTTMEEATSGVNESEMAVASGHLNSTGVLLEVGGVLPMIHGGEIQQTPNTVAASPAASGAPTLSRLLEAGPTQFTTPLASFTTVASEPPVKLVPPPVESVSQATIVMMPALPAPSSAPAVSTTESVAPVSQPDNCVPMEAVGDPHTVTVSMDSSEISMIINSIKEECFRSGVAEAPVGSKAPSIDGKEELDLAEKMDIAVSYTGEELDFETVGDIIAIIEDKVDDHPEVLDVAAVEAALSFCEENDDPQSLPGPWEHPIQQERDKPVPLPAPEMTVKQERLDFEETENKGIHELVDIREPSAEIKVEPAEPEPVISGAEIVAGVVPATSMEPPELRSQDLDEELGSTAAGEIVEADVAIGKGDETPLTNVKTEASPESMLSPSHGSNPIEDPLEAETQHKFEMSDSLKEESGTIFGSQIKDAPGEDEEEDGVSEAASLEEPKEEDQGEGYLSEMDNEPPVSESDDGFSIHNATLQSHTLADSIPSSPASSQFSVCSEDQEAIQAQKIWKKAIMLVWRAAANHRYANVFLQPVTDDIAPGYHSIVQRPMDLSTIKKNIENGLIRSTAEFQRDIMLMFQNAVMYNSSDHDVYHMAVEMQRDVLEQIQQFLATQLIMQTSESGISAKSLRGRDSTRKQDASEKDSVPMGSPAFLLSLFDGGTRGRRCAIEADMKMKK

SEQ ID NO: 12649 - protein, 437 aa, Homo sapiens
MSWSLHPRNLILYFYALLFLSSTCVAYVATRDNCCILDERFGSYCPTTCGIADFLSTYQTKVDKDLQSLEDILHQVENKTSEVKQLIKAIQLTYNPDESSKPNMIDAATLKSRKMLEEIMKYEASILTHDSSIRYLQEIYNSNNQKIVNLKEKVAQLEAQCQEPCKDTVQIHDITGKDCQDIANKGAKQSGLYFIKPLKANQQFLVYCEIDGSGNGWTVFQKRLDGSVDFKKNWIQYKEGFGHLSPTGTTEFWLGNEKIHLISTQSAIPYALRVELEDWNGRTSTADYAMFKVGPEADKYRLTYAYFAGGDAGDAFDGFDFGDDPSDKFFTSHNGMQFSTWDNDNDKFEGNCAEQDGSGWWMNKCHAGHLNGVYYQGGTYSKASTPNGYDNGIIWATWKTRWYSMKKTTMKIIPFNRLTIGEGQQHHLGGAKQAGDV

SEQ ID NO: 12650 - protein, 1071 aa, Homo sapiens
MPAIMTMLADHAARQLLDFSQKLDINLLDNVVNCLYHGEGAQQRMAQEVLTHLKEHPDAWTRVDTILEFSQNMNTKYYGLQILENVIKTRWKILPRNQCEGIKKYVVGLIIKTSSDPTCVEKEKVYIGKLNMILVQILKQEWPKHWPTFISDIVGASRTSESLCQNNMVILKLLSEEVFDFSSGQITQVKSKHLKDSMCNEFSQIFQLCQFVMENSQNAPLVHATLETLLRFLNWIPLGYIFETKLISTLIYKFLNVPMFRNVSLKCLTEIAGVSVSQYEEQFVTLFTLTMMQLKQMLPLNTNIRLAYSNGKDDEQNFIQNLSLFLCTFLKEHDQLIEKRLNLRETLMEALHYMLLVSEVEETEIFKICLEYWNHLAAELYRESPFSTSASPLLSGSQHFDVPPRRQLYLPMLFKVRLLMVSRMAKPEEVLVVENDQGEVVREFMKDTDSINLYKNMRETLVYLTHLDYVDTERIMTEKLHNQVNGTEWSWKNLNTLCWAIGSISGAMHEEDEKRFLVTVIKDLLGLCEQKRGKDNKAIIASNIMYIVGQYPRFLRAHWKFLKTVVNKLFEFMHETHDGVQDMACDTFIKIAQKCRRHFVQVQVGEVMPFIDEILNNINTIICDLQPQQVHTFYEAVGYMIGAQTDQTVQEHLIEKYMLLPNQVWDSIIQQATKNVDILKDPETVKQLGSILKTNVRACKAVGHPFVIQLGRIYLDMLNVYKCLSENISAAIQANGEMVTKQPLIRSMRTVKRETLKLISGWVSRSNDPQMVAENFVPPLLDAVLIDYQRNVPAAREPEVLSTMAIIVNKLGGHITAEIPQIFDAVFECTLNMINKDFEEYPEHRTNFFLLLQAVNSHCFPAFLAIPPTQFKLVLDSIIWAFKHTMRNVADTGLQILFTLLQNVAQEEAAAQSFYQTYFCDILQHIFSVVTDTSHTAGLTMHASILAYMFNLVEEGKISTSLNPGNPVNNQIFLQEYVANLLKSAFPHLQDAQVKLFVTGLFSLNQDIPAFKEHLRDFLVQIKEFAGEDTSDLFLEEREIALRQADEEKHKRQMSVPGIFNPHEIPEEMCD

SEQ ID NO: 12651 - protein, 1324 aa, Homo sapiens
MRHGVAWALLVAAALGLGARGVRGAVALADFYPFGAERGDAVTPKQDDGGSGLRPLSVPFPFFGAEHSGLYVNNNGIISFLKEVSQFTPVAFPIAKDRCVVAAFWADVDNRRAGDVYYREATDPAMLRRATEDVRHYFPELLDFNATWVFVATWYRVTFFGGSSSSPVNTFQTVLITDGKLSFTIFNYESIVWTTGTHASSGGNATGLGGIAAQAGFNAGDGQRYFSIPGSRTADMAEVETTTNVGVPGRWAFRIDDAQVRVGGCGHTTSVCLALRPCLNGGKCIDDCVTGNPSYTCSCLSGFTGRRCHLDVNECASQPCQNGGTCTHGINSFRCQCPAGFGGPTCETAQSPCDTKECQHGGQCQVENGSAVCVCQAGYTGAACEMDVDDCSPDPCLNGGSCVDLVGNYTCLCAEPFKGLRCETGDHPVPDACLSAPCHNGGTCVDADQGYVCECPEGFMGLDCRERVPDDCECRNGGRCLGANTTLCQCPLGFFGLLCEFEITAMPCNMNTQCPDGGYCMEHGGSYLCVCHTDHNASHSLPSPCDSDPCFNGGSCDAHDDSYTCECPRGFHGKHCEKARPHLCSSGPCRNGGTCKEAGGEYHCSCPYRFTGRHCEIGKPDSCASGPCHNGGTCFHYIGKYKCDCPPGFSGRHCEIAPSPCFRSPCVNGGTCEDRDTDFFCHCQAGYMGRRCQAEVDCGPPEEVKHATLRFNGTRLGAVALYACDRGYSLSAPSRIRVCQPHGVWSEPPQCLEIDECRSQPCLHGGSCQDRVAGYLCLCSTGYEGAHCELERDECRAHPCRNGGSCRNLPGAYVCRCPAGFVGVHCETEVDACDSSPCQHGGRCESGGGAYLCVCPESFFGYHCETVSDPCFSSPCGGRGYCLASNGSHSCTCKVGYTGEDCAKELFPPTALKMERVEESGVSISWNPPNGPAARQMLDGYAVTYVSSDGSYRRTDFVDRTRSSHQLQALAAGRAYNISVFSVKRNSNNKNDISRPAVLLARTRPRPVEGFEVTNVTASTISVQWALHRIRHATVSGVRVSIRHPEALRDQATDVDRSVDRFTFRALLPGKRYTIQLTTLSGLRGEEHPTESLATAPTHVWTRPLPPANLTAARVTATSAHVVWDAPTPGSLLEAYVINVTTSQSTKSRYVPNGKLASYTVRDLLPGRRYQLSVIAVQSTELGPQHSEPAHLYIITSPRDGADRRWHQGGHHPRVLKNRPPPARLPELRLLNDHSAPETPTQPPRFSELVDGRGRVSARFGGSPSKAATVRSQPTASAQLENMEEAPKRVSLALQLPEHGSKDIGSESAALVGTLGLTDCSQGP

SEQ ID NO: 12652 - protein, 619 aa, Homo sapiens
MARQPPPPWVHAAFLLCLLSLGGAIEIPMDPSIQNELTQPPTITKQSAKDHIVDPRDNILIECEAKGNPAPSFHWTRNSRFFNIAKDPRVSMRRRSGTLVIDFRSGGRPEEYEGEYQCFARNKFGTALSNRIRLQVSKSPLWPKENLDPVVVQEGAPLTLQCNPPPGLPSPVIFWMSSSMEPITQDKRVSQGHNGDLYFSNVMLQDMQTDYSCNARFHFTHTIQQKNPFTLKVLTTRGVAERTPSFMYPQGTASSQMVLRGMDLLLECIASGVPTPDIAWYKKGGDLPSDKAKFENFNKALRITNVSEEDSGEYFCLASNKMGSIRHTISVRVKAAPYWLDEPKNLILAPGEDGRLVCRANGNPKPTVQWMVNGEPLQSAPPNPNREVAGDTIIFRDTQISSRAVYQCNTSNEHGYLLANAFVSVLDVPPRMLSPRNQLIRVILYNRTRLDCPFFGSPIPTLRWFKNGQGSNLDGGNYHVYENGSLEIKMIRKEDQGIYTCVATNILGKAENQVRLEVKDPTRIYRMPEDQVARRGTTVQLECRVKHDPSLKLTVSWLKDDEPLYIGNRMKKEDDSLTIFGVAERDQGSYTCVASTELDQDLAKAYLTVLGNCPCSPWH

SEQ ID NO: 12653 - protein, 1245 aa, Homo sapiens
MARNCSECKEKRAAHILCTYCNRWLCSSCTEEHRHSPVPGGPFFPRAQKGSPGVNGGPGDFTLYCPLHTQEVLKLFCETCDMLTCHSCLVVEHKEHRHVEEVLQNQRMLLEGVTTQVAHKKSSLQTSAKQIEDRIFEVKHQHRKVENQIKMAKMVLMNELNKQANGLIEELEGITNERKRKLEQQLQSIMVLNRQFEHVQNFINWAVCSKTSVPFLFSKELIVFQMQRLLETSCNTDPGSPWSIRFTWEPNFWTKQLASLGCITTEGGQMSRADAPAYGGLQGSSPFYQSHQSPVAQQEALSHPSHKFQSPAVCSSSVCCSHCSPVSPSLKGQVPPPSIHPAHSFRQPPEMVPQQLGSLQCSALLPREKELACSPHPPKLLQPWLETQPPVEQESTSQRLGQQLTSQPVCIVPPQDVQQGAHAQPTLQTPSIQVQFGHHQKLKLSHFQQQPQQQLPPPPPPLPHPPPPLPPPPQQPHPPLPPSQHLASSQHESPPGPACSQNMDIMHHKFELEEMQKDLELLLQAQQPSLQLSQTKSPQHLQQTIVGQINYIVRQPAPVQSQSQEETLQATDEPPASQGSKPALPLDKNTAAALPQASGEETPLSVPPVDSTIQHSSPNVVRKHSTSLSIMGFSNTLEMELSSTRLERPLEPQIQSVSNLTAGAPQAVPSLLSAPPKMVSSLTSVQNQAMPSLTTSHLQTVPSLVHSTFQSMPNLISDSPQAMASLASDHPQAGPSLMSGHTQAVPSLATCPLQSIPPVSDMQPETGSSSSSGRTSGSLCPRDGADPSLENALCKMESEDSTRFTDLLGQGPIVPGLDAPKDLAIPSELEEPINLSVKKPPLAPVVSTSTALQQYQNPKECENFEQGALELDAKENQSIRAFNSEHKIPYVRLERLKICAASSGEMPVFKLKPQKNDQDGSFLLIIECGTESSSMSIKVSQDRLSEATQAPGLEGRKVTVTSLAGQRPPEVEGTSPEEHRLIPRTPGAKKGPPAPIENEDFCAVCLNGGELLCCDRCPKVFHLSCHVPALLSFPGGEWVCTLCRSLTQPEMEYDCENACYNQPGMRASPGLSMYDQKKCEKLVLSLCCNNLSLPFHEPVSPLARHYYQIIKRPMDLSIIRRKLQKKDPAHYTTPEEVVSDVRLMFWNCAKFNYPDSEVAEAGRCLEVFFEGWLKEIYPEKRFAQPRQEDSDSEEVSSESGCSTPQGFPWPPYMQEGIQPKRRRRHMENERAKRMSFRLANSISQV

SEQ ID NO: 12654 - protein, 324 aa, Homo sapiens
MGNLLKVLTCTDLEQGPNFFLDFENAQPTESEKEIYNQVNVVLKDAEGILEDLQSYRGAGHEIREAIQHPADEKLQEKAWGAVVPLVGKLKKFYEFSQRLEAALRGLLGALTSTPYSPTQHLEREQALAKQFAEILHFTLRFDELKMTNPAIQNDFSYYRRTLSRMRINNVPAEGENEVNNELANRMSLFYAEATPMLKTLSDATTKFVSENKNLPIENTTDCLSTMASVCRVMLETPEYRSRFTNEETVSFCLRVMVGVIILYDHVHPVGAFAKTSKIDMKGCIKVLKDQPPNSVEGLLNALRYTTKHLNDETTSKQIKSMLQ

SEQ ID NO: 12655 - protein, 1257 aa, Homo sapiens
MENSERAEEMQENYQRNGTAEEQPKLRKEAVGSIEIFRFADGLDITLMILGILASLVNGACLPLMPLVLGEMSDNLISGCLVQTNTTNYQNCTQSQEKLNEDMTLLTLYYVGIGVAALIFGYIQISLWIITAARQTKRIRKQFFHSVLAQDIGWFDSCDIGELNTRMTDDIDKISDGIGDKIALLFQNMSTFSIGLAVGLVKGWKLTLVTLSTSPLIMASAAACSRMVISLTSKELSAYSKAGAVAEEVLSSIRTVIAFRAQEKELQRYTQNLKDAKDFGIKRTIASKVSLGAVYFFMNGTYGLAFWYGTSLILNGEPGYTIGTVLAVFFSVIHSSYCIGAAVPHFETFAIARGAAFHIFQVIDKKPSIDNFSTAGYKPESIEGTVEFKNVSFNYPSRPSIKILKGLNLRIKSGETVALVGLNGSGKSTVVQLLQRLYDPDDGFIMVDENDIRALNVRHYRDHIGVVSQEPVLFGTTISNNIKYGRDDVTDEEMERAAREANAYDFIMEFPNKFNTLVGEKGAQMSGGQKQRIAIARALVRNPKILILDEATSALDSESKSAVQAALEKASKGRTTIVVAHRLSTIRSADLIVTLKDGMLAEKGAHAELMAKRGLYYSLVMSQDIKKADEQMESMTYSTERKTNSLPLHSVKSIKSDFIDKAEESTQSKEISLPEVSLLKILKLNKPEWPFVVLGTLASVLNGTVHPVFSIIFAKIITMFGNNDKTTLKHDAEIYSMIFVILGVICFVSYFMQGLFYGRAGEILTMRLRHLAFKAMLYQDIAWFDEKENSTGGLTTILAIDIAQIQGATGSRIGVLTQNATNMGLSVIISFIYGWEMTFLILSIAPVLAVTGMIETAAMTGFANKDKQELKHAGKIATEALENIRTIVSLTREKAFEQMYEEMLQTQHRNTSKKAQIIGSCYAFSHAFIYFAYAAGFRFGAYLIQAGRMTPEGMFIVFTAIAYGAMAIGETLVLAPEYSKAKSGAAHLFALLEKKPNIDSRSQEGKKPDTCEGNLEFREVSFFYPCRPDVFILRGLSLSIERGKTVAFVGSSGCGKSTSVQLLQRLYDPVQGQVLFDGVDAKELNVQWLRSQIAIVPQEPVLFNCSIAENIAYGDNSRVVPLDEIKEAANAANIHSFIEGLPEKYNTQVGLKGAQLSGGQKQRLAIARALLQKPKILLLDEATSALDNDSEKVVQHALDKARTGRTCLVVTHRLSAIQNADLIVVLHNGKIKEQGTHQELLRNRDIYFKLVNAQSVQ

SEQ ID NO: 12656 - protein, 280 aa, Homo sapiens
MTGGAREKAHIARSPATAQGPALGEALPHVVPTLRACLQPSQDPQMRLKLFSILSTVLLRATDTINSQGQFPSYLETVTKDILAPNLQWHAGRTAAAIRTAAVSCLWALTSSEVLSAEQIRDVQETLMPQVLTTLEEDSKMTRLISCRIINTFLKTSGGMTDPEKLIRIYPELLKRLDDVSNDVRMAAASTLVTWLQCVKGANAKSYYQSSVQYLYRELLVHLDDPERAIQDAILEVLKEGSGLFPDLLVRETEAVIHKHRSATYCEQLLQHVQAVPATQ

SEQ ID NO: 12657 - protein, 250 aa, Homo sapiens
MTLSPLLLFLPPLLLLLDVPTAAVQASPLQALDFFGNGPPVNYKTGNLYLRGPLKKSNAPLVNVTLYYEALCGGCRAFLIRELFPTWLLVMEILNVTLVPYGNAQEQNVSGRWEFKCQHGEEECKFNKVEACVLDELDMELAFLTIVCMEEFEDMERSLPLCLQLYAPGLSPDTIMECAMGDRGMQLMHANAQRTDALQPPHEYVPWVTVNGKPLEDQTQLLTLVCQLYQGKKPDVCPSSTSSLRSVCFK

SEQ ID NO: 12658 - protein, 1393 aa, Homo sapiens
RDLSENQIQGIPRKAFRGITDVKNLQLDNNHISCIEDGAFRALRDLEILTLNNNNISRILVTSFNHMPKIRTLRLHSNHLYCDCHLAWLSDWLRQRRTVGQFTLCMAPVHLRGFNVADVQKKEYVCPAPHSEPPSCNANSISCPSPCTCSNNIVDCRGKGLMEIPANLPEGIVEIRLEQNSIKAIPAGAFTQYKKLKRIDISKNQISDIAPDAFQGLKSLTSLVLYGNKITEIVKGLFDGLVSLQLLLLNANKINCLRVNTFQDLQNLNLLSLYDNKLQTISKGLFAPLQSIQTLHLAQNPFVCDCHLKWLADYLQDNPIETSGARCSSPRRLANKRISQIKSKKFRCSGSEDYRSRFSSECFMDLVCPEKCRCEGTIVDCSNQKLVRIPSHLPEYVTDLRLNDNEVSVLEATGIFKKLPNLRKINLSNNKIKEVREGAFDGAASVQELMLTGNQLETVHGRVFRGLSGLKTLMLRSNLIGCVSNDTFAGLSSVRLLSLYDNRITTITPGAFTTLVSLSTINLLSNPFNCNCHLAWLGKWLRKRRIVSGNPRCQKPFFLKEIPIQDVAIQDFTCDGNEESSCQLSPRCPEQCTCMETVVRCSNKGLRALPRGMPKDVTELYLEGNHLTAVPRELSALRHLTLIDLSNNSISMLTNYTFSNMSHLSTLILSYNRLRCIPVHAFNGLRSLRVLTLHGNDISSVPEGSFNDLTSLSHLALGTNPLHCDCSLRWLSEWVKAGYKEPGIARCSSPEPMADRLLLTTPTHRFQCKVLWFCCPGPVDINIVAKCNACLSSPCKNNGTCTQDPVELYRCACPYSYKGKDCTVPINTCIQNPCQHGGTCHLSDSHKDGFSCSCPLGFEGQRCEINPDDCEDNDCENNATCVDGINNYVCICPPNYTGELCDEVIDHCVPELNLCQHEAKCIPLDKGFSCECVPGYSGKLCETDNDDCVAHKCRHGAQCVDTINGYTCTCPQGFSGPFCEHPPPMVLLQTSPCDQYECQNGAQCIVVQQEPTCRCPPGFAGPRCEKLITVNFVGKDSYVELASAKVRPQANISLQVATDKDNGILLYKGDNDPLALELYQGHVRLVYDSLSSPPTTVYSVETVNDGQFHSVELVTLNQTLNLVVDKGTPKSLGKLQKQPAVGINSPLYLGGIPTSTGLSALRQGTDRPLGGFHGCIHEVRINNELQDFKALPPQSLGVSPGCKSCTVCKHGLCRSVEKDSVVCECRPGWTGPLCDQEARDPCLGHRCHHGKCVATGTSYMCKCAEGYGGDLCDNKNDSANACSAFKCHHGQCHISDQGEPYCLCQPGFSGEHCQQENPCLGQVVREVIRRQKGYASCATASKVPIMECRGGCGPQCCQPTRSKRRKYVFQCTDGSSFVEEVERHLECGCLACS

SEQ ID NO: 12659 - protein, 439 aa, Homo sapiens
MDAKSLTAWSRTLVTFKDVFVDFTREEWKLLDTAQQIVYRNVMLENYKNLVSLGYQLTKPDVILRLEKGEEPWLVEREIHQETHPDSETAFEIKSSVSSRSIFKDKQSCDIKMEGMARNDLWYLSLEEVWKCRDQLDKYQENPERHLRHQLIHTGEKPYECKECGKSFSRSSHLIGHQKTHTGEEPYECKECGKSFSWFSHLVTHQRTHTGDKLYTCNQCGKSFVHSSRLIRHQRTHTGEKPYECPECGKSFRQSTHLILHQRTHVRVRPYECNECGKSYSQRSHLVVHHRIHTGLKPFECKDCGKCFSRSSHLYSHQRTHTGEKPYECHDCGKSFSQSSALIVHQRIHTGEKPYECCQCGKAFIRKNDLIKHQRIHVGEETYKCNQCGIIFSQNSPFIVHQIAHTGEQFLTCNQCGTALVNTSNLIGYQTNHIRENAY

SEQ ID NO: 12660 - protein, 634 aa, Homo sapiens
MTEEACRTRSQKRALERDPTEDDVESKKIKMERGLLASDLNTDGDMRVTPEPGAGPTQGLLRATEATAMAMGRGEGLVGDGPVDMRTSHSDMKSERRPPSPDVIVLSDNEQPSSPRVNGLTTVALKETSTEALMKSSPEERERMIKQLKEELRLEEAKLVLLKKLRQSQIQKEATAQKPTGSVGSTVTTPPPLVRGTQNIPAGKPSLQTSSARMPGSVIPPPLVRGGQQASSKLGPQASSQVVMPPLVRGAQQIHSIRQHSSTGPPPLLLAPRASVPSVQIQGQRIIQQGLIRVANVPNTSLLVNIPQPTPASLKGTTATSAQANSTPTSVASVVTSAESPASRQAAAKLALRKQLEKTLLEIPPPKPPAPEMNFLPSAANNEFIYLVGLEEVVQNLLETQAGRMSAATVLSREPYMCAQCKTDFTCRWREEKSGAIMCENCMTTNQKKALKVEHTSRLKAAFVKALQQEQEIEQRLLQQGTAPAQAKAEPTAAPHPVLKQVIKPRRKLAFRSGEARDWSNGAVLQASSQLSRGSATTPRGVLHTFSPSPKLQNSASATALVSRTGRHSERTVSAGKGSATSNWKKTPLSTGGTLAFVSPSLAVHKSSSAVDRQREYLLDMIPPRSIPQSATWK

SEQ ID NO: 12661 - protein, 348 aa, Homo sapiens
MNMTQARVLVAAVVGLVAVLLYASIHKIEEGHLAVYYRGGALLTSPSGPGYHIMLPFITTFRSVQTTLQTDEVKNVPCGTSGGVMIYIDRIEVVNMLAPYAVFDIVRNYTADYDKTLIFNKIHHELNQFCSAHTLQEVYIELFDQIDENLKQALQKDLNLMAPGLTIQAVRVTKPKIPEAIRRNFELMEAEKTKLLIAAQKQKVVEKEAETERKKAVIEAEKIAQVAKIRFQQKVMEKETEKRISEIEDAAFLAREKAKADAEYYAAHKYATSNKHKLTPEYLELKKYQAIASNSKIYFGSNIPNMFVDSSCALKYSDIRTGRESSLPSKEALEPSGENVIQNKESTG

SEQ ID NO: 12662 - protein, 965 aa, Homo sapiens
MYNMRRLSLSPTFSMGFHLLVTVSLLFSHVDHVIAETEMEGEGNETGECTGSYYCKKGVILPIWEPQDPSFGDKIARATVYFVAMVYMFLGVSIIADRFMSSIEVITSQEKEITIKKPNGETTKTTVRIWNETVSNLTLMALGSSAPEILLSVIEVCGHNFTAGDLGPSTIVGSAAFNMFIIIALCVYVVPDGETRKIKHLRVFFVTAAWSIFAYTWLYIILSVISPGVVEVWEGLLTFFFFPICVVFAWVADRRLLFYKYVYKRYRAGKQRGMIIEHEGDRPSSKTEIEMDGKVVNSHVENFLDGALVLEVDERDQDDEEARREMARILKELKQKHPDKEIEQLIELANYQVLSQQQKSRAFYRIQATRLMTGAGNILKRHAADQARKAVSMHEVNTEVTENDPVSKIFFEQGTYQCLENCGTVALTIIRRGGDLTNTVFVDFRTEDGTANAGSDYEFTEGTVVFKPGDTQKEIRVGIIDDDIFEEDENFLVHLSNVKVSSEASEDGILEANHVSTLACLGSPSTATVTIFDDDHAGIFTFEEPVTHVSESIGIMEVKVLRTSGARGNVIVPYKTIEGTARGGGEDFEDTCGELEFQNDEIVKIITIRIFDREEYEKECSFSLVLEEPKWIRRGMKGGFTITGKYLFGQPVFRKVHAREHPILSTVITIADEYDDKQPLTSKEEEERRIAEMGRPILGEHTKLEVIIEESYEFKSTVDKLIKKTNLALVVGTNSWREQFIEAITVSAGEDDDDDECGEEKLPSCFDYVMHFLTVFWKVLFAFVPPTEYWNGWACFIVSILMIGLLTAFIGDLASHFGCTIGLKDSVTAVVFVALGTSVPDTFASKVAATQDQYADASIGNVTGSNAVNVFLGIGVAWSIAAIYHAANGEQFKVSPGTLAFSVTLFTIFAFINVGVLLYRRRPEIGGELGGPRTAKLLTSCLFVLLWLLYIFFSSLEAYCHIKGF

SEQ ID NO: 12663 - protein, 803 aa, Homo sapiens
MTNQEKWAHLSPSEFSQLQKYAEYSTKKLKDVLEEFHGNGVLAKYNPEGKQDILNQTIDFEGFKLFMKTFLEAELPDDFTAHLFMSFSNKFPHSSPMVKSKPALLSGGLRMNKGAITPPRTTSPANTCSPEVIHLKDIVCYLSLLERGRPEDKLEFMFRLYDTDGNGFLDSSELENIISQMMHVAEYLEWDVTELNPILHEMMEEIDYDHDGTVSLEEWIQGGMTTIPLLVLLGLENNVKDDGQHVWRLKHFNKPAYCNLCLNMLIGVGKQGLCCSFCKYTVHERCVARAPPSCIKTYVKSKRNTDVMHHYWVEGNCPTKCDKCHKTVKCYQGLTGLHCVWCQITLHNKCASHLKPECDCGPLKDHILPPTTICPVVLTLPTSGVSVPEERQSTVKKEKSGSQQPNKVIDKNKMQRANSVTVDGQGLQVTPVPGTHPLLVFVNPKSGGKQGERIYRKFQYLLNPRQVYSLSGNGPMPGLNFFRDVPDFRVLACGGDGTVGWVLDCIEKANVGKHPPVAILPLGTGNDLARCLRWGGGYEGENLMKILKDIENSTEIMLDRWKFEVIPNDKDEKGDPVPYSIINNYFSIGVDASIAHRFHIMREKHPEKFNSRMKNKFWYFEFGTSETFSATCKKLHESVEIECDGVQIDLINISLEGIAILNIPSMHGGSNLWGESKKRRSHRRIEKKGSDKRTTVTDAKELKFASQDLSDQLLEVVGLEGAMEMGQIYTGLKSAGRRLAQCSCVVIRTSKSLPMQIDGEPWMQTPCTIKITHKNQAPMLMGPPPKTGLFCSLVKRTRNRSKE

SEQ ID NO: 12664 - protein, 400 aa, Homo sapiens
MRHLGAFLFLLGVLGALTEMCEIPEMDSHLVEKLGQHLLPWMDRLSLEHLNPSIYVGLRLSSLQAGTKEDLYLHSLKLGYQQCLLGSAFSEDDGDCQGKPSMGQLALYLLALRANWHDHKGHPHTSYYQYGLGILALCLHQKRVHDSVVDKLLYAVEPFHQGHHSVDTAAMAGLAFTCLKRSNFNPGRRQRITMAIRTVREEILKAQTPEGHFGNVYSTPLALQFLMTSPMRGAELGTACLKARVALLASLQDGAFQNALMISQLLPVLNHKTYIDLIFPDCLAPRVMLEPAAETIPQTQEIISVTLQVLSLLPPYRQSISVLAGSTVEDVLKKAHELGGFTYETQASLSGPYLTSVMGKAAGEREFWQLLRDPNTPLLQGIADYRPKDGETIELRLVSW

SEQ ID NO: 12665 - protein, 3574 aa, Homo sapiens
MWPRLAFCCWGLALVSGWATFQQMSPSRNFSFRLFPETAPGAPGSIPAPPAPGDEAAGSRVERLGQAFRRRVRLLRELSERLELVFLVDDSSSVGEVNFRSELMFVRKLLSDFPVVPTATRVAIVTFSSKNYVVPRVDYISTRRARQHKCALLLQEIPAISYRGGGTYTKGAFQQAAQILLHARENSTKVVFLITDGYSNGGDPRPIAASLRDSGVEIFTFGIWQGNIRELNDMASTPKEEHCYLLHSFEEFEALARRALHEDLPSGSFIQDDMVHCSYLCDEGKDCCDRMGSCKCGTHTGHFECICEKGYYGKGLQYECTACPSGTYKPEGSPGGISSCIPCPDENHTSPPGSTSPEDCVCREGYRASGQTCELVHCPALKPPENGYFIQNTCNNHFNAACGVRCHPGFDLVGSSIILCLPNGLWSGSESYCRVRTCPHLRQPKHGHISCSTREMLYKTTCLVACDEGYRLEGSDKLTCQGNSQWDGPEPRCVERHCSTFQMPKDVIISPHNCGKQPAKFGTICYVSCRQGFILSGVKEMLRCTTSGKWNVGVQAAVCKDVEAPQINCPKDIEAKTLEQQDSANVTWQIPTAKDNSGEKVSVHVHPAFTPPYLFPIGDVAIVYTATDLSGNQASCIFHIKVIDAEPPVIDWCRSPPPVQVSEKVHAASWDEPQFSDNSGAELVITRSHTQGDLFPQGETIVQYTATDPSGNNRTCDIHIVIKGSPCEIPFTPVNGDFICTPDNTGVNCTLTCLEGYDFTEGSTDKYYCAYEDGVWKPTYTTEWPDCAKKRFANHGFKSFEMFYKAARCDDTDLMKKFSEAFETTLGKMVPSFCSDAEDIDCRLEENLTKKYCLEYNYDYENGFAIGPGGWGAANRLDYSYDDFLDTVQETATSIGNAKSSRIKRSAPLSDYKIKLIFNITASVPLPDERNDTLEWENQQRLLQTLETITNKLKRTLNKDPMYSFQLASEILIADSNSLETKKASPFCRPGSVLRGRMCVNCPLGTYYNLEHFTCESCRIGSYQDEEGQLECKLCPSGMYTEYIHSRNISDCKAQCKQGTYSYSGLETCESCPLGTYQPKFGSRSCLSCPENTSTVKRGAVNISACGVPCPEGKFSRSGLMPCHPCPRDYYQPNAGKAFCLACPFYGTTPFAGSRSITECSSFSSTFSAAEESVVPPASLGHIKKRHEISSQVFHECFFNPCHNSGTCQQLGRGYVCLCPLGYTGLKCETDIDECSPLPCLNNGVCKDLVGEFICECPSGYTGQRCEENINECSSSPCLNKGICVDGVAGYRCTCVKGFVGLHCETEVNECQSNPCLNNAVCEDQVGGFLCKCPPGFLGTRCGKNVDECLSQPCKNGATCKDGANSFRCLCAAGFTGSHCELNINECQSNPCRNQATCVDELNSYSCKCQPGFSGKRCETEQSTGFNLDFEVSGIYGYVMLDGMLPSLHALTCTFWMKSSDDMNYGTPISYAVDNGSDNTLLLTDYNGWVLYVNGREKITNCPSVNDGRWHHIAITWTSANGIWKVYIDGKLSDGGAGLSVGLPIPGMLGGGALVLGQEQDKKGEGFSPAESFVGSISQLNLWDYVLSPQQVKSLATSCPEELSKGNVLAWPDFLSGIVGKVKIDSKSIFCSDCPRLGGSVPHLRTASEDLKPGSKVNLFCDPGFQLVGNPVQYCLNQGQWTQPLPHCERISCGVPPPLENGFHSADDFYAGSTVTYQCNNGYYLLGDSRMFCTDNGSWNGVSPSCLDVDECAVGSDCSEHASCLNVDGSYICSCVPPYTGDGKNCAEPIKCKAPGNPENGHSSGEIYTVGAEVTFSCQEGYQLMGVTKITCLESGEWNHLIPYCKAVSCGKPAIPENGCIEELAFTFGSKVTYRCNKGYTLAGDKESSCLANSSWSHSPPVCEPVKCSSPENINNGKYILSGLTYLSTASYSCDTGYSLQGPSIIECTASGIWDRAPPACHLVFCGEPPAIKDAVITGNNFTFRNTVTYTCKEGYTLAGLDTIECLADGKWSRSDQQCLAVSCDEPPIVDHASPETAHRLFGDIAFYYCSDGYSLADNSQLLCNAQGKWVPPEGQDMPRCIAHFCEKPPSVSYSILESVSKAKFAAGSVVSFKCMEGFVLNTSAKIECMRGGQWNPSPMSIQCIPVRCGEPPSIMNGYASGSNYSFGAMVAYSCNKGFYIKGEKKSTCEATGQWSSPIPTCHPVSCGEPPKVENGFLEHTTGRIFESEVRYQCNPGYKSVGSPVFVCQANRHWHSESPLMCVPLDCGKPPPIQNGFMKGENFEVGSKVQFFCNEGYELVGDSSWTCQKSGKWNKKSNPKCMPAKCPEPPLLENQLVLKELTTEVGVVTFSCKEGHVLQGPSVLKCLPSQQWNDSFPVCKIVLCTPPPLISFGVPIPSSALHFGSTVKYSCVGGFFLRGNSTTLCQPDGTWSSPLPECVPVECPQPEEIPNGIIDVQGLAYLSTALYTCKPGFELVGNTTTLCGENGHWLGGKPTCKAIECLKPKEILNGKFSYTDLHYGQTVTYSCNRGFRLEGPSALTCLETGDWDVDAPSCNAIHCDSPQPIENGFVEGADYSYGAIIIYSCFPGFQVAGHAMQTCEESGWSSSIPTCMPIDCGLPPHIDFGDCTKLKDDQGYFEQEDDMMEVPYVTPHPPYHLGAVAKTWENTKESPATHSSNFLYGTMVSYTCNPGYELLGNPVLICQEDGTWNGSAPSCISIECDLPTAPENGFLRFTETSMGSAVQYSCKPGHILAGSDLRLCLENRKWSGASPRCEAISCKKPNPVMNGSIKGSNYTYLSTLYYECDPGYVLNGTERRTCQDDKNWDEDEPICIPVDCSSPPVSANGQVRGDEYTFQKEIEYTCNEGFLLEGARSRVCLANGSWSGATPDCVPVRCATPPQLANGVTEGLDYGFMKEVTFHCHEGYILHGAPKLTCQSDGNWDAEIPLCKPVNCGPPEDLAHGFPNGFSFIHGGHIQYQCFPGYKLHGNSSRRCLSNGSWSGSSPSCLPCRCSTPVIEYGTVNGTDFDCGKAARIQCFKGFKLLGLSEITCEADGQWSSGFPHCEHTSCGSLPMIPNAFISETSSWKENVITYSCRSGYVIQGSSDLICTEKGVWSQPYPVCEPLSCGSPPSVANAVATGEAHTYESEVKLRCLEGYTMDTDTDTFTCQKDGRWFPERISCSPKKCPLPENITHILVHGDDFSVNRQVSVSCAEGYTFEGVNISVCQLDGTWEPPFSDESCSPVSCGKPESPEHGFVVGSKYTFESTIIYQCEPGYELEGNRERVCQENRQWSGGVAICKETRCETPLEFLNGKADIENRTTGPNVVYSCNRGYSLEGPSEAHCTENGTWSHPVPLCKPNPCPVPFVIPENALLSEKEFYVDQNVSIKCREGFLLQGHGIITCNPDETWTQTSAKCEKISCGPPAHVENAIARGVHYQYGDMITYSCYSGYMLEGFLRSVCLENGTWTSPPICRAVCRFPCQNGGICQRPNACSCPEGWMGRLCEEPICILPCLNGGRCVAPYQCDCPPGWTGSRCHTAVCQSPCLNGGKCVRPNRCHCLSSWTGHNCSRKRRTGF

SEQ ID NO: 12666 - protein, 452 aa, Homo sapiens
MSRESDVEAQQSHGSSACSQPHGSVTQSQGSSSQSQGISSSSTSTMPNSSQSSHSSSGTLSSLETVSTQELYSIPEDQEPEDQEPEEPTPAPWARLWALQDGFANLVFVFFDLTVDDQSVYPKALRDEYIMSKTLGSGACGEVKLAFERKTCKKVAIKIISKRKFAIGSAREADPALNVETEIEILKKLNHPCIIKIKNFFDAEDYYIVLELMEGGELFDKVVGNKRLKEATCKLYFYQMLLAVQYLHENGIIHRDLKPENVLLSSQEEDCLIKITDFGHSKILGETSLMRTLCGTPTYLAPEVLVSVGTAGYNRAVDCWSLGVILFICLSGYPPFSEHRTQVSLKDQITSGKYNFIPEVWAEVSEKALDLVKKLLVVDPKARFTTEEALRHPWLQDEDMKRKFQDLLSEENESTALPQVLAQPSTSRKRPREGEAEGAETTKRPAVCAAVL

SEQ ID NO: 12667 - protein, 286 aa, Homo sapiens
MEDRHVSLPSFNQLFGLSDPVNRAYFAVFDGHGGVDAARYAAVHVHTNAARQPELPTDPEGALREAFRRTDQMFLRKAKRERLQSGTTGVCALIAGATLHVAWLGDSQVILVQQGQVVKLMEPHRPERQDEKARIEALGGFVSHMDCWRVNGTLAVSRAIGDVFQKPYVSGEADAASRALTGSEDYLLLACDGFFDVVPHQEVVGLVQSHLTRQQGSGLRVAEELVAAARERGSHDNITVMVVFLRDPQELLEGGNQGEGDPQAEGRRQDLPSSLPEPETQAPPRS

SEQ ID NO: 12668 - protein, 810 aa, Homo sapiens
MANSMNGRNPGGRGGNPRKGRILGIIDAIQDAVGPPKQAAADRRTVEKTWKLMDKVVRLCQNPKLQLKNSPPYILDILPDTYQHLRLILSKYDDNQKLAQLSENEYFKIYIDSLMKKSKRAIRLFKEGKERMYEEQSQDRRNLTKLSLIFSHMLAEIKAIFPNGQFQGDNFRITKADAAEFWRKFFGDKTIVPWKVFRQCLHEVHQISSGLEAMALKSTIDLTCNDYISVFEFDIFTRLFQPWGSILRNWNFLAVTHPGYMAFLTYDEVKARLQKYSTKPGSYIFRLSCTRLGQWAIGYVTGDGNILQTIPHNKPLFQALIDGSREGFYLYPDGRSYNPDLTGLCEPTPHDHIKVTQEQYELYCEMGSTFQLCKICAENDKDVKIEPCGHLMCTSCLTAWQESDGQGCPFCRCEIKGTEPIIVDPFDPRDEGSRCCSIIDPFGMPMLDLDDDDDREESLMMNRLANVRKCTDRQNSPVTSPGSSPLAQRRKPQPDPLQIPHLSLPPVPPRLDLIQKGIVRSPCGSPTGSPKSSPCMVRKQDKPLPAPPPPLRDPPPPPPERPPPIPPDNRLSRHIHHVESVPSRDPPMPLEAWCPRDVFGTNQLVGCRLLGEGSPKPGITASSNVNGRHSRVGSDPVLMRKHRRHDLPLEGAKVFSNGHLGSEEYDVPPRLSPPPPVTTLLPSIKCTGPLANSLSEKTRDPVEEDDDEYKIPSSHPVSLNSQPSHCHNVKPPVRSCDNGHCMLNGTHGPSSEKKSNIPDLSIYLKGDVFDSASDPVPLPPARPPTRDNPKHGSSLNRTPSDYDLLIPPLG

SEQ ID NO: 12669 - protein, 992 aa, Homo sapiens
MDGFAGSLDDSISAASTSDVQDRLSALESRVQQQEDEITVLKAALADVLRRLAISEDHVASVKKSVSSKGQPSPRAVIPMSCITNGSGANRKPSHTSAVSIAGKETLSSAAKSGTEKKKEKPQGQREKKEESHSNDQSPQIRASPSPQPSSQPLQIHRQTPESKNATPTKSIKRPSPAEKSHNSWENSDDSRNKLSKIPSTPKLIPKVTKTADKHKDVIINQAKMSTREKNSQEGEYIKMFMRGRPITMFIPSDVDNYDDIRTELPPEKLKLEWAYGYRGKDCRANVYLLPTGKIVYFIASVVVLFNYEERTQRHYLGHTDCVKCLAIHPDKIRIATGQIAGVDKDGRPLQPHVRVWDSVTLSTLQIIGLGTFERGVGCLDFSKADSGVHLCIIDDSNEHMLTVWDWQKKAKGAEIKTTNEVVLAVEFHPTDANTIITCGKSHIFFWTWSGNSLTRKQGIFGKYEKPKFVQCLAFLGNGDVLTGDSGGVMLIWSKTTVEPTPGKGPKGVYQISKQIKAHDGSVFTLCQMRNGMLLTGGGKDRKIILWDHDLNPEREIEVPDQYGTIRAVAEGKADQFLVGTSRNFILRGTFNDGFQIEVQGHTDELWGLATHPFKDLLLTCAQDRQVCLWNSMEHRLEWTRLVDEPGHCADFHPSGTVVAIGTHSGRWFVLDAETRDLVSIHTDGNEQLSVMRYSIDGTFLAVGSHDNFIYLYVVSENGRKYSRYGRCTGHSSYITHLDWSPDNKYIMSNSGDYEILYWDIPNGCKLIRNRSDCKDIDWTTYTCVLGFQVFGVWPEGSDGTDINALVRSHNRKVIAVADDFCKVHLFQYPCSKAKAPSHKYSAHSSHVTNVSFTHNDSHLISTGGKDMSIIQWKLVEKLSLPQNETVADTTLTKAPVSSTESVIQSNTPTPPPSQPLNETAEEESRISSSPTLLENSLEQTVEPSEDHSEEESEEGSGDLGEPLYEEPCNEISKEQAKATLLEDQQDPSPSS

SEQ ID NO: 12670 - protein, 769 aa, Homo sapiens
MAQWNQLQQLDTRYLEQLHQLYSDSFPMELRQFLAPWIESQDWAYAASKESHATLVFHNLLGEIDQQYSRFLQESNVLYQHNLRRIKQFLQSRYLEKPMEIARIVARCLWEESRLLQTAATAAQQGGQANHPTAAVVTEKQQMLEQHLQDVRKRVQDLEQKMKVVENLQDDFDFNYKTLKSQGDMQDLNGNNQSVTRQKMQQLEQMLTALDQMRRSIVSELAGLLSAMEYVQKTLTDEELADWKRRQQIACIGGPPNICLDRLENWITSLAESQLQTRQQIKKLEELQQKVSYKGDPIVQHRPMLEERIVELFRNLMKSAFVVERQPCMPMHPDRPLVIKTGVQFTTKVRLLVKFPELNYQLKIKVCIDKDSGDVAALRGSRKFNILGTNTKVMNMEESNNGSLSAEFKHLTLREQRCGNGGRANCDASLIVTEELHLITFETEVYHQGLKIDLETHSLPVVVISNICQMPNAWASILWYNMLTNNPKNVNFFTKPPIGTWDQVAEVLSWQFSSTTKRGLSIEQLTTLAEKLLGPGVNYSGCQITWAKFCKENMAGKGFSFWVWLDNIIDLVKKYILALWNEGYIMGFISKERERAILSTKPPGTFLLRFSESSKEGGVTFTWVEKDISGKTQIQSVEPYTKQQLNNMSFAEIIMGYKIMDATNILVSPLVYLYPDIPKEEAFGKYCRPESQEHPEADPGAAPYLKTKFICVTPTTCSNTIDLPMSPRTLDSLMQFGNNGEGAEPSAGGQFESLTFDMELTSECATSPM

SEQ ID NO: 12671 - protein, 265 aa, Homo sapiens
MCTSETFQALDTFEARHDDIVLASYPKCGSNWILHIVSELIYAVSKKKYKYPEFPVLECGDSEKYQRMKGFPSPRILATHLHYDKLPGSIFENKAKILVIFRNPKDTAVSFLHFHNDVPDIPSYGSWDEFFRQFMKGQVSWGRYFDFAINWNKHLDGDNVKFILYEDLKENLAAGIKQIAEFLGFFLTGEQIQTISVQSTFQAMRAKSQDTHGAVGPFLFRKGEVGDWKNLFSEIQNQEMDEKFKECLAGTSLGAKLKYESYCQG

SEQ ID NO: 12672 - protein, 922 aa, Homo sapiens
MASPGHSDLGEVAPEIKASERRTAVAIADLEWREMEGDDCEFRYGDGTNEAQDNDFPTVERSRLQEMLSLLGLETYQVQKLSLQDSLQISFDSMKNWAPQVPKDLPWNFLRKLQALNADARNTTMVLDVLPDARPVEKESQMEEEIIYWDPADDLAADIYSFSELPTPDTPVNPLDLLCALLLSSDSFLQQEIALKMALCQFALPLVLPDSENHYHTFLLWAMRGIVRTWWSQPPRGMGSFREDSVVLSRAPAFAFVRMDVSSNSKSQLLNAVLSPGHRQWDCFWHRDLNLGTNAREISDGLVEISWFFPSGREDLDIFPEPVAFLNLRGDIGSHWLQFKLLTEISSAVFILTDNISKKEYKLLYSMKESTTKYYFILSPYRGKRNTNLRFLNKLIPVLKIDHSHVLVKVSSTDSDSFVKRIRAIVGNVLRAPCRRVSVEDMAHAARKLGLKVDEDCEECQKAKDRMERITRKIKDSDAYRRDELRLQGDPWRKAAQVEKEFCQLQWAVDPPEKHRAELRRRLLELRMQQNGHDPSSGVQEFISGISSPSLSEKQYFLRWMEWGLARVAQPRLRQPPETLLTLRPKHGGTTDVGEPLWPEPLGVEHFLREMGQFYEAESCLVEAGRLPAGQRRFAHFPGLASELLLTGLPLELIDGSTLSMPVRWVTGLLKELHVRLERRSRLVVLSTVGVPGTGKSTLLNTMFGLRFATGKSCGPRGAFMQLITVAEGFSQDLGCDHILVIDSGGLIGGALTSAGDRFELEASLATLLMGLSNVTVISLAETKDIPAAILHAFLRLEKTGHMPNYQFVYQNLHDVSVPGPRPRDKRQLLDPPGDLSRAAAQMEKQGDGFRALAGLAFCDPEKQHIWHIPGLWHGAPPMAAVSLAYSEAIFELKRCLLENIRNGLSNQNKNIQQLIELVRRL

SEQ ID NO: 12673 - protein, 625 aa, Homo sapiens
MIFLYQVVHFILFTSVSGECVTQLLKDTCFEGGDITTVFTPSAKYCQVVCTYHPRCLLFTFTAESPSEDPTRWFTCVLKDSVTETLPRVNRTAAISGYSFKQCSHQISACNKDIYVDLDMKGINYNSSVAKSAQECQERCTDDVHCHFFTYATRQFPSLEHRNICLLKHTQTGTPTRITKLDKVVSGFSLKSCALSNLACIRDIFPNTVFADSNIDSVMAPDAFVCGRICTHHPGCLFFTFFSQEWPKESQRNLCLLKTSESGLPSTRIKKSKALSGFSLQSCRHSIPVFCHSSFYHDTDFLGEELDIVAAKSHEACQKLCTNAVRCQFFTYTPAQASCNEGKGKCYLKLSSNGSPTKILHGRGGISGYTLRLCKMDNECTTKIKPRIVGGTASVRGEWPWQVTLHTTSPTQRHLCGGSIIGNQWILTAAHCFYGVESPKILRVYSGILNQSEIKEDTSFFGVQEIIIHDQYKMAESGYDIALLKLETTVNYTDSQRPICLPSKGDRNVIYTDCWVTGWGYRKLRDKIQNTLQKAKIPLVTNEECQKRYRGHKITHKMICAGYREGGKDACKGDSGGPLSCKHNEVWHLVGITSWGEGCAQRERPGVYTNVVEYVDWILEKTQAV

SEQ ID NO: 12674 - protein, 148 aa, Homo sapiens
MFIKVMFGAGCSVLVNTSCRLVNLTAHLRQKAGLPPDATIALLAEDGNLVSLEEDLKEGASRAQTMGNSLLKERAIYVLVRIIKGEDMASTRYESLLENLDDHYPELAEELRRLSGLSSVGHNWRKRMGTRRGRHEQSPTSRPRKGPD

SEQ ID NO: 12675 - protein, 720 aa, Homo sapiens
MPVPWFLLSLALGRSPVVLSLERLVGPQDATHCSPGLSCRLWDSDILCLPGDIVPAPGPVLAPTHLQTELVLRCQKETDCDLCLRVAVHLAVHGHWEEPEDEEKFGGAADSGVEEPRNASLQAQVVLSFQAYPTARCVLLEVQVPAALVQFGQSVGSVVYDCFEAALGSEVRIWSYTQPRYEKELNHTQQLPDCRGLEVWNSIPSCWALPWLNVSADGDNVHLVLNVSEEQHFGLSLYWNQVQGPPKPRWHKNLTGPQIITLNHTDLVPCLCIQVWPLEPDSVRTNICPFREDPRAHQNLWQAARLQLLTLQSWLLDAPCSLPAEAALCWRAPGGDPCQPLVPPLSWENVTVDKVLEFPLLKGHPNLCVQVNSSEKLQLQECLWADSLGPLKDDVLLLETRGPQDNRSLCALEPSGCTSLPSKASTRAARLGEYLLQDLQSGQCLQLWDDDLGALWACPMDKYIHKRWALVWLACLLFAAALSLILLLKKDHAKGWLRLLKQDVRSGAAARGRAALLLYSADDSGFERLVGALASALCQLPLRVAVDLWSRRELSAQGPVAWFHAQRRQTLQEGGVVVLLFSPGAVALCSEWLQDGVSGPGAHGPHDAFRASLSCVLPDFLQGRAPGSYVGACFDRLLHPDAVPALFRTVPVFTLPSQLPDFLGALQQPRAPRSGRLQERAEQVSRALQPALDSYFHPPGTPAPGRGVGPGAGPGAGDGT

SEQ ID NO: 12676 - protein, 287 aa, Homo sapiens
MSWDPNPVPRTLRCWRLRRASETALQSSRRAVEDQLKICGHRRDADVFELFLSKKELTEVIDLSRFKKLKYLWLHHNKLHGITFLTRNYCLTELYLNNNAIFEIEGLHYLPSLHILLLHHNELTNIDATVKELKGMLNLKILSLYQNPLCQYNLYRLYIIYHLPGVELLDRNQVTEKERRSMITIFNHKKAHIVQSIAFGGKVDASWDPKSPFKQKPAQRVPSDFAFANNVDKTVLDDPEDAVFVRSMKRSVMTLTSMNWDTVPTREERYLEEEGTETAQMLTVTLR

SEQ ID NO: 12677 - protein, 331 aa, Homo sapiens
MCSHFDADEIKRLGKRFKKLDLDNSGSLSVEEFMSLPELQQNPLVQRVIDIFDTDGNGEVDFKEFIEGVSQFSVKGDKEQKLRFAFRIYDMDKDGYISNGELFQVLKMMVGNNLKDTQLQQIVDKTIINADKDGDGRISFEEFCARGGKTGLFAGLASSVSMRPASPPSPAADSCSACRFFARRPPLRVTWVKPSSALALCVSISDSIPGNLKALPAETRAQLHHAEASLSQPPLQLRPFPKTSQAGDLQDLGPYVCVRKAVGKGDKQIRAVVKEHSVRSQERIWHYPGITTANMPGHLGQNTESGRDKLPMFGVWFPGCRFWGLWVWRLP

SEQ ID NO: 12678 - protein, 515 aa, Homo sapiens
MAKSNGENGPRAPAAGESLSGTRESLAQGPDAATTDELSSLGSDSEANGFAERRIDKFGFIVGSQGAEGAPCPLLHRLEEVPLEVLRQRESKWLDMLNNWDKWMAKKHKKIRLRCQKGIPPSLRGRAWQYLSGGKVKLQQNPGKFDELDMSPGDPKWLDVIERDLHRQFPFHEMFVSRGGHGQQDLFRVLKAYTLYRPEEGYCQAQAPIAAVLLMHMPAEQAFWCLVQICEKYLPGYYSEKLEAIQLDGEILFSLLQKVSPVAHKHLSRQKIDPLLYMTEWFMCAFSRTLPWSSVLRVWDMFFCEGVKIIFRVGLVLLKHALGSPEKVKACQGQYETIERLRSLSPKIMQEAFLVQEVVELPVTERQIEREHLIQLRRWQETRGELQCRSPPRLHGAKAILDAEPGPRPALQPSPSIRLPLDAPLPGSKAKPKPPKQAQKEQRKQMKGRGQLEKPPAPNQAMVVAAAGDACPPQHVPPKDSAPKDSAPQDLAPQVSAHHRSQESLTSQESEDTYL

SEQ ID NO: 12679 - protein, 218 aa, Homo sapiens
MTSEFFAAQLRAQISDDTTHPISYYKPEFYTPDDGGTAHLSVVAEDGSAVSATSTINLYFGSKVRSPVSGILFNNEMDDFSSPSITNEFGVPPSPANFIQPGKQPLSSMCPTIMVGQDGQPPSHADHTPMPQAIIYNLWFGYDVKRAVEEPRLHNQLLPNVTTVERNIDQAVTAALETRHHHTQIASTFIAVVQAIVRTAGGWAAASDSRKGGEPAGY

SEQ ID NO: 12680 - protein, 252 aa, Homo sapiens
MTSEFFAAQLRAQISDDTTHPISYYKPEFYTPDDGGTAHLSVVAEDGSAVSATSTINLYFGSKVRSPVSGILFNNEMDDFSSPSITNEFGVPPSPANFIQPGKQPLSSMCPTIMVGQDGQVRMVVGAAGGTQITTATALVCVTPFLPGRAHPAQPPSHADHTPMPQAIIYNLWFGYDVKRAVEEPRLHNQLLPNVTTVERNIDQAVTAALETRHHHTQIASTFIAVVQAIVRTAGGWAAASDSRKGGEPAGY

SEQ ID NO: 12681 - protein, 1507 aa, Homo sapiens
MGTALLQRGGCFLLCLSLLLLGCWAELGSGLEFPGAEGQWTRFPKWNACCESEMSFQLKTRSARGLVLYFDDEGFCDFLELILTRGGRLQLSFSIFCAEPATLLADTPVNDGAWHSVRIRRQFRNTTLFIDQVEAKWVEVKSKRRDMTVFSGLFVGGLPPELRAAALKLTLASVREREPFKGWIRDVRVNSSQVLPVDSGEVKLDDEPPNSGGGSPCEAGEEGEGGVCLNGGVCSVVDDQAVCDCSRTGFRGKDCSQEDNNVEGLAHLMMGDQGKSKGKEEYIATFKGSEYFCYDLSQNPIQSSSDEITLSFKTLQRNGLMLHTGKSADYVNLALKNGAVSLVINLGSGAFEALVEPVNGKFNDNAWHDVKVTRNLRQHSGIGHAMVTISVDGILTTTGYTQEDYTMLGSDDFFYVGGSPSTADLPGSPVSNNFMGCLKEVVYKNNDVRLELSRLAKQGDPKMKIHGVVAFKCENVATLDPITFETPESFISLPKWNAKKTGSISFDFRTTEPNGLILFSHGKPRHQKDAKHPQMIKVDFFAIEMLDGHLYLLLDMGSGTIKIKALLKKVNDGEWYHVDFQRDGRSGTISVNTLRTPYTAPGESEILDLDDELYLGGLPENKAGLVFPTEVWTALLNYGYVGCIRDLFIDGQSKDIRQMAEVQSTAGVKPSCSKETAKPCLSNPCKNNGMCRDGWNRYVCDCSGTGYLGRSCEREATVLSYDGSMFMKIQLPVVMHTEAEDVSLRFRSQRAYGILMATTSRDSADTLRLELDAGRVKLTVNLDCIRINCNSSKGPETLFAGYNLNDNEWHTVRVVRRGKSLKLTVDDQQAMTGQMAGDHTRLEFHNIETGIITERRYLSSVPSNFIGHLQSLTFNGMAYIDLCKNGDIDYCELNARFGFRNIIADPVTFKTKSSYVALATLQAYTSMHLFFQFKTTSLDGLILYNSGDGNDFIVVELVKGYLHYVFDLGNGANLIKGSSNKPLNDNQWHNVMISRDTSNLHTVKIDTKITTQITAGARNLDLKSDLYIGGVAKETYKSLPKLVHAKEGFQGCLASVDLNGRLPDLISDALFCNGQIERGCEGPSTTCQEDSCSNQGVCLQQWDGFSCDCSMTSFSGPLCNDPGTTYIFSKGGGQITYKWPPNDRPSTRADRLAIGFSTVQKEAVLVRVDSSSGLGDYLELHIHQGKIGVKFNVGTDDIAIEESNAIINDGKYHVVRFTRSGGNATLQVDSWPVIERYPAGNNDNERLAIARQRIPYRLGRVVDEWLLDKGRQLTIFNSQATIIIGGKEQGQPFQGQLSGLYYNGLKVLNMAAENDANIAIVGNVRLVGEVPSSMTTESTATAMQSEMSTSIMETTTTLATSTARRGKPPTKEPISQTTDDILVASAECPSDDEDIDPCEPSSGGLANPTRAGGREPYPGSAEVIRESSSTTGMVVGIVAAAALCILILLYAMYKYRNRDEGSYHVDESRNYISNSAQSNGAVVKEKQPSSAKSSNKNKKNKDKEYYV

SEQ ID NO: 12682 - protein, 2223 aa, Homo sapiens
MAESASPPSSSAAAPAAEPGVTTEQPGPRSPPSSPPGLEEPLDGADPHVPHPDLAPIAFFCLRQTTSPRNWCIKMVCNPWFECVSMLVILLNCVTLGMYQPCDDMDCLSDRCKILQVFDDFIFIFFAMEMVLKMVALGIFGKKCYLGDTWNRLDFFIVMAGMVEYSLDLQNINLSAIRTVRVLRPLKAINRVPSMRILVNLLLDTLPMLGNVLLLCFFVFFIFGIIGVQLWAGLLRNRCFLEENFTIQGDVALPPYYQPEEDDEMPFICSLSGDNGIMGCHEIPPLKEQGRECCLSKDDVYDFGAGRQDLNASGLCVNWNRYYNVCRTGSANPHKGAINFDNIGYAWIVIFQVITLEGWVEIMYYVMDAHSFYNFIYFILLIIVGSFFMINLCLVVIATQFSETKQREHRLMLEQRQRYLSSSTVASYAEPGDCYEEIFQYVCHILRKAKRRALGLYQALQSRRQALGPEAPAPAKPGPHAKEPRHYHGKTKGQGDEGRHLGSRHCQTLHGPASPGNDHSGRELCPQHSPLDATPHTLVQPIPATLASDPASCPCCQHEDGRRPSGLGSTDSGQEGSGSGSSAGGEDEADGDGARSSEDGASSELGKEEEEEEQADGAVWLCGDVWRETRAKLRGIVDSKYFNRGIMMAILVNTVSMGIEHHEQPEELTNILEICNVVFTSMFALEMILKLAAFGLFDYLRNPYNIFDSIIVIISIWEIVGQADGGLSVLRTFRLLRVLKLVRFMPALRRQLVVLMKTMDNVATFCMLLMLFIFIFSILGMHIFGCKFSLRTDTGDTVPDRKNFDSLLWAIVTVFQILTQEDWNVVLYNGMASTSPWASLYFVALMTFGNYVLFNLLVAILVEGFQAEGDANRSYSDEDQSSSNIEEFDKLQEGLDSSGDPKLCPIPMTPNGHLDPSLPLGGHLGPAGAAGPAPRLSLQPDPMLVALGSRKSSVMSLGRMSYDQRSLSSSRSSYYGPWGRSAAWASRRSSWNSLKHKPPSAEHESLLSAERGGGARVCEVAADEGPPRAAPLHTPHAHHIHHGPHLAHRHRHHRRTLSLDNRDSVDLAELVPAVGAHPRAAWRAAGPAPGHEDCNGRMPSIAKDVFTKMGDRGDRGEDEEEIDYTLCFRVRKMIDVYKPDWCEVREDWSVYLFSPENRFRVLCQTIIAHKLFDYVVLAFIFLNCITIALERPQIEAGSTERIFLTVSNYIFTAIFVGEMTLKVVSLGLYFGEQAYLRSSWNVLDGFLVFVSIIDIVVSLASAGGAKILGVLRVLRLLRTLRPLRVISRAPGLKLVVETLISSLKPIGNIVLICCAFFIIFGILGVQLFKGKFYHCLGVDTRNITNRSDCMAANYRWVHHKYNFDNLGQALMSLFVLASKDGWVNIMYNGLDAVAVDQQPVTNHNPWMLLYFISFLLIVSFFVLNMFVGVVVENFHKCRQHQEAEEARRREEKRLRRLEKKRRKAQRLPYYATYCHTRLLIHSMCTSHYLDIFITFIICLNVVTMSLEHYNQPTSLETALKYCNYMFTTVFVLEAVLKLVAFGLRRFFKDRWNQLDLAIVLLSVMGITLEEIEINAALPINPTIIRIMRVLRIARVLKLLKMATGMRALLDTVVQALPQVGNLGLLFMLLFFIYAALGVELFGKLVCNDENPCEGMSRHATFENFGMAFLTLFQVSTGDNWNGIMKDTLRDCTHDERSCLSSLQFVSPLYFVSFVLTAQFVLINVVVAVLMKHLDDSNKEAQEDAEMDAELELEMAHGLGPGPRLPTGSPGAPGRGPGGAGGGGDTEGGLCRRCYSPAQENLWLDSVSLIIKDSLEGELTIIDNLSGSIFHHYSSPAGCKKCHHDKQEVQLAETEAFSLNSDRSSSILLGDDLSLEDPTACPPGRKDSKGELDPPEPMRVGDLGECFFPLSSTAVSPDPENFLCEMEEIPFNPVRSWLKHDSSQAPPSPFSPDASSPLLPMPAEFFHPAVSASQKGPEKGTGTGTLPKIALQGSWASLRSPRVNCTLLRQATGSDTSLDASPSSSAGSLQTTLEDSLTLSDSPRRALGPPAPAPGPRAGLSPAARRRLSLRGRGLFSLRGLRAHQRSHSSGGSTSPGCTHHDSMDPSDEEGRGGAGGGGAGSEHSETLSSLSLTSLFCPPPPPPAPGLTPARKFSSTSSLAAPGRPHAAALAHGLARSPSWAADRSKDPPGRAPLPMGLGPLAPPPQPLPGELEPGDAASKRKR

SEQ ID NO: 12683 - protein, 412 aa, Homo sapiens
MGTEGPPPPAASRGRQGCLLVPARTKTTIALLYDEESENAYDIRLKLTKEVLTIQKQDVVCVGGSHQGRNAPSSPSSPIAKDPRYEKRWLDTLSVPLSMARISRYKAGTEKLRWNAFEVLALDGVSSGILRFYTAQDGTDWLRAVSANIRELTLQNMKMANKCCSPSDQVVHMGWVNEKLQGADSSQTFRPKFLALKGPSFYVFSTPPVSTFDWVRAERTYHLCEVLFKVHKFWLTEDCWLQANLYLGLQDFDFEDQRPYCFSIVAGHGKSHVFNVELGSELAMWEKSFQRATFMEVQRTGSRTYMCSWQGEMLCFTVDFALGFTCFESKTKNVLWRFKFSQLKGSSDDGKTRVKLLFQNLDTKQIETKELEFQDLRAVLHCIHSFIAAKVASVDPGFMDSQSLARKYMYSS

SEQ ID NO: 12684 - protein, 380 aa, Homo sapiens
MAVTEASLLRQCPLLLPQNRSKTVYEGFISAQGRDFHLRIVLPEDLQLKNARLLCSWQLRTILSGYHRIVQQRMQHSPDLMSFMMELKMLLEVALKNRQELYALPPPPQFYSSLIEEIGTLGWDKLVYADTCFSTIKLKAEDASGREHLITLKLKAKYPAESPDYFVDFPVPFCASWTPQVNSPQSSLISIYSQFLAAIESLKAFWDVMDEIDEKTWVLEPEKPPRSATARRIALGNNVSINIEVDPRHPTMLPECFFLGADHVVKPLGIKLSRNIHLWDPENSVLQNLKDVLEIDFPARAILEKSDFTMDCGICYAYQLDGTIPDQVCDNSQCGQPFHQICLYEWLRGLLTSRQSFNIIFGECPYCSKPITLKMSGRKH

SEQ ID NO: 12685 - protein, 937 aa, Homo sapiens
MISAPDVVAFTKEEEYEEEPYNEPALPEEYSVPLFPFASQGANPWSKLSGAKFSRDFILISEFSEQVGPQPLLTIPNDTKVFGTFDLNYFSLRIMSVDYQASFVGHPPGSAYPKLNFVEDSKVVLGDSKEGAFAYVHHLTLYDLEARGFVRPFCMAYISADQHKIMQQFQELSAEFSRASECLKTGNRKAFAGELEKKLKDLDYTRTVLHTETEIQKKANDKGFYSSQAIEKANELASVEKSIIEHQDLLKQIRSYPHRKLKGHDLCPGEMEHIQDQASQASTTSNPDESADTDLYTCRPAYTPKLIKAKSTKCFDKKLKTLEELCDTEYFTQTLAQLSHIEHMFRGDLCYLLTSQIDRALLKQQHITNFLFEDFVEVDDRMVEKQESIPSKPSQDRPPSSSLEECPIPKVLISVGSYKSSVESVLIKMEQELGDEEYKEVEVTELSSFDPQENLDYLDMDMKGSISSGESIEVLGTEKSTSVLSKSDSQASLTVPLSPQVVRSKAVSHRTISEDSIEVLSTCPSEALIPDDFKASYPSAINEEESYPDGNEGAIRFQASISPPELGETEEGSIENTPSQIDSSCCIGKESDGQLVLPSTPAHTHSDEDGVVSSPPQRHRQKDQGFRVDFSVENANPSSRDNSCEGFPAYELDPSHLLASRDISKTSLDNYSDTTSYVSSVASTSSDRIPSAYPAGLSSDRHKKRAGQNALKFIRQYPFAHPAIYSLLSGRTLVVLGEDEAIVRKLVTALAIFVPSYGCYAKPVKHWASSPLHIMDFQKWKLIGLQRVASPAGAGTLHALSRYSRYTSILDLDNKTLRCPLYRGTLVPRLADHRTQIKRGSTYYLHVQSMLTQLCSKAFLYTFCHHLHLPTHDKETEELVASRQMSFLKLTLGLVNEDVRVVQYLAELLKLHYMQESPGTSHPMLRFDYVPSFLYKI

SEQ ID NO: 12686 - protein, 529 aa, Homo sapiens
MGPSCPVFLSFTKLSLWWLLLTPAGGEEAKRPPPRAPGDPLSSPSPTALPQGGSHTETEDRLFKHLFRGYNRWARPVPNTSDVVIVRFGLSIAQLIDVDEKNQMMTTNVWLKQEWSDYKLRWNPTDFGNITSLRVPSEMIWIPDIVLYNNADGEFAVTHMTKAHLFSTGTVHWVPPAIYKSSCSIDVTFFPFDQQNCKMKFGSWTYDKAKIDLEQMEQTVDLKDYWESGEWAIVNATGTYNSKKYDCCAEIYPDVTYAFVIRRLPLFYTINLIIPCLLISCLTVLVFYLPSDCGEKITLCISVLLSLTVFLLLITEIIPSTSLVIPLIGEYLLFTMIFVTLSIVITVFVLNVHHRSPSTHTMPHWVRGALLGCVPRWLLMNRPPPPVELCHPLRLKLSPSYHWLESNVDAEEREVVVEEEDRWACAGHVAPSVGTLCSHGHLHSGASGPKAEALLQEGELLLSPHMQKALEGVHYIADHLRSEDADSSVKEDWKYVAMVIDRIFLWLFIIVCFLGTIGLFLPPFLAGMI

SEQ ID NO: 12687 - protein, 796 aa, Homo sapiens
MTNQEKWAHLSPSEFSQLQKYAEYSTKKLKDVLEEFHGNGVLAKYNPEGTIDFEGFKLFMKTFLEAELPDDFTAHLFMSFSNKFPHSSPMVKSKPALLSGGLRMNKGAITPPRTTSPANTCSPEVIHLKDIVCYLSLLERGRPEDKLEFMFRLYDTDGNGFLDSSELENIISQMMHVAEYLEWDVTELNPILHEMMEEIDYDHDGTVSLEEWIQGGMTTIPLLVLLGLENNVKDDGQHVWRLKHFNKPAYCNLCLNMLIGVGKQGLCCSFCKYTVHERCVARAPPSCIKTYVKSKRNTDVMHHYWVEGNCPTKCDKCHKTVKCYQGLTGLHCVWCQITLHNKCASHLKPECDCGPLKDHILPPTTICPVVLTLPTSGVSVPEERQSTVKKEKSGSQQPNKVIDKNKMQRANSVTVDGQGLQVTPVPGTHPLLVFVNPKSGGKQGERIYRKFQYLLNPRQVYSLSGNGPMPGLNFFRDVPDFRVLACGGDGTVGWVLDCIEKANVGKHPPVAILPLGTGNDLARCLRWGGGYEGENLMKILKDIENSTEIMLDRWKFEVIPNDKDEKGDPVPYSIINNYFSIGVDASIAHRFHIMREKHPEKFNSRMKNKFWYFEFGTSETFSATCKKLHESVEIECDGVQIDLINISLEGIAILNIPSMHGGSNLWGESKKRRSHRRIEKKGSDKRTTVTDAKELKFASQDLSDQLLEVVGLEGAMEMGQIYTGLKSAGRRLAQCSCVVIRTSKSLPMQIDGEPWMQTPCTIKITHKNQAPMLMGPPPKTGLFCSLVKRTRNRSKE

SEQ ID NO: 12688 - protein, 423 aa, Homo sapiens
MSTRNCQGMDSVIKPLDTIPEDKKVRVQRTQSTFDPFEKPANQVKRVHSENNACINFKTSSTGKESPKVRRHSSPSSPTSPKFGKADSYEKLEKLGEGSYATVYKGKSKVNGKLVALKVIRLQEEEGTPFTAIREASLLKGLKHANIVLLHDIIHTKETLTLVFEYVHTDLCQYMDKHPGGLHPDNVKLFLFQLLRGLSYIHQRYILHRDLKPQNLLISDTGELKLADFGLARAKSVPSHTYSNEVVTLWYRPPDVLLGSTEYSTCLDMWGVGCIFVEMIQGVAAFPGMKDIQDQLERIFLVLGTPNEDTWPGVHSLPHFKPERFTLYSSKNLRQAWNKLSYVNHAEDLASKLLQCSPKNRLSAQAALSHEYFSDLPPRLWELTDMSSIFTVPNVRLQPEAGESMRAFGKNNSYGKSLSNSKH

SEQ ID NO: 12689 - protein, 571 aa, Homo sapiens
MGKCLSCCKEDQSFQRCSPEDQVSTDAQHRGASSISQPSISLGHKTSYSPVTHKVNAAKASRRLLSVSSPSFSERRYSLFVGFQKRNASPYWQQSRANFDSEEDTGFTDIKSSSDHCGSFISRRRRFSSRKLSIVSYYKSAIFFDPQASGQNVFNLNEIEIFSKTSSNTDAKKHITISAPEYNTKNFKNFETNTTSPAFGNTIDTASYQQSTSSFFSLASDISSPDQQNGIANDIQQRGQLCKDLKDFLHPRPESYSTDHSPIMIPQHPSQSGTFPFLHKAGFSSSYKNSGCFIPPQSELTSGLFEDEDFAVLFQDEDRSSPIEIPKIRYITANTDTEEQSFPVPKAFNTRVEELNLDVLLQKVDHLRMSESGKSESFELLRDHKEKFRDEIEFMWRFARAYGDMYELSTNTQEKKHYANIGKTLSERAINRAPMNGHCHLWYAVLCGYVSEFEGLQNKINYGHLFKEHLDIAIKLLPEEPFLYYLKGRYCYTVSKLSWIEKKMAATLFGKIPSSTVQEALHNFLKAEELCPGYSNPNYMYLAKCYTDLEENQNALKFCNLALLLPTVTKE

SEQ ID NO: 12690 - protein, 420 aa, Homo sapiens
MLNNWDKWMAKKHKKIRLRCQKGIPPSLRGRAWQYLSGGKVKLQQNPGKFDELDMSPGDPKWLDVIERDLHRQFPFHEMFVSRGGHGQQDLFRVLKAYTLYRPEEGYCQAQAPIAAVLLMHMPAEQAFWCLVQICEKYLPGYYSEKLEAIQLDGEILFSLLQKVSPVAHKHLSRQKIDPLLYMTEWFMCAFSRTLPWSSVLRVWDMFFCEGVKIIFRVGLVLLKHALGSPEKVKACQGQYETIERLRSLSPKIMQEAFLVQEVVELPVTERQIEREHLIQLRRWQETRGELQCRSPPRLHGAKAILDAEPGPRPALQPSPSIRLPLDAPLPGSKAKPKPPKQAQKEQRKQMKGRGQLEKPPAPNQAMVVAAAGDACPPQHVPPKDSAPKDSAPQDLAPQVSAHHRSQESLTSQESEDTYL

SEQ ID NO: 12691 - protein, 327 aa, Homo sapiens
MAPSTAVSVVSDSIKVQPLLISADNKVIIIQPQVQTQPESTAESRPPTEEPSQGAQATKKKKEDRPPTQENPEKIAFMVALGLVTTEHLEEIQSKRQERKRRSTANPAYSGLLETERKRLASNYLNNPLFLTARANEDPCWKNEITHDEHCAACKRGANLQPCGTCPGAYHLSCLEPPLKTAPKGVWVCPRCQQKALKKDEGVPWTGMLAIVHSYVTHKTVKEEEKQKLLQRGSELQNEHQQLEERDRRLASAVQKCLELKTSLLARQRGTQSSLDRLRALLRLIQGEQLLQVTMTTTSPAPLLAGPWTKPSVAATHPTVQHPQGHN

SEQ ID NO: 12692 - protein, 384 aa, Homo sapiens
MKPHFRNTVERMYRDTFSYNFYNRPILSRRNTVWLCYEVKTKGPSRPPLDAKIFRGQVYSELKYHPEMRFFHWFSKWRKLHRDQEYEVTWYISWSPCTKCTRDMATFLAEDPKVTLTIFVARLYYFWDPDYQEALRSLCQKRDGPRATMKIMNYDEFQHCWSKFVYSQRELFEPWNNLPKYYILLHIMLGEILRHSMDPPTFTFNFNNEPWVRGRHETYLCYEVERMHNDTWVLLNQRRGFLCNQAPHKHGFLEGRHAELCFLDVIPFWKLDLDQDYRVTCFTSWSPCFSCAQEMAKFISKNKHVSLCIFTARIYDDQGRCQEGLRTLAEAGAKISIMTYSEFKHCWDTFVDHQGCPFQPWDGLDEHSQDLSGRLRAILQNQEN

SEQ ID NO: 12693 - protein, 923 aa, Homo sapiens
MDGFAGSLDDSISAASTSDVQDRLSALESRVQQQEDEITVLKAALADVLRRLAISEDHVASVKKSVSSKGQPSPRAVIPMSCITNGSGANRKPSHTSAVSIAGKETLSSAAKSIKRPSPAEKSHNSWENSDDSRNKLSKIPSTPKLIPKVTKTADKHKDVIINQEGEYIKMFMRGRPITMFIPSDVDNYDDIRTELPPEKLKLEWAYGYRGKDCRANVYLLPTGKIVYFIASVVVLFNYEERTQRHYLGHTDCVKCLAIHPDKIRIATGQIAGVDKDGRPLQPHVRVWDSVTLSTLQIIGLGTFERGVGCLDFSKADSGVHLCIIDDSNEHMLTVWDWQKKAKGAEIKTTNEVVLAVEFHPTDANTIITCGKSHIFFWTWSGNSLTRKQGIFGKYEKPKFVQCLAFLGNGDVLTGDSGGVMLIWSKTTVEPTPGKGPKGVYQISKQIKAHDGSVFTLCQMRNGMLLTGGGKDRKIILWDHDLNPEREIEVPDQYGTIRAVAEGKADQFLVGTSRNFILRGTFNDGFQIEVQGHTDELWGLATHPFKDLLLTCAQDRQVCLWNSMEHRLEWTRLVDEPGHCADFHPSGTVVAIGTHSGRWFVLDAETRDLVSIHTDGNEQLSVMRYSIDGTFLAVGSHDNFIYLYVVSENGRKYSRYGRCTGHSSYITHLDWSPDNKYIMSNSGDYEILYWDIPNGCKLIRNRSDCKDIDWTTYTCVLGFQVFGVWPEGSDGTDINALVRSHNRKVIAVADDFCKVHLFQYPCSKAKAPSHKYSAHSSHVTNVSFTHNDSHLISTGGKDMSIIQWKLVEKLSLPQNETVADTTLTKAPVSSTESVIQSNTPTPPPSQPLNETAEEESRISSSPTLLENSLEQTVEPSEDHSEEESEEGSGDLGEPLYEEPCNEISKEQAKATLLEDQQDPSPSS

SEQ ID NO: 12694 - protein, 732 aa, Homo sapiens
MMQESATETISNSSMNQNGMSTLSSQLDAGSRDGRSSGDTSSEVSTVELLHLQQQQALQAARQLLLQQQTSGLKSPKSSDKQRPLQVPVSVAMMTPQVITPQQMQQILQQQVLSPQQLQALLQQQQAVMLQQDFLDSGLENFRAALEKNQQLQEFYKKQQEQLHLQLLQQQQQQQQQQQQQQQQQQQQQQQQQQQQQQQQQQQQQQQQHPGKQAKEQQQQQQQQQQLAAQQLVFQQQLLQMQQLQQQQHLLSLQRQGLISIPPGQAALPVQSLPQAGLSPAEIQQLWKEVTGVHSMEDNGIKHGGLDLTTNNSSSTTSSNTSKASPPITHHSIVNGQSSVLSARRDSSSHEETGASHTLYGHGVCKWPGCESICEDFGQFLKHLNNEHALDDRSTAQCRVQMQVVQQLEIQLSKERERLQAMMTHLHMRPSEPKPSPKPLNLVSSVTMSKNMLETSPQSLPQTPTTPTAPVTPITQGPSVITPASVPNVGAIRRRHSDKYNIPMSSEIAPNYEFYKNADVRPPFTYATLIRQAIMESSDRQLTLNEIYSWFTRTFAYFRRNAATWKNAVRHNLSLHKCFVRVENVKGAVWTVDEVEYQKRRSQKITGSPTLVKNIPTSLGYGAALNASLQAALAESSLPLLSNPGLINNASSGLLQAVHEDLNGSLDHIDSNGNSSPGCSPQPHIHSIHVKEEPVIAEDEDCPMSLVTTANHSPELEDDREIEEEPLSEDLE

SEQ ID NO: 12695 - protein, 342 aa, Homo sapiens
MPHSAGGTAGVGLEAAEPTALLTRAEPPSEPTEIRPQKRKKGPAPKMLGNELCSVCGDKASGFHYNVLSCEGCKGFFRRSVIKGAHYICHSGGHCPMDTYMRRKCQECRLRKCRQAGMREECVLSEEQIRLKKLKRQEEEQAHATSLPPRASSPPQILPQLSPEQLGMIEKLVAAQQQCNRRSFSDRLRVTVMLLETSRRYNPGSESITFLKDFSYNREDFAKAGLQVEFINPIFEFSRAMNELQLNDAEFALLIAISIFSADRPNVQDQLQVERLQHTYVEALHAYVSIHHPHDRLMFPRMLMKLVSLRTLSSVHSEQVFALRLQDKKLPPLLSEIWDVHE

SEQ ID NO: 12696 - protein, 179 aa, Homo sapiens
MCTSGQIIGSLLVLSVLEIGLGVSSVAVGAVSFSLALREHKPQLGDSSPFLLCGICGILCAKKKSGLVMILFSACCICGLIGGILNFQFLRAVTKKTSSLYPLHLASMSLACIGIGGCTLSSWLTCRLASYEQRRMFSEREHSLHHSHEMAEKRLRAIEITDLPSCPVVPPTPELPTRK

SEQ ID NO: 12697 - protein, 794 aa, Homo sapiens
MNFIKDNSRALIQRMGMTVIKQITDDLFVWNVLNREEVNIICCEKVEQDAARGIIHMILKKGSESCNLFLKSLKEWNYPLFQDLNGQSLFHQTSEGDLDDLAQDLKDLYHTPSFLNFYPLGEDIDIIFNLKSTFTEPVLWRKDQHHHRVEQLTLNGLLQALQSPCIIEGESGKGKSTLLQRIAMLWGSGKCKALTKFKFVFFLRLSRAQGGLFETLCDQLLDIPGTIRKQTFMAMLLKLRQRVLFLLDGYNEFKPQNCPEIEALIKENHRFKNMVIVTTTTECLRHIRQFGALTAEVGDMTEDSAQALIREVLIKELAEGLLLQIQKSRCLRNLMKTPLFVVITCAIQMGESEFHSHTQTTLFHTFYDLLIQKNKHKHKGVAASDFIRSLDHCGDLALEGVFSHKFDFELQDVSSVNEDVLLTTGLLCKYTAQRFKPKYKFFHKSFQEYTAGRRLSSLLTSHEPEEVTKGNGYLQKMVSISDITSTYSSLLRYTCGSSVEATRAVMKHLAAVYQHGCLLGLSIAKRPLWRQESLQSVKNTTEQEILKAININSFVECGIHLYQESTSKSALSQEFEAFFQGKSLYINSGNIPDYLFDFFEHLPNCASALDFIKLDFYGGAMASWEKAAEDTGGIHMEEAPETYIPSRAVSLFFNWKQEFRTLEVTLRDFSKLNKQDIRYLGKIFSSATSLRLQIKRCAGVAGSLSLVLSTCKNIYSLMVEASPLTIEDERHITSVTNLKTLSIHDLQNQRLPGGLTDSLGNLKNLTKLIMDNIKMNEEDAIKLGQISVLIFVSM

SEQ ID NO: 12698 - protein, 393 aa, Homo sapiens [sequence omitted]

SEQ ID NO: 12699 - protein, 1156 aa, Homo sapiens
MIFSDMNTVSGSPKVHPPNGTRFYTFQEFAALTKELNACREQLLEKEEEISELKAERNNTRLLLEHLECLVSRHERSLRMTVVKRQAQSPSGVSSEVEVLKALKSLFEHHKALDEKVRERLRVSLERVSALEEELAAANQEIVALREQNVHIQRKMASSEGSTESEHLEGMEPGQKVHEKRLSNGSIDSTDETSQIVELQELLEKQNYEMAQMKERLAALSSRVGEVEQEAETARKDLIKTEEMNTKYQRDIREAMAQKEDMEERITTLEKRYLSAQRESTSIHDMNDKLENELANKEAILRQMEEKNRQLQERLELAEQKLQQTMRKAETLPEVEAELAQRIAALTKAEERHGNIEERMRHLEGQLEEKNQELQRARQREKMNEEHNKRLSDTVDRLLTESNERLQLHLKERMAALEEKNVLIQESETFRKNLEESLHDKERLAEEIEKLRSELDQLKMRTGSLIEPTIPRTHLDTSAELRYSVGSLVDSQSDYRTTKVIRRPRRGRMGVRRDEPKVKSLGDHEWNRTQQIGVLSSHPFESDTEMSDIDDDDRETIFSSMDLLSPSGHSDAQTLAMMLQEQLDAINKEIRLIQEEKESTELRAEEIENRVASVSLEGLNLARVHPGTSITASVTASSLASSSPPSGHSTPKLTPRSPAREMDRMGVMTLPSDLRKHRRKIAVVEEDGREDKATIKCETSPPPTPRALRMTHTLPSSYHNDARSSLSVSLEPESLGLGSANSSQDSLHKAPKKKGIKSSIGRLFGKKEKARLGQLRGFMETEAAAQESLGLGKLGTQAEKDRRLKKKHELLEEARRKGLPFAQWDGPTVVAWLELWLGMPAWYVAACRANVKSGAIMSALSDTEIQREIGISNPLHRLKLRLAIQEMVSLTSPSAPPTSRTKESEEGSWAQTLAYGDMNHEWIGNEWLPSLGLPQYRSYFMECLVDARMLDHLTKKDLRVHLKMVDSFHRTSLQYGIMCLKRLNYDRKELERRREASQHEIKDVLVWSNDRVIRWIQAIGLREYANNILESGVHGSLIALDENFDYSSLALLLQIPTQNTQARQILEREYNNLLALGTERRLDESDDKNFRRGSTWRRQFPPREVHGISMMPGSSETLPAGFRLTTTSGQSRKMTTDVASSRLQRLDNSTVRTYSC

SEQ ID NO: 12700 - protein, 321 aa, Homo sapiens
MQTPRPAMRMEAGEAAPPAGAGGRAAGGWGKWVRLNVGGTVFLTTRQTLCREQKSFLSRLCQGEELQSDRDETGAYLIDRDPTYFGPILNFLRHGKLVLDKDMAEEGVLEEAEFYNIGPLIRIIKDRMEEKDYTVTQVPPKHVYRVLQCQEEELTQMVSTMSDGWRFEQLVNIGSSYNYGSEDQAEFLCVVSKELHSTPNGLSSESSRKTKSTEEQLEEQQQQEEEVEEVEVEQVQVEADAQEKAQSSQDPANLFSLPPLPPPPLPAGGSRPHPLRPEAELAVRASPRPLARPQSCHPCCYKPEAPGCEAPDHLQGLGVPI

SEQ ID NO: 12701 - protein, 348 aa, Homo sapiens
MMNHSMSSGSGSLRTNQKRSLYVRAMFDYDKSKDSGLPSQGLSFKYGDILHVINASDDEWWQARRVMLEGDSEEMGVIPSKRRVERKERARLKTVKFNAKPGVIDSKGDIPGLGDDGYGTKTLKHVSSNASDSESSYRGQEDLILSYEPVTRQEINYTRPVIILGPMKDRINDDLISEFPDKFGSCVPHTTRPKRDYEVDGRDYHFVISREQMEKDIQEHKFIEAGQYNDNLYGTSVQSVRFVAERGKHCILDVSGNAIKRLQVAQLYPIAIFIKPRSLEPLMEMNKRLTEEQAKKTYDRAIKLEQEFGEYFTAIVQGDTLEDIYNQCKLVIEEQSGPFIWIPSKEKL

SEQ ID NO: 12702 - protein, 304 aa, Homo sapiens
MSAKSKGNPSSSCPAEGPPAASKTKVKEQIKIIVEDLELVLGDLKDVAKELKEVVDQIDTLTSDLQLEDEMTDSSKTDTLNSSSSGTTASSLEKIKVQANAPLIKPPAHPSAILTVLRKPNPPPPPPRLTPVKCEDPKRVVPTANPVKTNGTLLRNGGLPGGPNKIPNGDICCIPNSNLDKAPVQLLMHRPEKDRCPQAGPRERVRFNEKVQYHGYCPDCDTRYNIKNREVHLHSEPVHPPGKIPHQGPPLPPTPHLPPFPLENGGMGISHSNSFPPIRPATVPPPTAPKPQKTILRKSTTTTV

SEQ ID NO: 12703 - protein, 704 aa, Homo sapiens
MEDERKNGAYGTPQKYDPTFKGPIYNRGCTDIICCVFLLLAIVGYVAVGIIAWTHGDPRKVIYPTDSRGEFCGQKGTKNENKPYLFYFNIVKCASPLVLLEFQCPTPQICVEKCPDRYLTYLNARSSRDFEYYKQFCVPGFKNNKGVAEVLQDGDCPAVLIPSKPLARRCFPAIHAYKGVLMVGNETTYEDGHGSRKNITDLVEGAKKANGVLEARQLAMRIFEDYTVSWYWIIIGLVIAMAMSLLFIILLRFLAGIMVWVMIIMVILVLGYGIFHCYMEYSRLRGEAGSDVSLVDLGFQTDFRVYLHLRQTWLAFMIILSILEVIIILLLIFLRKRILIAIALIKEASRAVGYVMCSLLYPLVTFFLLCLCIAYWASTAVFLSTSNEAVYKIFDDSPCPFTAKTCNPETFPSSNESRQCPNARCQFAFYGGESGYHRALLGLQIFNAFMFFWLANFVLALGQVTLAGAFASYYWALRKPDDLPAFPLFSAFGRALRYHTGSLAFGALILAIVQIIRVILEYLDQRLKAAENKFAKCLMTCLKCCFWCLEKFIKFLNRNAYIMIAIYGTNFCTSARNAFFLLMRNIIRVAVLDKVTDFLFLLGKLLIVGSVGILAFFFFTHRIRIVQDTAPPLNYYWVPILTVIVGSYLIAHGFFSVYGMCVDTLFLCFLEDLERNDGSAERPYFMSSTLKKLLNKTNKKAAES

SEQ ID NO: 12704 - protein, 1547 aa, Homo sapiens
MGTALLQRGGCFLLCLSLLLLGCWAELGSGLEFPGAEGQWTRFPKWNACCESEMSFQLKTRSARGLVLYFDDEGFCDFLELILTRGGRLQLSFSIFCAEPATLLADTPVNDGAWHSVRIRRQFRNTTLFIDQVEAKWVEVKSKRRDMTVFSGLFVGGLPPELRAAALKLTLASVREREPFKGWIRDVRVNSSQVLPVDSGEVKLDDEPPNSGGGSPCEAGEEGEGGVCLNGGVCSVVDDQAVCDCSRTGFRGKDCSQEIKFGLQCVLPVLLHDNDQGKYCCINTAKPLTEKDNNVEGLAHLMMGDQGKSKGKEEYIATFKGSEYFCYDLSQNPIQSSSDEITLSFKTLQRNGLMLHTGKSADYVNLALKNGAVSLVINLGSGAFEALVEPVNGKFNDNAWHDVKVTRNLRQHSGIGHAMVNKLHCSVTISVDGILTTTGYTQEDYTMLGSDDFFYVGGSPSTADLPGSPVSNNFMGCLKEVVYKNNDVRLELSRLAKQGDPKMKIHGVVAFKCENVATLDPITFETPESFISLPKWNAKKTGSISFDFRTTEPNGLILFSHGKPRHQKDAKHPQMIKVDFFAIEMLDGHLYLLLDMGSGTIKIKALLKKVNDGEWYHVDFQRDGRSGTISVNTLRTPYTAPGESEILDLDDELYLGGLPENKAGLVFPTEVWTALLNYGYVGCIRDLFIDGQSKDIRQMAEVQSTAGVKPSCSKETAKPCLSNPCKNNGMCRDGWNRYVCDCSGTGYLGRSCEREATVLSYDGSMFMKIQLPVVMHTEAEDVSLRFRSQRAYGILMATTSRDSADTLRLELDAGRVKLTVNLDCIRINCNSSKGPETLFAGYNLNDNEWHTVRVVRRGKSLKLTVDDQQAMTGQMAGDHTRLEFHNIETGIITERRYLSSVPSNFIGHLQSLTFNGMAYIDLCKNGDIDYCELNARFGFRNIIADPVTFKTKSSYVALATLQAYTSMHLFFQFKTTSLDGLILYNSGDGNDFIVVELVKGYLHYVFDLGNGANLIKGSSNKPLNDNQWHNVMISRDTSNLHTVKIDTKITTQITAGARNLDLKSDLYIGGVAKETYKSLPKLVHAKEGFQGCLASVDLNGRLPDLISDALFCNGQIERGCEGPSTTCQEDSCSNQGVCLQQWDGFSCDCSMTSFSGPLCNDPGTTYIFSKGGGQITYKWPPNDRPSTRADRLAIGFSTVQKEAVLVRVDSSSGLGDYLELHIHQGKIGVKFNVGTDDIAIEESNAIINDGKYHVVRFTRSGGNATLQVDSWPVIERYPAGNNDNERLAIARQRIPYRLGRVVDEWLLDKGRQLTIFNSQATIIIGGKEQGQPFQGQLSGLYYNGLKVLNMAAENDANIAIVGNVRLVGEVPSSMTTESTATAMQSEMSTSIMETTTTLATSTARRGKPPTKEPISQTTDDILVASAECPSDDEDIDPCEPSSGGLANPTRAGGREPYPGSAEVIRESSSTTGMVVGIVAAAALCILILLYAMYKYRNRDEGSYHVDESRNYISNSAQSNGAVVKEKQPSSAKSSNKNKKNKDKEYYV

SEQ ID NO: 12705 - protein, 953 aa, Homo sapiens
MGRAAATAGGGGGARRWLPWLGLCFWAAGTAAARGTDNGEALPESIPSAPGTLPHFIEEPDDAYIIKSNPIALRCKARPAMQIFFKCNGEWVHQNEHVSEETLDESSGLKVREVFINVTRQQVEDFHGPEDYWCQCVAWSHLGTSKSRKASVRIAYLRKNFEQDPQGREVPIEGMIVLHCRPPEGVPAAEVEWLKNEEPIDSEQDENIDTRADHNLIIRQARLSDSGNYTCMAANIVAKRRSLSATVVVYVNGGWSSWTEWSACNVRCGRGWQKRSRTCTNPAPLNGGAFCEGMSVQKITCTSLCPVDGSWEVWSEWSVCSPECEHLRIRECTAPPPRNGGKFCEGLSQESENCTDGLCILDKKPLHEIKPQSIENASDIALYSGLGAAVVAVAVLVIGVTLYRRSQSDYGVDVIDSSALTGGFQTFNFKTVRQGNSLLLNSAMQPDLTVSRTYSGPICLQDPLDKELMTESSLFNPLSDIKVKVQSSFMVSLGVSERAEYHGKNHSRTFPHGNNHSFSTMHPRNKMPYIQNLSSLPTRTELRTTGVFGHLGGRLVMPNTGVSLLIPHGAIPEENSWEIYMSINQGEPSLQSDGSEVLLSPEVTCGPPDMIVTTPFALTIPHCADVSSEHWNIHLKKRTQQGKWEEVMSVEDESTSCYCLLDPFACHVLLDSFGTYALTGEPITDCAVKQLKVAVFGCMSCNSLDYNLRVYCVDNTPCAFQEVVSDERHQGGQLLEEPKLLHFKGNTFSLQISVLDIPPFLWRIKPFTACQEVPFSRVWCSNRQPLHCAFSLERYTPTTTQLSCKICIRQLKGHEQILQVQTSILESERETITFFAQEDSTFPAQTGPKAFKIPYSIRQRICATFDTPNAKGKDWQMLAQKNSINRNLSYFATQSSPSAVILNLWEARHQHDGDLDSLACALEEIGRTHTKLSNISESQLDEADFNYSRQNGL

SEQ ID NO: 12706 - protein, 571 aa, Homo sapiens
MTLLHYTCKSGAHGIGDVETAVKFATQLIDLGADISLRSRWTNMNALHYAAYFDVPELIRVILKTSKPKDVDATCSDFNFGTALHIAAYNLCAGAVKCLLEQGANPAFRNDKGQIPADVVPDPVDMPLEMADAAATAKEIKQMLLDAVPLSCNISKAMLPNYDHVTGKAMLTSLGLKLGDRVVIAGQKVGTLRFCGTTEFASGQWAGIELDEPEGKNNGSVGKVQYFKCAPKYGIFAPLSKISKAKGRRKNITHTPSTKAAVPLIRSQKIDVAHVTSKVNTGLMTSKKDSASESTLSLPPGEELKTVTEKDVALLGSVSSCSSTSSLEHRQSYPKKQNAISSNKKTMSKSPSLSSRASAGLNSSATSTANNSRCEGELRLGERVLVVGQRLGTIRFFGTTNFAPGYWYGIELEKPHGKNDGSVGGVQYFSCSPRYGIFAPPSRVQRVTDSLDTLSEISSNKQNHSYPGFRRSFSTTSASSQKEINRRNAFSKSKAALRRSWSSTPTAGGIEGSVKLHEGSQVLLTSSNEMGTVSMFRITGMLVLLFHATTQEPSAAMKLAKSNCVFFRDSF

SEQ ID NO: 12707 - protein, 496 aa, Homo sapiens
MMSSAAFPRWLSMGVPRTPSRTVLFERERTGLTYRVPSLLPVPPGPTLLAFVEQRLSPDDSHAHRLVLRRGTLAGGSVRWGALHVLGTAALAEHRSMNPCPVHDAGTGTVFLFFIAVLGHTPEAVQIATGRNAARLCCVASRDAGLSWGSARDLTEEAIGGAVQDWATFAVGPGHGVQLPSGRLLVPAYTYRVDRRECFGKICRTSPHSFAFYSDDHGRTWRCGGLVPNLRSGECQLAAVDGGQAGSFLYCNARSPLGSRVQALSTDEGTSFLPAERVASLPETAWGCQGSIVGFPAPAPNRPRDDSWSVGPGSPLQPPLLGPGVHEPPEEAAVDPRGGQVPGGPFSRLQPRGDGPRQPGPRPGVSGDVGSWTLALPMPFAAPPQSPTWLLYSHPVGRRARLHMGIRLSQSPLDPRSWTEPWVIYEGPSGYSDLASIGPAPEGGLVFACLYESGARTSYDEISFCTFSLREVLENVPASPKPPNLGDKPRGCCWPS

SEQ ID NO: 12708 - protein, 17 aa, Homo sapiens
EQISKGRNTPLCDRWIL

SEQ ID NO: 12709 - protein, 716 aa, Homo sapiens
MATSHRVAKLVASSLQTPVNPITGARVAQYEREDPLKALAAAEAILEDEEEEKVAQPAGASADLNTSFSGVDEHAPISYEDFVNFPDIHHSNEEYFKKVEELKAAHIETMAKLEKMYQDKLHLKEVQPVVIREDSLSDSSRSVSEKNSYHPVSLMTSFSEPDLGQSSSLYVSSSEEELPNLEKEYPRKNRMMTYAKELINNMWTDFCVEDYIRCKDTGFHAAEKRRKKRKEWVPTITVPEPFQMMIREQKKKEESMKSKSDIEMVHKALKKQEEDPEYKKKFRANPVPASVFLPLYHDLVKQKEERRRSLKEKSKEALLASQKPFKFIAREEQKRAAREKQLRDFLKYKKKTNRFKARPIPRSTYGSTTNDKLKEEELYRNLRTQLRAQEHLQNSSPLPCRSACGCRNPRCPEQAVKLKCKHKVRCPTPDFEDLPERYQKHLSEHKSPKLLTVCKPFDLHASPHASIKREKILADIEADEENLKETRWPYLSPRRKSPVRCAGVNPVPCNCNPPVPTVSSRGREQAVRRSLEEKKMLEEERNRILTKQKQRMKELQKLLTTRAKAYDSHQSLAQISKSRVKCLRKSEKERMREYQRELEEREEKLKKRPLLFERVAQKNARMAAEKHYSNTLKALGISDEFVSKKGQSGKVLEYFNNQETKSVTEDKESFNEEEKIEERENGEENYFIDTNSQDSYKEKDEANEESEEEKSVEESH

SEQ ID NO: 12710 - protein, 549 aa, Homo sapiens
MIKRSKVLVFCSKIMEEAVTFKDVAVVFTEEELGLLDPAQRKLYRDVMLENFRNLLSVGHQPFHQDTCHFLREEKFWMMGTATQREGNSGGKIQTELESVPEAGAHEEWSCQQIWEQIAKDLTRSQDSIINNSQFFENGDVPSQVEAGLPTIHTGQKPSQGGKCKQSISDVPIFDLPQQLYSEEKSYTCDECGKSICYISALHVHQRVHVGEKLFMCDVCGKEFSQSSHLQTHQRVHTGEKPFKCEQCGKGFSRRSALNVHRKLHTGEKPYICEACGKAFIHDSQLKEHKRIHTGEKPFKCDICGKTFYFRSRLKSHSMVHTGEKPFRCDTCDKSFHQRSALNRHCMVHTGEKPYRCEQCGKGFIGRLDFYKHQVVHTGEKPYNCKECGKSFRWSSCLLNHQRVHSGEKSFKCEECGKGFYTNSQLSSHQRSHSGEKPYKCEECGKGYVTKFNLDLHQRVHTGERPYNCKECGKNFSRASSILNHKRLHCQKKPFKCEDCGKRLVHRTYRKDQPRDYSGENPSKCEDCGRRYKRRLNLDILLSLFLNDT

SEQ ID NO: 12711 - protein, 1010 aa, Homo sapiens
MSNSNTTQETLEIMKESEKKLVEESVNKNKFISKTPSKEEIEKECEDTSLRQETQRRTSNHGHARKRAKSNSKLKLVRSLAVCEESSTPFADGPLETQDIIQLHISCPSDKEEEKSTKDVSEKEDKDKNKEKIPRKMLSRDSSQEYTDSTGIDLHEFLVNTLKKNPRDRMMLLKLEQEILEFINDNNNQFKKFPQMTSYHRMLLHRVAAYFGMDHNVDQTGKAVIINKTSNTRIPEQRFSEHIKDEKNTEFQQRFILKRDDASMDRDDNQTGQNGYLNDIRLSKEAFSSSSHKRRQIFRGNREGLSRTSSSRQSSTDSELKSLEPRPWSSTDSDGSVRSMRPPVTKASSFSGISILTRGDSIGSSKGGSAGRISRPGMALGAPEVCNQVTSSQSVRGLLPCTAQQQQQQQQQQLPALPPTPQQQPPLNNHMISQPVPALQPSPQPVQFSPSSCPQVLLPVSPPQQYNMADDLSNPFGQMSLSRQGSTEAADPSAALFQTPLISQHPQQTSFIMASTGQPLPTSNYSTSSHAPPTQQVLPPQGYMQPPQQIQVSYYPPGQYPNSNQQYRPLSHPVAYSPQRGQQLPQPSQQPGLQPMMPNQQQAAYQGMIGVQQPQNQGLLSSQRSSMGGQMQGLVVQYTPLPSYQVPVGSDSQNVVQPPFQQPMLVPVSQSVQGGLPAAGVPVYYSMIPPAQQNGTSPSVGFLQPPGSEQYQMPQSPSPCSPPQMPQQYSGVSPSGPGVVVMQLNVPNGPQPPQNPSMVQWSHCKYYSMDQRGQKPGDLYSPDSSPQANTQMSSSPVTSPTQSPAPSPVTSLSSVCTGLSPLPVLTQFPRPGGPAQGDGRYSLLGQPLQYNLSICPPLLHGQSTYTVHQGQSGLKHGNRGKRQALKSASTDLGTADVVLGRVLEVTDLPEGITRTEADKLFTQLAMSGAKIQWLKDAQGLPGGGGGDNSGTAENGRHSDLAALYTIVAVFPSPLAAQNASLRLNNSVSRFKLRMAKKNYDLRILERASSQ

SEQ ID NO: 12712 - protein, 195 aa, Homo sapiens
MDPQSRSLKNAGSRSSSRENRATSGEGAQPCQGTDDGPSLGAQDQRSTPTNQKGSIIPNNIRHKFGSNVVDQLVSEEQAQKAIDEVFEGQKRASSWPSRTQNPVEISSVFSDYYDLGYNMRSNLFRGAAEETKSLMKASYTPEVIEKSVRDLEHWHGRKTDDLGRWHQKNAMNLNLQKALEEKYGENSKSKSSKY

SEQ ID NO: 12713 - protein, 1225 aa, Homo sapiens
MKLRLPASPETHLDMLRHLYQGCQVVQGNLELTYLPTNASLSFLQDIQEVQGYVLIAHNQVRQVPLQRLRIVRGTQLFEDNYALAVLDNGDPLNNTTPVTGASPGGLRELQLRSLTEILKGGVLIQRNPQLCYQDTILWKDIFHKNNQLALTLIDTNRSRACHPCSPMCKGSRCWGESSEDCQSLTRTVCAGGCARCKGPLPTDCCHEQCAAGCTGPKHSDCLACLHFNHSGICELHCPALVTYNTDTFESMPNPEGRYTFGASCVTACPYNYLSTDVGSCTLVCPLHNQEVTAEDGTQRCEKCSKPCARVCYGLGMEHLREVRAVTSANIQEFAGCKKIFGSLAFLPESFDGDPASNTAPLQPEQLQVFETLEEITGYLYISAWPDSLPDLSVFQNLQVIRGRILHNGAYSLTLQGLGISWLGLRSLRELGSGLALIHHNTHLCFVHTVPWDQLFRNPHQALLHTANRPEDECVGEGLACHQLCARGHCWGPGPTQCVNCSQFLRGQECVEECRVLQGLPREYVNARHCLPCHPECQPQNGSVTCFGPEADQCVACAHYKDPPFCVARCPSGVKPDLSYMPIWKFPDEEGACQPCPINCTHSCVDLDDKGCPAEQRASPLTSIISAVVGILLVVVLGVVFGILIKRRQQKIRKYTMRRLLQETELVEPLTPSGAMPNQAQMRILKETELRKVKVLGSGAFGTVYKGIWIPDGENVKIPVAIKVLRENTSPKANKEILDEAYVMAGVGSPYVSRLLGICLTSTVQLVTQLMPYGCLLDHVRENRGRLGSQDLLNWCMQIAKGMSYLEDVRLVHRDLAARNVLVKSPNHVKITDFGLARLLDIDETEYHADGGKVPIKWMALESILRRRFTHQSDVWSYGVTVWELMTFGAKPYDGIPAREIPDLLEKGERLPQPPICTIDVYMIMVKCWMIDSECRPRFRELVSEFSRMARDPQRFVVIQNEDLGPASPLDSTFYRSLLEDDDMGDLVDAEEYLVPQQGFFCPDPAPGAGGMVHHRHRSSSTRSGGGDLTLGLEPSEEEAPRSPLAPSEGAGSDVFDGDLGMGAAKGLQSLPTHDPSPLQRYSEDPTVPLPSETDGYVAPLTCSPQPEYVNQPDVRPQPPSPREGPLPAARPAGATLERPKTLSPGKNGVVKDVFAFGGAVENPEYLTPQGGAAPQPHPPPAFSPAFDNLYYWDQDPPERGAPPSTFKGTPTAENPEYLGLDVPV

SEQ ID NO: 12714 - protein, 1248 aa, Homo sapiens
MNTSVYSILHVGDHAEFVKNLLPKSLVNGVPWPQEATRRNSHTFNCRMLIHPPDEPGTENQEACQRYEVMQCFTVSQPKSIQEDGEDFQSCLICIARRLPRPPAITGVESFMTKQDTTGKIISIDTSSLRAAGRTGWEDLVRKCIYAFFQPQGREPSYARQLFQEVMTRGTASSPSYRFILNDGTMLSAHTKCKLCYPQSPDMQPFIMGIHIIDREHSGLSPQDDTNSGMSIPRVNPSVNPSISPAHGVARSSTLPPSNSNMVSTRINRQQSSDLHSSSHSNSSNSQGSFGCSPGSQIVANVALNQGQASSQSSNPSLNLNNSPMEGTGISLAQFMSPRRQVTSGLATRPRMPNNSFPPNISTLSSPVGMTSSACNNNNRSYSNIPVTSLQGMNEGPNNSVGFSASSPVLRQMSSQNSPSRLNIQPAKAESKDNKEIASILNEMIQSDNSSSDGKPLDSGLLHNNDRLSDGDSKYSQTSHKLVQLLTTTAEQQLRHADIDTSCKDVLSCTGTSNSASANSSGGSCPSSHSSLTERHKILHRLLQEGSPSDITTLSVEPDKKDSASTSVSVTGQVQGNSSIKLELDASKKKESKDHQLLRYLLDKDEKDLRSTPNLSLDDVKVKVEKKEQMDPCNTNPTPMTKPTPEEIKLEAQSQFTADLDQFDQLLPTLEKAAQLPGLCETDRMDGAVTSVTIKSEILPASLQSATARPTSRLNRLPELELEAIDNQFGQPGTGDQIPWTNNTVTAINQSKSEDQCISSQLDELLCPPTTVEGRNDEKALLEQLVSFLSGKDETELAELDRALGIDKLVQGGGLDVLSERFPPQQATPPLIMEERPNLYSQPYSSPSPTANLPSPFQGMVRQKPSLGTMPVQVTPPRGAFSPGMGMQPRQTLNRPPAAPNQLRLQLQQRLQGQQQLIHQNRQAILNQFAATAPVGINMRSGMQQQITPQPPLNAQMLAQRQRELYSQQHRQRQLIQQQRAMLMRQQSFGNNLPPSSGLPVQMGNPRLPQGAPQQFPYPPNYGTNPGTPPASTSPFSQLAANPEASLANRNSMVSRGMTGNIGGQFGTGINPQMQQNVFQYPGAGMVPQGEANFAPSLSPGSSMVPMPIPPPQSSLLQQTPPASGYQSPDMKAWQQGAIGNNNVFSQAVQNQPTPAQPGVYNNMSITVSMAGGNTNVQNMNPMMAQMQMSSLQMPGMNTVCPEQINDPALRHTGLYCNQLSSTDLLKTEADGTQDKKTEEFFSVVTTD

SEQ ID NO: 12715 - protein, 661 aa, Homo sapiens
MEKLGVEPEEEGGGDDDEEDAEAWAMELADVGAAASSQGVHDQVLPTPNASSRVIVHVDLDCFYAQVEMISNPELKDKPLGVQQKYLVVTCNYEARKLGVKKLMNVRDAKEKCPQLVLVNGEDLTRYREMSYKVTELLEEFSPVVERLGFDENFVDLTEMVEKRLQQLQSDELSAVTVSGHVYNNQCIGYKTAKCLEALGINSVRDLQTFSPKILEKELGISVAQRIQKLSFGEDNSPVILSGPPQSFSEEDSFKKCSSEVEAKNKIEELLASLLNRVCQDGRKPHTVRLIIRRYSSEKHYGRESRQCPIPSHVIQKLGTGNYDVMTPMVDILMKLFRNMVNVKMPFHLTLLSVCFCNLKALNTAKKGLIDYYLMPSLSTTSRSGKHSFKMKDTHMEDFPKDKETNRDFLPSGRIESTRTRESPLDTTNFSKEKDINEFPLCSLPEGVDQEVFKQLPVDIQEEILSGKSREKFQGKGSVSCPLHASRGVLSFFSKKQMQDIPINPRDHLSSSKQVSSVSPCEPGTSGFNSSSSSYMSSQKDYSYYLDNRLKDERISQGPKEPQGFHFTNSNPAVSAFHSFPNLQSEQLFSRNHTTDSHKQTVATDSHEGLTENREPDSVDEKITFPSDIDPQVFYELPEAVQKELLAEWKRAGSDFHIGHK

SEQ ID NO: 12716 - protein, 873 aa, Homo sapiens
MPALEHMNQILHILFVFLPFLWALGTLPPPDALLLWAMEQVLEFGLGGSSMSTHLRLLVMFIMSAGTAIASYFIPSTVGVVLFMTGFGFLLSLNLSDMGHKIGTKSKDLPSGPEKHFSWKECLFYIIILVLALLETSLLHHFAGFSQISKSNSQAIVGYGLMILLIILWILREIQSVYIIGIFRNPFYPKDVQTVTVFFEKQTRLMKIGIVRRILLTLVSPFAMIAFLSLDSSLQGLHSVSVCIGFTRAFRMVWQNTENALLETVIVSTVHLISSTDIWWNRSLDTGLRLLLVGIIRDRLIQFISKLQFAVTVLLTSWTEKKQRRKTTATLCILNIVFSPFVLVIIVFSTLLSSPLLPLFTLPVFLVGFPRPIQSWPGAAGTTACVCADTVYYYQMVPRLTAVLQTAMAAGSLGLLLPGSHYLGRFQDRLMWIMILECGYTYCSINIKGLELQETSCHTAEARRVDEVFEDAFEQEYTRVCSLNEHFGNVLTPCTVLPVKLYSDARNVLSGIIDSHENLKEFKGDLIKVLVWILVQYCSKRPGMKENVHNTENKGKAPLMLPALNTLPPPKSPEDIDSLNSETFNDWSDDNIFDDEPTIKKVIEEKHQLKDLPGTNLFIPGSVESQRVGDHSTGTVPENDLYKAVLLGYPAVDKGKQEDMPYIPLMEFSCSHSHLVCLPAEWRTSCMPSSKMKEMSSLFPEDWYQFVLRQLECYHSEEKASNVLEEIAKDKVLKDFYVHTVMTCYFSLFGIDNMAPSPGHILRVYGGVLPWSVALDWLTEKPELFQLALKAFRYTLKLMIDKASLGPIEDFRELIKYLEEYERDWYIGLVSDEKWKEAILQEKPYLFSLGYDSNMPGPALEISRVNRNLWSQI

SEQ ID NO: 12717 - protein, 1403 aa, Homo sapiens
MANCSQEELDEEFEQFMKELSDDSFENSDKTARQSKKEMKKKDTVPWWITEDDFKDDGLLGTNVSYLKTKKTSQPVMEIEEESAEKIQFLKSSGTSLLSTDSLETNELVVSELNHSSLGVGLDTLEEQEEKEQFFARLEKGLTSSIDYSRLNKELDSNDSTHFKALHSNQANAELTDDEHENESKHEELAENYSDDFEDEYVGAPLTTKDEEMPSKENSKSEKISVPKQEEEKTGMLANVVLLDSLDSVAEVNLDEQDKITPKPRCLPEMTENEMTGTGVSYGQSSSDVEALHQAYCHIAHSLGDEDKQKIESNTVEDIKSSVKGHPQENEENSKNISTMESDLPTVEELMKPIRIDSFGISGFDLQPVSSEKVAERKETEFFSSLPLKMNPNILSQDSQHVNLFFDKNDENVILQKTTNESMENSCPQVTEVTATEEHVDKMYLNILRKKITVNSSSLSQDDKINKTYRSQLSSEEEGAVMGKQVPYKKARSAPPLLKRKPQSGLYASVRSSGYGKPSSPLKMFSTLEKKTSEDIIKSKNLRSISTSNQPRKKEILSGTKLIKPAALDKPAHKTESCLSTRKKSENPTETDSCIQFQTDSLGYCGENKEKKLLMFKRVQEAEDKWRGAQALIEQIKATFSEKEKELENKLEELKKQQEKELFKLNQDNYILQAKLSSFEETNKKQRWLHFGEAADPVTGEKLKQIQKEIQEQETLLQGYQQENERLYNQVKDLQEQNKKNEERMFKENQSLFSEVASLKEQMHKSRFLSQVVEDSEPTRNQNFTDLLAELRMAQKEKDSLLEDIKRLKQDKQALEVDFEKMKKERDQAKDQIAYVTGEKLYEIKILEETHKQEISRLQKRLQWYAENQELLDKDALRLREANEEIEKLKLEIEKLKAESGNPSIRQKIRLKDKAADAKKIQDLERQVKEMEGILKRRYPNSLPALILAASAAGDTVDKNTVEFMEKRIKKLEADLEGKDEDAKKSLRTMEQQFQKMKIQYEQRLEQQEQLLACKLNQHDSPRIKALEKELDDIKEAHQITVRNLEAEIDVLKHQNAELDVKKNDKDDEDFQSIEFQVEQAHAKAKLVRLNEELAAKKREIQDLSKTVERLQKDRRMMLSNQNSKGREEMSAKRAKKDVLHSSKGNANSFPGTLDSKLYQPHTFTDSHVSEVLQENYRLKNELEGLISEKNELKMKSEAVMNQFENSMRRVKEDTAAHIASLKASHQREIEKLLCQNAVENSSSKVAELNRKIATQEVLIRHFQSQVNELQSKQESLVVSEVREEILQKEITKLLEELREAKENHTPEMKHFVGLEKKIKQMEMRHAQREQELQQIIQQTHQVVETEQNKEVEKWKRLAQLKNRELEKFRTELDSILDVLRELHRQGVVVPVAFADEMNAPEY

SEQ ID NO: 12718 - protein, 397 aa, Homo sapiens
MPSETHAMLATLARVAALRRTCLFSGRGGGRGLWTGRPQSDMNNIKPLEGVKILDLTRVLAGPFATMNLGDLGAEVIKVERPGAGDDTRTWGPPFVGTESTYYLSVNRNKKSIAVNIKDPKGVKIIKELAAVCDVFVENYVPGKLSAMGLGYEDIDEIAPHIIYCSITGYGQTGPISQRAGYDAVASAVSGLMHITGPEVACLSHIAANYLIGQKEAKRWGTAHGSIVPYQAFKTKDGYIVVGAGNNQQFATVCKILDLPELIDNSKYKTNHLRVHNRKELIKILSERFEEELTSKWLYLFEGSGVPYGPINNMKNVFAEPQVLHNGLVMEMEHPTVGKISVPGPAVRYSKFKMSEARPPPLLGQHTTHILKEVLRYDDRAIGELLSAGVVDQHETH

SEQ ID NO: 12719 - protein, 480 aa, Homo sapiens
MAQGSGDQRAVGVADPEESSPNMIVYCKIEDIITKMQDDKTGGVPIRTVKSFLSKIPSVVTGTDIVQWLMKNLSIEDPVEAIHLGSLIAAQGYIFPISDHVLTMKDDGTFYRFQAPYFWPSNCWEPENTDYAIYLCKRTMQNKARLELADYEAENLARLQRAFARKWEFIFMQAEAQVKIDRKKDKTERKILDSQERAFWDVHRPVPGCVNTTEMDIRKCRRLKNPQKVKKSVYGVTEESQAQSPVHVLSQPIRKTTKEDIRKQITFLNAQIDRHCLKMSKVAESLIAYTEQYVEYDPLITPAEPSNPWISDDVALWDIEMSKEPSQQRVKRWGFSFDEILKDQVGRDQFLRFLESEFSSENLRFWLAVQDLKKQPLQDVAKRVEEIWQEFLAPGAPSAINLDSHSYEITSQNVKDGGRYTFEDAQEHIYKLMKSDSYARFLRSNAYQDLLLAKKKPESEQGRRTSLEKFTRSVCLQLLF

SEQ ID NO: 12720 - protein, 684 aa, Homo sapiens
MSLWPPFRCRWKLAPRYSRRASPQQPQQDFEALLAECLRNGCLFEDTSFPATLSSIGSGSLLQKLPPRLQWKRPPELHSNPQFYFAKAKRLDLCQGIVGDCWFLAALQALALHQDILSRVVPLNQSFTEKYAGIFRFWFWHYGNWVPVVIDDRLPVNEAGQLVFVSSTYKNLFWGALLEKAYAKLSGSYEDLQSGQVSEALVDFTGGVTMTINLAEAHGNLWDILIEATYNRTLIGCQTHSGEKILENGLVEGHAYTLTGIRKVTCKHRPEYLVKLRNPWGKVEWKGDWSDSSSKWELLSPKEKILLLRKDNDGEFWMTLQDFKTHFVLLVICKLTPGLLSQEAAQKWTYTMREGRWEKRSTAGGQRQLLQDTFWKNPQFLLSVWRPEEGRRSLRPCSVLVSLLQKPRHRCRKRKPLLAIGFYLYRMNKYHDDQRRLPPEFFQRNTPLSQPDRFLKEKEVSQELCLEPGTYLIVPCILEAHQKSEFVLRVFSRKHIFYEIGSNSGVVFSKEIEDQNERQDEFFTKFFEKHPEINAVQLQNLLNQMTWSSLGSRQPFFSLEACQGILALLDLNASGTMSIQEFRDLWKQLKLSQKVFHKQDRGSGYLNWEQLHAAMREAGIMLSDDVCQLMLIRYGGPRLQMDFVSFIHLMLRVENMEDVFQNLTQDGKGIYLQKPEWMMMALYS

SEQ ID NO: 12721 - protein, 333 aa, Homo sapiens
MGPLSAPPCTQHITWKGLLLTASLLNFWNLPITAQVTIEALPPKVSEGKDVLLLVHNLPQNLAGYIWYKGQLMDLYHYITSYVVDGQINIYGPAYTGRETVYSNASLLIQNVTREDAGSYTLHIIKRGDRTRGVTGYFTFNLYLKLPKPYITINNSKPRENKDVLAFTCEPKSENYTYIWWLNGQSLPVSPRVKRPIENRILILPSVTRNETGPYECEIRDRDGGMRSDPVTLNVLYGPDLPSIYPSFTYYRSGENLYLSCFAESNPPAEYFWTINGKFQQSGQKLSIPQITTKHRGLYTCSVRNSATGKESSKSMTVEVSGKWIPASLAIGF

SEQ ID NO: 12722 - protein, 1997 aa, Homo sapiens
MALLIHLKTVSELRGRGDRIAKVTFRGQSFYSRVLENCEDVADFDETFRWPVASSIDRNEMLEIQVFNYSKVFSNKLIGTFRMVLQKVVEESHVEVTDTLIDDNNAIIKTSLCVEVRYQATDGTVGSWDDGDFLGDESLQEEEKDSQETDGLLPGSRPSSRPPGEKSFRRAGRSVFSAMKLGKNRSHKEEPQRPDEPAVLEMEDLDHLAIRLGDGLDPDSVSLASVTALTTNVSNKRSKPDIKMEPSAGRPMDYQVSITVIEARQLVGLNMDPVVCVEVGDDKKYTSMKESTNCPYYNEYFVFDFHVSPDVMFDKIIKISVIHSKNLLRSGTLVGSFKMDVGTVYSQPEHQFHHKWAILSDPDDISSGLKGYVKCDVAVVGKGDNIKTPHKANETDEDDIEGNLLLPEGVPPERQWARFYVKIYRAEGLPRMNTSLMANVKKAFIGENKDLVDPYVQVFFAGQKGKTSVQKSSYEPLWNEQVVFTDLFPPLCKRMKVQIRDSDKVNDVAIGTHFIDLRKISNDGDKGFLPTLGPAWVNMYGSTRNYTLLDEHQDLNEGLGEGVSFRARLLLGLAVEIVDTSNPELTSSTEVQVEQATPISESCAGKMEEFFLFGAFLEASMIDRRNGDKPITFEVTIGNYGNEVDGLSRPQRPRPRKEPGDEEEVDLIQNASDDEAGDAGDLASVSSTPPMRPQVTDRNYFHLPYLERKPCIYIKSWWPDQRRRLYNANIMDHIADKLEEGLNDIQEMIKTEKSYPERRLRGVLEELSCGCCRFLSLADKDQGHSSRTRLDRERLKSCMRELENMGQQARMLRAQVKRHTVRDKLRLCQNFLQKLRFLADEPQHSIPDIFIWMMSNNKRVAYARVPSKDLLFSIVEEETGKDCAKVKTLFLKLPGKRGFGSAGWTVQAKVELYLWLGLSKQRKEFLCGLPCGFQEVKAAQGLGLHAFPPVSLVYTKKQAFQLRAHMYQARSLFAADSSGLSDPFARVFFINQSQCTEVLNETLCPTWDQMLVFDNLELYGEAHELRDDPPIIVIEIYDQDSMGKADFMGRTFAKPLVKMADEAYCPPRFPPQLEYYQIYRGNATAGDLLAAFELLQIGPAGKADLPPINGPVDVDRGPIMPVPMGIRPVLSKYRVEVLFWGLRDLKRVNLAQVDRPRVDIECAGKGVQSSLIHNYKKNPNFNTLVKWFEVDLPENELLHPPLNIRVVDCRAFGRYTLVGSHAVSSLRRFIYRPPDRSAPSWNTTVRLLRRCRVLCNGGSSSHSTGEVVVTMEPEVPIKKLETMVKLDATSEAVVKVDVAEEEKEKKKKKKGTAEEPEEEEPDESMLDWWSKYFASIDTMKEQLRQQEPSGIDLEEKEEVDNTEGLKGSMKGKEKARAAKEEKKKKTQSSGSGQGSEAPEKKKPKIDELKVYPKELESEFDNFEDWLHTFNLLRGKTGDDEDGSTEEERIVGRFKGSLCVYKVPLPEDVSREAGYDSTYGMFQGIPSNDPINVLVRVYVVRATDLHPADINGKADPYIAIRLGKTDIRDKENYISKQLNPVFGKSFDIEASFPMESMLTVAVYDWDLVGTDDLIGETKIDLENRFYSKHRATCGIAQTYSTHGYNIWRDPMKPSQILTRLCKDGKVDGPHFGPPGRVKVANRVFTGPSEIEDENGQRKPTDEHVALLALRHWEDIPRAGCRLVPEHVETRPLLNPDKPGIEQGRLELWVDMFPMDMPAPGTPLDISPRKPKKYELRVIIWNTDEVVLEDDDFFTGEKSSDIFVRGWLKGQQEDKQDTDVHYHSLTGEGNFNWRYLFPFDYLAAEEKIVISKKESMFSWDETEYKIPARLTLQIWDADHFSADDFLGAIELDLNRFPRGAKTAKQCTMEMATGEVDVPLVSIFKQKRVKGWWPLLARNENDEFELTGKVEAELHLLTAEEAEKNPVGLARNEPDPLEKPNRPDTAFVWFLNPLKSIKYLICTRYKWLIIKIVLALLGLLMLGLFLYSLPGYMVKKLLGA

SEQ ID NO: 12723 - protein, 297 aa, Homo sapiens
MTNQESAVHVKMMPEFQKSSVRIKNPTRVEEIICGLIKGGAAKLQIITDFDMTLSRFSYKGKRCPTCHNIIDNCKLVTDECRKKLLQLKEKYYAIEVDPVLTVEEKYPYMVEWYTKSHGLLVQQALPKAKLKEIVAESDVMLKEGYENFFDKLQQHSIPVFIFSAGIGDVLEEVIRQAGVYHPNVKVVSNFMDFDETGVLKGFKGELIHVFNKHDGALRNTEYFNQLKDNSNIILLGDSQGDLRMADGVANVEHILKIGYLNDRVDELLEKYMDSYDIVLVQDESLEVANSILQKIL

SEQ ID NO: 12724 - protein, 1235 aa, Homo sapiens
MDGPTRGHGLRKKRRSRSQRDRERRSRGGLGAGAAGGGGAGRTRALSLASSSGSDKEDNGKPPSSAPSRPRPPRRKRRESTSAEEDIIDGFAMTSFVTFEALEKDVALKPQERVEKRQTPLTKKKREALTNGLSFHSKKSRLSHPHHYSSDRENDRNLCQHLGKRKKMPKALRQLKPGQNSCRDSDSESASGESKGFHRSSSRERLSDSSAPSSLGTGYFCDSDSDQEEKASDASSEKLFNTVIVNKDPELGVGTLPEHDSQDAGPIVPKISGLERSQEKSQDCCKEPIFEPVVLKDPCPQVAQPIPQPQTEPQLRAPSPDPDLVQRTEAPPQPPPLSTQPPQGPPEAQLQPAPQPQVQRPPRPQSPTQLLHQNLPPVQAHPSAQSLSQPLSAYNSSSLSLNSLSSSRSSTPAKTQPAPPHISHHPSASPFPLSLPNHSPLHSFTPTLQPPAHSHHPNMFAPPTALPPPPPLTSGSLQVAGHPAGSTYSEQDILRQELNTRFLASQSADRGASLGPPPYLRTEFHQHQHQHQHTHQHTHQHTFTPFPHAIPPTAIMPTPAPPMFDKYPTKVDPFYRHSLFHSYPPAVSGIPPMIPPTGPFGSLQGAFQPKLTDPFRPMLRKPGKWCAMHVHIAWQIYHHQQKVKKQMQSDPHKLDFGLKPEFLSRPPGPSLFGAIHHPHDLARPSTLFSAAGAAHPTGTPFGPPPHHSNFLNPAAHLEPFNRPSTFTGLAAVGGNAFGGLGNPSVTPNSMFGHKDGPSVQNFSNPHEPWNRLHRTPPSFPTPPPWLKPGELERSASAAAHDRDRDVDKRDSSVSKDDKERESVEKRHSSHPSPAPVLPVNALGHTRSSTEQIRAHLNTEAREKDKPKERERDHSESRKDLAADEHKAKEGHLPEKDGHGHEGRAAGEEAKQLARVPSPYVRTPVVESARPNSTSSREAEPRKGEPAYENPKKSSEVKVKEERKEDHDLPPEAPQTHRASEPPPPNSSSSVHPGPLASMPMTVGVTGIHPMNSISSLDRTRMMTPFMGISPLPGGERFPYPSFHWDPIRDPLRDPYRELDIHRRDPLGRDFLLRNDPLHRLSTPRLYEADRSFRDREPHDYSHHHHHHHHPLSVDPRREHERGGHLDERERLHMLREDYEHTRLHSVHPASLDGHLPHPSLITPGLPSMHYPRISPTAGNQNGLLNKTPPTAALSAPPPLISTLGGRPVSPRRTTPLSAEIRERPPSHTLKDIEAR

SEQ ID NO: 12725 - protein, 903 aa, Homo sapiens
MVLAQGLLSMALLALCWERSLAGAEETIPLQTLRCYNDYTSHITCRWADTQDAQRLVNVTLIRRVNEDLLEPVSCDLSDDMPWSACPHPRCVPRRCVIPCQSFVVTDVDYFSFQPDRPLGTRLTVTLTQHVQPPEPRDLQISTDQDHFLLTWSVALGSPQSHWLSPGDLEFEVVYKRLQDSWEDAAILLSNTSQATLGPEHLMPSSTYVARVRTRLAPGSRLSGRPSKWSPEVCWDSQPGDEAQPQNLECFFDGAAVLSCSWEVRKEVASSVSFGLFYKPSPDAGSAVLLREEECSPVLREGLGSLHTRHHCQIPVPDPATHGQYIVSVQPRRAEKHIKSSVNIQMAPPSLNVTKDGDSYSLRWETMKMRYEHIDHTFEIQYRKDTATWKDSKTETLQNAHSMALPALEPSTRYWARVRVRTSRTGYNGIWSEWSEARSWDTESVLPMWVLALIVIFLTIAVLLALRFCGIYGYRLRRKWEEKIPNPSKSHLFQNGSAELWPPGSMSAFTSGSPPHQGPWGSRFPELEGVFPVGFGDSEVSPLTIEDPKHVCDPPSGPDTTPAASDLPTEQPPSPQPGPPAASHTPEKQASSFDFNGPYLGPPHSRSLPDILGQPEPPQEGGSQKSPPPGSLEYLCLPAGGQVQLVPLAQAMGPGQAVEVERRPSQGAAGSPSLESGGGPAPPALGPRVGGQDQKDSPVAIPMSSGDTEDPGVASGYVSSADLVFTPNSGASSVSLVPSLGLPSDQTPSLCPGLASGPPGAPGPVKSGFEGYVELPPIEGRSPRSPRNNPVPPEAKSPVLNPGERPADVSPTSPQPEGLLVLQQVGDYCFLPGLGPGPLSLRSKPSSPGPGPEIKNLDQAFQVKKPPGQAVPQVPVIQLFKALKQQDYLSLPPWEVNKPGEVC

SEQ ID NO: 12726 - protein, 820 aa, Homo sapiens
MLRLGLCAAALLCVCRPGAVRADCWLIEGDKGYVWLAICSQNQPPYETIPQHINSTVHDLRLNENKLKAVLYSSLNRFGNLTDLNLTKNEISYIEDGAFLGQSSLQVLQLGYNKLSNLTEGMLRGMSRLQFLFVQHNLIEVVTPTAFSECPSLISIDLSSNRLSRLDGATFASLASLMVCELAGNPFNCECDLFGFLAWLVVFNNVTKNYDRLQCESPREFAGYPLLVPRPYHSLNAITVLQAKCRNGSLPARPVSHPTPYSTDAQREPDENSGFNPDEILSVEPPASSTTDASAGPAIKLHHVTFTSATLVVIIPHPYSKMYILVQYNNSYFSDVMTLKNKKEIVTLDKLRAHTEYTFCVTSLRNSRRFNHTCLTFTTRDPVPGDLAPSTSTTTHYIMTILGCLFGMVIVLGAVYYCLRKRRMQEEKQKSVNVKKTILEMRYGADVDAGSIVHAAQKLGEPPVLPVSRMASIPSMIGEKLPTAKGLEAGLDTPKVATKGNYIEVRTGAGGDGLARPEDDLPDLENGQGSAAEISTIAKEVDKVNQIINNCIDALKLDSASFLGGGSSSGDPELAFECQSLPAAAAASSATGPGALERPSFLSPPYKESSHHPLQRQLSADAAVTRKTCSVSSSGSIKSAKVFSLDVPDHPAATGLAKGDSKYIEKGSPLNSPLDRLPLVPAGSGGGSGGGGGIHHLEVKPAYHCSEHRHSFPALYYEEGADSLSQRVSFLKPLTRSKRDSTYSQLSPRHYYSGYSSSPEYSSESTHKIWERFRPYKKHHREEVYMAAGHALRKKVQFAKDEDLHDILDYWKGVSAQQKL

SEQ ID NO: 12727 - protein, 591 aa, Homo sapiens
MCNGRKTVLADPEPELYLDPFCPPGFSSQKFPMQHVLCNHPPWIFTCLCAEGNIQPGDPGPGDQEKQQQASEGRPWSDQAEGPEGEGAMPLFGRTKKRTLGAFSRPPQRQPVSSRNGLRGVELEASPAQSGNPEETDKLLKRIEVLGFGTVNCGECGLSFSKMTNLLSHQRIHSGEKPYVCGVCEKGFSLKKSLARHQKAHSGEKPIVCRECGRGFNRKSTLIIHERTHSGEKPYMCSECGRGFSQKSNLIIHQRTHSGEKPYVCRECGKGFSQKSAVVRHQRTHLEEKTIVCSDCGLGFSDRSNLISHQRTHSGEKPYACKECGRCFRQRTTLVNHQRTHSKEKPYVCGVCGHSFSQNSTLISHRRTHTGEKPYVCGVCGRGFSLKSHLNRHQNIHSGEKPIVCKDCGRGFSQQSNLIRHQRTHSGEKPMVCGECGRGFSQKSNLVAHQRTHSGERPYVCRECGRGFSHQAGLIRHKRKHSREKPYMCRQCGLGFGNKSALITHKRAHSEEKPCVCRECGQGFLQKSHLTLHQMTHTGEKPYVCKTCGRGFSLKSHLSRHRKTTSVHHRLPVQPDPEPCAGQPSDSLYSL

SEQ ID NO: 12728 - protein, 278 aa, Homo sapiens
MGTALLQRGGCFLLCLSLLLLGCWAELGSGLEFPGAEGQWTRFPKWNACCESEMSFQLKTRSARGLVLYFDDEGFCDFLELILTRGGRLQLSFSIFCAEPATLLADTPVNDGAWHSVRIRRQFRNTTLFIDQVEAKWVEVKSKRRDMTVFSGLFVGGLPPELRAAALKLTLASVREREPFKGWIRDVRVNSSQVLPVDSGEVKLDDEPPNSGGGSPCEAGEEGEGGVCLNGGVCSVVDDQAVCDCSRTGFRGKDCSQEDNNVEGLAHLMMGDQGKSKD

SEQ ID NO: 12729 - protein, 891 aa, Homo sapiens
MKGSNRNKDHSAEGEGVGKRPKRKCLQWHPLLAKKLLDFSEEEEEEDEEEDIDKVQLLGADGLEQDVGETEDDESPEQRARRPMNAFLLFCKRHRSLVRQEHPRLDNRGATKILADWWAVLDPKEKQKYTDMAKEYKDAFMKANPGYKWCPTTNKPVKSPTPTVNPRKKLWAFPSDSSRDLPSPKKAKTEEMPQLNFGMADPTQMGGLSMLLLAGEHALGTPEVSSGTCRPDVSESPELRQKSPLFQFAEISSSTSHSDASTKQCQTSALFQFAEISSNTSQLGGAEPVKRCGKSALFQLAEMCLASEGMKMEESKLIKAKESDGGRIKELEKGKEEKEIKMEKTDETRLQKEAEFEKSAKENLRDSKELRNFEALQIDDIMAIKMEDPKEIRKEELEEDHKCSHFPDFSYSASSKIIISDVPSRKDHMCHPHGIMIIEDPAALNKPEKLKKKKKKSKMDRHGNDKSTPKKTCKKRQSSESDIESVIYTIEAVAKGDWGIEKLGDTPRKKVRTSSSGKGSILDAKPPKKKVKSREKKMSKEKSSDTTKESRPPDFISISASKNISGETPEGIKAEPLTPMEDALPPSLSGQAKPEDSDCHRKIETCGSRKSERSCKGALYKTLVSEGMLTSLRANVDRGKRSSGKGNSSDHEGCWNEESWTFSQSGTSGSKKFKKTKPKEDCLLGSAKLDEEFEKKFNSLPQYSPVTFDRKCVPVPRKKKKTGNVSSEPTKTSKAIFSEDRNTMEPVHKVKNIPSIFNTPEPTTTQEPLVGSQKRKARKTKITHLVRTADGRVSPAGGTLDDKPKEQLQRSLPKATETDCNDKCSHNTEVGETRSSTPEMPAVSAFFSLAALAEVAAMENVHRGQRSTPLTHDGQPKEMPQAPVLISCADQ

SEQ ID NO: 12730 - protein, 284 aa, Homo sapiens
MALLLSQDRSLIASGLYGYNATLVGVLMAVFSDKGDYFWWLLLPVCAMSMTCPIFSSALNSMLSKWDLPVFTLPFNMALSMYLSATGHYNPFFPAKLVIPITTAPNISWSDLSALELLKSIPVGVGQIYGCDNPWTGGIFLGAILLSSPLMCLHAAIGSLLGIAAGLSLSAPFEDIYFGLWGFNSSLACIAMGGMFMALTWQTHLLALGCALFTAYLGVGMANFMAEVGLPACTWPFCLATLLFLIMTTKNSNIYKMPLSKVTYPEENRIFYLQAKKRMVESPL

SEQ ID NO: 12731 - protein, 913 aa, Homo sapiens
MNEAMATDSPRRPSRCTGGVVVRPQAVTEQSYMESVVTFLQDVVPQAYSGTPLTEEKEKIVWVRFENADLNDTSRNLEFHEIHSTGNEPPLLIMIGYSDGMQVWSIPISGEAQELFSVRHGPIRAARILPAPQFGAQKCDNFAEKRPLLGVCKSIGSSGTSPPYCCVDLYSLRTGEMVKSIQFKTPIYDLHCNKRILVVVLQEKIAAFDSCTFTKKFFVTSCYPCPGPNMNPIALGSRWLAYAENKLIRCHQSRGGACGDNIQSYTATVISAAKTLKSGLTMVGKVVTQLTGTLPSGVTEDDVAIHSNSRRSPLVPGIITVIDTETVGEGQVLVSEDSDSDGIVAHFPAHEKPVCCMAFNTSGMLLVTTDTLGHDFHVFQILTHPWSSSQCAVHHLYTLHRGETEAKVQDICFSHDCRWVVVSTLRGTSHVFPINPYGGQPCVRTHMSPRVVNRMSRFQKSAGLEEIEQELTSKQGGRCSPVPGLSSSPSGSPLHGKLNSQDSYNNFTNNNPGNPRLSPLPSLMVVMPLAQIKQPMTLGTITKRTGKVKPPPQISPSKSMGGEFCVAAIFGTSRSWFANNAGLKREKDQSKQVVVESLYIISCYGTLVEHMMEPRPLSTAPKISDDTPLEMMTSPRASWTLVRTPQWNELQPPFNANHPLLLAADAVQYYQFLLAGLVPPGSPGPITRHGSYDSLASDHSGQEDEEWLSQVEIVTHTGPHRRLWMGPQFQFKTIHPSGQTTVISSSSSVLQSHGPSDTPQPLLDFDTDDLDLNSLRIQPVRSDPVSMPGSSRPVSDRRGVSTVIDAASGTFDRSVTLLEVCGSWPEGFGLRHMSSMEHTEEGLRERLADAMAESPSRDVVGSGTELQREGSIETLSNSSGSTSGSIPRNFDGYRSPLPTNESQPLSLFPTGFP

SEQ ID NO: 12732 - protein, 262 aa, Homo sapiens
FWLVINQEGNMVTARQEPRLVLISLTCDGDTLTLSAAYTKDLLLPIKTPTTNAVHKCRVHGLEIEGRDCGEATAQWITSFLKSQPYRLVHFEPHMRPRRPHQIADLFRPKDQIAYSDTSPFLILSEASLADLNSRLEKKVKATNFRPNIVISGCDVYAEVTLCPFGSFLGFDFFFKDSWDELLIGDVELKRVMACSRCILTTVDPDTGVMSRKEPLETLKSYRQCDPSERKLYGKSPLFGQYFVLENPGTIKVGDPVYLLGQ

SEQ ID NO: 12733 - protein, 783 aa, Homo sapiens
MSGGHQLQLAALWPWLLMATLQAGFGRTGLVLAAAVESERSAEQKAIIRVIPLKMDPTGKLNLTLEGVFAGVAEITPAEGKLMQSHPLYLCNASDDDNLEPGFISIVKLESPRRAPRPCLSLASKARMAGERGASAVLFDITEDRAAAEQLQQPLGLTWPVVLIWGNDAEKLMEFVYKNQKAHVRIELKEPPAWPDYDVWILMTVVGTIFVIILASVLRIRCRPRHSRPDPLQQRTAWAISQLATRRYQASCRQARGEWPDSGSSCSSAPVCAICLEEFSEGQELRVISCLHEFHRNCVDPWLHQHRTCPLCMFNITEGDSFSQSLGPSRSYQEPGRRLHLIRQHPGHAHYHLPAAYLLGPSRSAVARPPRPGPFLPSQEPGMGPRHHRFPRAAHPRAPGEQQRLAGAQHPYAQGWGLSHLQSTSQHPAACPVPLRRARPPDSSGSGESYCTERSGYLADGPASDSSSGPCHGSSSDSVVNCTDISLQGVHGSSSTFCSSLSSDFDPLVYCSPKGDPQRVDMQPSVTSRPRSLDSVVPTGETQVSSHVHYHRHRHHHYKKRFQWHGRKPGPETGVPQSRPPIPRTQPQPEPPSPDQQVTRSNSAAPSGRLSNPQCPRALPEPAPGPVDASSICPSTSSLFNLQKSSLSARHPQRKRRGGPSEPTPGSRPQDATVHPACQIFPHYTPSVAYPWSPEAHPLICGPPGLDKRLLPETPGPCYSNSQPVWLCLTPRQPLEPHPPGEGPSEWSSDTAEGRPCPYPHCQVLSAQPGSEEELEELCEQAV

SEQ ID NO: 12734 - protein, 279 aa, Homo sapiens
MDTGSLNAASLREEQLHLSLLVSSGWRTISFHVVPVVRRKLGAPALEGVQQMPGFPEGSLRRILSQGVDLVPASAQLWRTSTDYLLTRLLGELGSLQGHRLDSLSILDRVNHESWRDSGQTDGLTFGHLKMVLLWASVLFLAPEDWAELQGAVYRLLVVLLCCLATRKLPHFLHPQRNLLQGSGLDLGAIYQRVEGFASQPEAALRIHATHLGRSPPPRIGSGLKALLQLPASDPTYWATAYFDVLLDKFQVFNIQDKDRISAMQSIFQKTRTLGGEES

SEQ ID NO: 12735 - protein, 1746 aa, Homo sapiens
LGHPEPDYRWLKDNMPLELSGRFQKTVTGLLIENIRPSDSGSYVCEVSNRYGTAKVIGRLYVKQPLKATISPRKVKSSVGSQVSLSCSVTGTEDQELSWYRNGEILNPGKNVRITGINHENLIMDHMVKSDGGAYQCFVRKDKLSAQDYVQVVLEDGTPKIISAFSEKVVSPAEPVSLMCNVKGTPLPTITWTLDDDPILKGGSHRISQMITSEGNVVSYLNISSSQVRDGGVYRCTANNSAGVVLYQARINVRGPASIRPMKNITAIAGRDTYIHCRVIGYPYYSIKWYKNSNLLPFNHRQVAFENNGTLKLSDVQKEVDEGEYTCNVLVQPQLSTSQSVHVTVKVPPFIQPFEFPRFSIGQRVFIPCVVVSGDLPITITWQKDGRPIPGSLGVTIDNIDFTSSLRISNLSLMHNGNYTCIARNEAAAVEHQSQLIVRVPPKFVVQPRDQDGIYGKAVILNCSAEGYPVPTIVWKFSKGAGVPQFQPIALNGRIQVLSNGSLLIKHVVEEDSGYYLCKVSNDVGADVSKSMYLTVKIPAMITSYPNTTLATQGQKKEMSCTAHGEKPIIVRWEKEDRIINPEMARYLVSTKEVGEEVISTLQILPTVREDSGFFSCHAINSYGEDRGIIQLTVQEPPDPPEIEIKDVKARTITLRWTMGFDGNSPITGYDIECKNKSDSWDSAQRTKDVSPQLNSATIIDIHPSSTYSIRMYAKNRIGKSEPSNELTITADEAAPDGPPQEVHLEPISSQSIRVTWKAPKKHLQNGIIRGYQIGYREYSTGGNFQFNIISVDTSGDSEVYTLDNLNKFTQYGLVVQACNRAGTGPSSQEIITTTLEDVPSYPPENVQAIATSPESISISWSTLSKEALNGILQGFRVIYWANLMDGELGEIKNITTTQPSLELDGLEKYTNYSIQVLAFTRAGDGVRSEQIFTRTKEDVPGPPAGVKAAAASASMVFVSWLPPLKLNGIIRKYTVFCSHPYPTVISEFEASPDSFSYRIPNLSRNRQYSVWVVAVTSAGRGNSSEIITVEPLAKAPARILTFSGTVTTPWMKDIVLPCKAVGDPSPAVKWMKDSNGTPSLVTIDGRRSIFSNGSFIIRTVKAEDSGYYSCIANNNWGSDEIILNLQVQVPPDQPRLTVSKTTSSSITLSWLPGDNGGSSIRGYILQYSEDNSEQWGSFPISPSERSYRLENLKCGTWYKFTLTAQNGVGPGRISEIIEAKTLGKEPQFSKEQELFASINTTRVRLNLIGWNDGGCPITSFTLEYRPFGTTVWTTAQRTSLSKSYILYDLQEATWYELQMRVCNSAGCAEKQANFATLNYDGSTIPPLIKSVVQNEEGLTTNEGLKMLVTISCILVGVLLLFVLLLVVRRRRREQRLKRLRDAKSLAEMLMSKNTRTSDTLSKQQQTLRMHIDIPRAQLLIEERDTMETIDDRSTVLLTDADFGEAAKQKSLTVTHTVHYQSVSQATGPLVDVSDARPGTNPTTRRNAKAGPTARNRYASQWTLNRPHPTISAHTLTTDWRLPTPRAAGSVDKESDSYSVSPSQDTDRARSSMVSTESASSTYEELARAYEHAKMEEQLRHAKFTITECFISDTSSEQLTAGTNEYTDSLTSSTPSESGICRFTASPPKPQDGGRVMNMAVPKAHRPGGPGTSRDLSLGQACLEPQKSRTLKRPTVLEPIPMEAASSASSTREGQSWQPGAVATLPQREGAELGQAAKMSSSQESLLDSRGHLKGNNPYAKSYTLV

SEQ ID NO: 12736 - protein, 567 aa, Homo sapiens
MAGVGDAAAPGEGGGGGVDGPQRDGRGEAEQPGGSGGQGPPPAPQLTETLGFYESDRRRERRRGRTELSLLRFLSAELTRGYFLEHNEAKYTERRERVYTCLRIPRELEKLMVFGIFLCLDAFLYVFTLLPLRVFLALFRLLTLPCYGLRDRRLLQPAQVCDILKGVILVICYFMMHYVDYSMMYHLIRGQSVIKLYIIYNMLEVADRLFSSFGQDILDALYWTATEPKERKRAHIGVIPHFFMAVLYVFLHAILIMVQATTLNVAFNSHNKSLLTIMMSNNFVEIKGSVFKKFEKNNLFQMSNSDIKERFTNYVLLLIVCLRNMEQFSWNPDHLWVLFPDVCMVIASEIAVDIVKHAFITKFNDITADVYSEYRASLAFDLVSSRQKNAYTDYSDSVARRMGFIPLPLAVLLIRVVTSSIKVQGILSYACVILFYFGLISLKVLNSIVLLGKSCQYVKEAKMEEKLSNPPATCTPGKPSSKSQNKCKPSQGLSTEENLSASITKQPIHQKENIIPLLVTSNSDQFLTTPDGDEKDITQDNSELKHRSSKKDLLEIDRFTICGNRID

SEQ ID NO: 12737 - protein, 1342 aa, Homo sapiens
MDTKLMCLLFFFSLPPLLVSNHTGRIKVVFTPSICKVTCTKGSCQNSCEKGNTTTLISENGHAADTLTATNFRVVICHLPCMNGGQCSSRDKCQCPPNFTGKLCQIPVHGASVPKLYQHSQQPGKALGTHVIHSTHTLPLTVTSQQGVKVKFPPNIVNIHVKHPPEASVQIHQVSRIDGPTGQKTKEAQPGQSQVSYQGLPVQKTQTIHSTYSHQQVIPHVYPVAAKTQLGRCFQETIGSQCGKALPGLSKQEDCCGTVGTSWGFNKCQKCPKKPSYHGYNQMMECLPGYKRVNNTFCQDINECQLQGVCPNGECLNTMGSYRCTCKIGFGPDPTFSSCVPDPPVISEEKGPCYRLVSSGRQCMHPLSVHLTKQLCCCSVGKAWGPHCEKCPLPGTAKEEPVEALTFSREHGPGVAEPEVATAPPEKEIPSLDQEKTKLEPGQPQLSPGISTIHLHPQFPVVIEKTSPPVPVEVAPEASTSSASQVIAPTQVTEINECTVNPDICGAGHCINLPVRYTCICYEGYRFSEQQRKCVDIDECTQVQHLCSQGRCENTEGSFLCICPAGFMASEEGTNCIDVDECLRPDVCGEGHCVNTVGAFRCEYCDSGYRMTQRGRCEDIDECLNPSTCPDEQCVNSPGSYQCVPCTEGFRGWNGQCLDVDECLEPNVCANGDCSNLEGSYMCSCHKGYTRTPDHKHCRDIDECQQGNLCVNGQCKNTEGSFRCTCGQGYQLSAAKDQCEDIDECQHRHLCAHGQCRNTEGSFQCVCDQGYRASGLGDHCEDINECLEDKSVCQRGDCINTAGSYDCTCPDGFQLDDNKTCQDINECEHPGLCGPQGECLNTEGSFHCVCQQGFSISADGRTCEDIDECVNNTVCDSHGFCDNTAGSFRCLCYQGFQAPQDGQGCVDVNECELLSGVCGEAFCENVEGSFLCVCADENQEYSPMTGQCRSRTSTDLDVDVDQPKEEKKECYYNLNDASLCDNVLAPNVTKQECCCTSGVGWGDNCEIFPCPVLGTAEFTEMCPKGKGFVPAGESSSEAGGENYKDADECLLFGQEICKNGFCLNTRPGYECYCKQGTYYDPVKLQCFDMDECQDPSSCIDGQCVNTEGSYNCFCTHPMVLDASEKRCIRPAESNEQIEETDVYQDLCWEHLSDEYVCSRPLVGKQTTYTECCCLYGEAWGMQCALCPLKDSDDYAQLCNIPVTGRRQPYGRDALVDFSEQYTPEADPYFIQDRFLNSFEELQAEECGILNGCENGRCVRVQEGYTCDCFDGYHLDTAKMTCVDVNECDELNNRMSLCKNAKCINTDGSYKCLCLPGYVPSDKPNYCTPLNTALNLEKDSDLE

SEQ ID NO: 12738 - protein, 839 aa, Homo sapiens
MEQWRQCGRWLIDCKVLPPNHRVVWPSAVVFDLAQALRDGVLLCQLLHNLSPGSIDLKDINFRPQMSQFLCLKNIRTFLKVCHDKFGLRNSELFDPFDLFDVRDFGKVISAVSRLSLHSIAQNKGIRPFPSEETTENDDDVYRSLEELADEHDLGEDIYDCVPCEDGGDDIYEDIIKVEVQQPMKMGMTEDDKRNCCLLEIQETEAKYYRTLEDIEKNYMSPLRLVLSPADMAAVFINLEDLIKVHHSFLRAIDVSVMVGGSTLAKVFLDFKERLLIYGEYCSHMEHAQNTLNQLLASREDFRQKVEECTLKVQDGKFKLQDLLVVPMQRVLKYHLLLKELLSHSAERPERQQLKEALEAMQDLAMYINEVKRDKETLRKISEFQSSIENLQVKLEEFGRPKIDGELKVRSIVNHTKQDRYLFLFDKVVIVCKRKGYSYELKEIIELLFHKMTDDPMNNKDVKKWSYGFYLIHLQGKQGFQFFCKTEDMKRKWMEQFEMAMSNIKPDKANANHHSFQMYTFDKTTNCKACKMFLRGTFYQGYMCTKCGVGAHKECLEVIPPCKFTSPADLDASGAGPGPKMVAMQNYHGNPAPPGKPVLTFQTGDVLELLRGDPESPWWEGRLVQTRKSGYFPSSSVKPCPVDGRPPISRPPSREIDYTAYPWFAGNMERQQTDNLLKSHASGTYLIRERPAEAERFAISIKFNDEVKHIKVVEKDNWIHITEAKKFDSLLELVEYYQCHSLKESFKQLDTTLKYPYKSRERSASRASSRSPVFTPRVIGTAVARYNFAARDMRELSLREGDVVRIYSRIGGDQGWWKGETNGRIGWFPSTYVEEEGIQ

SEQ ID NO: 12739 - protein, 218 aa, Homo sapiens
MLPAQEAAKLYHTNYVRNSRAIGVLWAIFTICFAIVNVVCFIQPYWIGDGVDTPQAGYFGLFHYCIGNGFSRELTCRGSFTDFSTLPSGAFKAASFFIGLSMMLIIACIICFTLFFFCNTATVYKICAWMQLTSAACLVLGCMIFPDGWDSDEVKRMCGEKTDKYTLGACSVRWAYILAIIGILDALILSFLAFVLGNRQDSLMAEELKAENKDDGNA

SEQ ID NO: 12740 - protein, 313 aa, Homo sapiens
MAAEEEDEVEWVVESIAGFLRGPDWSIPILDFVEQKCEVFDDEEESKLTYTEIHQEYKELVEKLLEGYLKEIGINEDQFQEACTSPLAKTHTSQAILQPVLAAEDFTIFKAMMVQKNIEMQLQAIRIIQERNGVLPDCLTDGSDVVSDLEHEEMKILREVLRKSKEEYDQEEERKRKKQLSEAKTEEPTVHSSEAAIMNNSQGDGEHFAHPPSDLKIPGLEHASIEGPIANLSVLGTEELRQREHYLKQKRDKLMSMRKDMRTKQIQNMEQKGKPTGEVEEMTEKPEMTAEEKQTLLKRRLLAEKLKEEVINK

SEQ ID NO: 12741 - protein, 149 aa, Homo sapiens
SYHSSGEYSSDFLTPEFVKFSMDLTNTEITATTSLPSFSTFMDNYSTGYDVKPPCLYQMPLSGQQSSIKRTVQKNAKYVCLANKNCPVDKRRRNRCQYCRFQKCLAVGMVKEVVRTDSLKGRRGRLPSKPKSPQEPSPPSPPVSLISAL

SEQ ID NO: 12742 - protein, 454 aa, Homo sapiens
MDGFYDQQVPYMVTNSQRGRNCNEKPTNVRKRKFINRDLAHDSEELFQDLSQLQETWLAEAQVPDNDEQFVPDYQAESLAFHGLPLKIKKEPHSPCSEISSACSQEQPFKFSYGEKCLYNVSAYDQKPQVGMRPSNPPTPSSTPVSPLHHASPNSTHTPKPDRAFPAHLPPSQSIPDSSYPMDHRFRRQLSEPCNSFPPLPTMPREGRPMYQRQMSEPNIPFPPQGFKQEYHDPVYEHNTMVGSAASQSFPPPLMIKQEPRDFAYDSGCMFEKGPRQFYDDTCVVPEKFDGDIKQEPGMYREGPTYQRRGSLQLWQFLVALLDDPSNSHFIAWTGRGMEFKLIEPEEVARRWGIQKNRPAMNYDKLSRSLRYYYEKGIMQKVAGERYVYKFVCDPEALFSMAFPDNQRPLLKTDMERHINEEDTVPLSHFDESMAYMPEGGCCNPHPYNEGYVY

SEQ ID NO: 12743 - protein, 730 aa, Homo sapiens
MEDLFETFQDEMGFSNMEDDGPEEEERVAEPQANFNTPQALRFEELLANLLNEQHQIAKELFEQLKMKKPSAKQQKEVEKVKPQCKEVHQTLILDPAQRKRLQQQMQQHVQLLTQIHLLATCNPNLNPEASSTRICLKELGTFAQSSIALHHQYNPKFQTLFQPCNLMGAMQLIEDFSTHVSIDCSPHKTVKKTANEFPCLPKQVAWILATSKVFMYPELLPVCSLKAKNPQDKILFTKAEDNKYLLTCKTARQLTVRIKNLNMNRAPDNIIKFYKKTKQLPVLGKCCEEIQPHQWKPPIEREEHRLPFWLKASLPSIQEELRHMADGAREVGNMTGTTEINSDQGLEKDNSELGSETRYPLLLPKGVVLKLKPVADRFPKKAWRQKRSSVLKPLLIQPSPSLQPSFNPGKTPAQSTHSEAPPSKMVLRIPHPIQPATVLQTVPGVPPLGVSGGESFESPAALPAMPPEARTSFPLSESQTLLSSAPVPKVMMPSPASSMFRKPYVRRRPSKRRGARAFRCIKPAPVIHPASVIFTVPATTVKIVSLGGGCNMIQPVNAAVAQSPQTIPIATLLVNPTSFPCPLNQPLVASSVSPLIVSGNSVNLPIPSTPEDKAHMNVDIACAVADGENAFQGLEPKLEPQELSPLSATVFPKVEHSPGPPPVDKQCQEGLSENSAYRWTVVKTEEGRQALEPLPQGIQESLNNSSPGDLEEVVKMEPEDATEEISGFL

SEQ ID NO: 12744 - protein, 1559 aa, Homo sapiens
MEPGSDDFLPPPECPVFEPSWAEFRDPLGYIAKIRPIAEKSGICKIRPPADWQPPFAVEVDNFRFTPRIQRLNELEAQTRVKLNYLDQIAKFWEIQGSSLKIPNVERRILDLYSLSKIVVEEGGYEAICKDRRWARVAQRLNYPPGKNIGSLLRSHYERIVYPYEMYQSGANLVCNTRPFDNEEKDKEYKPHSIPLRQSVQPSKFNSYGRRAKRLQPDPEPTEEDIEKNPELKKLQIYGAGPKMMGLGLMAKDKTLRKKDKEGPECPPTVVVKEELGGDVKVESTSPKTFLESKEELSHSPEPCTKMTMRLRRNHSNAQFIESYVCRMCSRGDEDDKLLLCDGCDDNYHIFCLLPPLPEIPKGVWRCPKCVMAECKRPPEAFGFEQATREYTLQSFGEMADSFKADYFNMPVHMVPTELVEKEFWRLVNSIEEDVTVEYGADIHSKEFGSGFPVSDSKRHLTPEEEEYATSGWNLNVMPVLEQSVLCHINADISGMKVPWLYVGMVFSAFCWHIEDHWSYSINYLHWGEPKTWYGVPSLAAEHLEEVMKKLTPELFDSQPDLLHQLVTLMNPNTLMSHGVPVVRTNQCAGEFVITFPRAYHSGFNQGYNFAEAVNFCTADWLPAGRQCIEHYRRLRRYCVFSHEELICKMAACPEKLDLNLAAAVHKEMFIMVQEERRLRKALLEKGITEAEREAFELLPDDERQCIKCKTTCFLSALACYDCPDGLVCLSHINDLCKCSSSRQYLRYRYTLDELPAMLHKLKVRAESFDTWANKVRVALEVEDGRKRSLEELRALESEARERRFPNSELLQQLKNCLSEAEACVSRALGLVSGQEAGPHRVAGLQMTLTELRAFLDQMNNLPCAMHQIGDVKGVLEQVEAYQAEAREALASLPSSPGLLQSLLERGRQLGVEVPEAQQLQRQVEQARWLDEVKRTLAPSARRGTLAVMRGLLVAGASVAPSPAVDKAQAELQELLTIAERWEEKAHLCLEARQKHPPATLEAIIREAENIPVHLPNIQALKEALAKARAWIADVDEIQNGDHYPCLDDLEGLVAVGRDLPVGLEELRQLELQVLTAHSWREKASKTFLKKNSCYTLLEVLCPCADAGSDSTKRSRWMEKELGLYKSDTELLGLSAQDLRDPGSVIVAFKEGEQKEKEGILQLRRTNSAKPSPLASSSTASSTTSICVCGQVLAGAGALQCDLCQDWFHGRCVSVPRLLSSPRPNPTSSPLLAWWEWDTKFLCPLCMRSRRPRLETILALLVALQRLPVRLPEGEALQCLTERAISWQGRARQALASEDVTALLGRLAELRQRLQAEPRPEEPPNYPAAPASDPLREGSGKDMPKVQGLLENGDSVTSPEKVAPEEGSGKRDLELLSSLLPQLTGPVLELPEATRAPLEELMMEGDLLEVTLDENHSIWQLLQAGQPPDLERIRTLLELEKAERHGSRARGRALERRRRRKVDRGGEGDDPAREELEPKRVRSSGPEAEEVQEEEELEEETGGEGPPAPIPTTGSPSTQENQNGLEPAEGTTSGPSAPFSTLTPRLHLPCPQQPPQQQL

SEQ ID NO: 12745 - protein, 843 aa, Homo sapiens
MVAEESGPGAQNSPYQLRRKTLLPKRTACPTKNSMEGASTSTTENFGHRAKRARVSGKSQDLSAAPAEQYLQEKLPDEVVLKIFSYLLEQDLCRAACVCKRFSELANDPILWKRLYMEVFEYTRPMMHPEPGKFYQINPEEYEHPNPWKESFQQLYKGAHVKPGFAEHFYSNPARYKGRENMLYYDTIEDALGGVQEAHFDGLIFVHSGIYTDEWIYIESPITMIGAAPGKVADKVIIENTRDSTFVFMEGSEDAYVGYMTIRFNPDDKSAQHHNAHHCLEITVNCSPIIDHCIIRSTCTVGSAVCVSGQGACPTIKHCNISDCENVGLYITDHAQGIYEDNEISNNALAGIWVKNHGNPIIRRNHIHHGRDVGVFTFDHGMGYFESCNIHRNRIAGFEVKAYANPTVVRCEIHHGQTGGIYVHEKGRGQFIENKIYANNFAGVWITSNSDPTIRGNSIFNGNQGGVYIFGDGRGLIEGNDIYGNALAGIQIRTNSCPIVRHNKIHDGQHGGIYVHEKGQGVIEENEVYSNTLAGVWVTTGSTPVLRRNRIHSGKQVGVYFYDNGHGVLEDNDIYNHMYSGVQIRTGSNPKIRRNKIWGGQNGGILVYNSGLGCIEDNEIFDNAMAGVWIKTDSNPTLRRNKIHDGRDGGICIFNGGRGLLEENDIFRNAQAGVLISTNSHPILRKNRIFDGFAAGIEITNHATATLEGNQIFNNRFGGLFLASGVNVTMKDNKIMNNQDAIEKAVSRGQCLYKISSYTSYPMHDFYRCHTCNTTDRNAICVNCIKKCHQGHDVEFIRHDRFFCDCGAGTLSNPCTLAGEPTHDTDTLYDSAPPIESNTLQHN

SEQ ID NO: 12746 - protein, 218 aa, Homo sapiens
MAAEEEDEVEWVVESIAGFLRGPDWSIPILDFVEQKCEVFDDEEESKLTYTEIHQEYKELVEKLLEGYLKEIGINEDQFQEACTSPLAKTHTSQAILQPVLAAEDFTIFKAMMVQKNIEMQLQAIRIIQERNGVLPDCLTDGSDVVSDLEHEEMKILREVLRKSKEEYDQEEERKRKKQLSEAKTEEPTVHSSEAAIMNNSQGDGEHFAHPPSEIQGS

SEQ ID NO: 12747 - protein, 112 aa, Homo sapiens
MAEQATKSVLFVCLGNICRSPIAEAVFRKLVTDQNISENWRVDSAATSGYEIGNPPDYRGQSCMKRHGIPMSHVARQVPSLDLKLCVLCFSGSLTAVLFLTGTWAGPQTQEL

SEQ ID NO: 12748 - protein, 325 aa, Homo sapiens
MKQRFSALQLLKLLLLLQPPLPRALREALCPEPCNCVPDGALRCPGPTAGLTRLSLAYLPVKVIPSQAFRGLNEVIKIEISQIDSLERIEANAFDNLLNLSEILIQNTKNLRYIEPGAFINLPRLKYLSICNTGIRKFPDVTKVFSSESNFILEICDNLHITTIPGNAFQGMNNESVTLKLYGNGFEEVQSHAFNGTTLTSLELKENVHLEKMHNGAFRGATGPKTLDISSTKLQALPSYGLESIQRLIATSSYSLKKLPSRETFVNLLEATLTYPSHCCAFRNLPTKEQNFSHSISENFSKQCESTVRKVNNKTLSKPRINGYQ

SEQ ID NO: 12749 - protein, 285 aa, Homo sapiens
MECVPCGDPPPPYEPHCASKVNLVKIASTASSPRDTALAAVICSALATVLLALLILCVIYCKRQFMEKKPSWSLRSQDIQYNGSELSCFDRPQLHEYAHRACCQCRRDSVQTCGPVRLLPSMCCEEACSPNPATLGCGVHSAASLQARNAGPAGEMVPTFFGSLTQSICGEFSDAWPLMQNPMGGDNISFCDSYPELTGEDIHSLNPELESSTSLDSNSSQDLVGGAVPVQSHSENFTAATDLSRYNNTLVESASTQDALTMRSQLDQESGAVIHPATQTSLQEA

SEQ ID NO: 12750 - protein, 709 aa, Homo sapiens
MADAGIRRVVPSDLYPLVLGFLRDNQLSEVANKFAKATGATQQDANASSLLDIYSFWLKSAKVPERKLQANGPVAKKAKKKASSSDSEDSSEEEEEVQGPPAKKAAVPAKRVGLPPGKAAAKASESSSSEESSDDDDEEDQKKQPVQKGVKPQAKAAKAPPKKAKSSDSDSDSSSEDEPPKNQKPKITPVTVKAQTKAPPKPARAAPKIANGKAASSSSSSSSSSSSDDSEEEKAAATPKKVWTITSVRAETVPKKQVVAKAPVKAATTPTRKSSSSEDSSSDEEEEQKKPMKNKPGPYSSVPPPSAPPPKKSLGTQPPKKAVEKQQPVESSEDSSDESDSSSEEEKKPPTKAVVSKATTKPPPAKKAAESSSDSSDSDSSEDDEAPSKPAGTTKNSSNKPAVTTKSPAVKPAAAPKQPVGGGQKLLTRKADSSSSEEESSSSEEEKTKKMVATTKPKATAKAALSLPAKQAPQGSRDSSSDSDSSSSEEEEEKTSKSAVKKKPQKVAGGAAPSKPASAKKGKAESSNSSSSDDSSEEEEEKLKGKGSPRPQAPKANGTSALTAQNGKAAKNSEEEEEEKKKAAVVVSKSGSLKKRKQNEAAKEAETPQAKKIKLQTPNTFPKRKKGEKRASSPFRRVREEEIEVDSRVADNSFDAKRGAAGDWGERANQVLKFTKGKSFRHEKTKKKRGSYRGGSISVQVNSIKFDSE

SEQ ID NO: 12751 - protein, 829 aa, Homo sapiens
MLRRRAQEEDSTVLIDVSPPEAEKRGSYGSTAHASEPGGQQAAACRAGSPAKPRIDFVLVWEEDLKLDRQQDSAARDRTDMHRTWRETFLDNLRAAGLCVDQQDVQDGNTTVHYALLSASWAVLCYYAEDLRLKLPLQELPNQASNWSAGLLAWLGIPNVLLEVVPDVPPEYYSCRFRVNKLPRFLGSDNQDTFFTSTKRHQILFEILAKTPYGHEKKNLLGIHQLLAEGVLSAAFPLHDGPFKTPPEGPQAPRLNQRQVLFQHWARWGKWNKYQPLDHVRRYFGEKVALYFAWLGFYTGWLLPAAVVGTLVFLVGCFLVFSDIPTQELCGSKDSFEMCPLCLDCPFWLLSSACALAQAGRLFDHGGTVFFSLFMALWAVLLLEYWKRKSATLAYRWDCSDYEDTEERPRPQFAASAPMTAPNPITGEDEPYFPERSRARRMLAGSVVIVVMVAVVVMCLVSIILYRAIMAIVVSRSGNTLLAAWASRIASLTGSVVNLVFILILSKIYVSLAHVLTRWEMHRTQTKFEDAFTLKVFIFQFVNFYSSPVYIAFFKGRFVGYPGNYHTLFGVRNEECAAGGCLIELAQELLVIMVGKQVINNMQEVLIPKLKGWWQKFRLRSKKRKAGASAGASQGPWEDDYELVPCEGLFDEYLEMVLQFGFVTIFVAACPLAPLFALLNNWVEIRLDARKFVCEYRRPVAERAQDIGIWFHILAGLTHLAVISNAFLLAFSSDFLPRAYYRWTRAHDLRGFLNFTLARAPSSFAAAHNRTCRYRAFRDDDGHYSQTYWNLLAIRLAFVIVFEVAEAPAGSPIHGMRPRPCALPNSSTW

SEQ ID NO: 12752 - protein, 473 aa, Homo sapiens
MAPPAARLALLSAAALTLAARPAPSPGLGPECFTANGADYRGTQNWTALQGGKPCLFWNETFQHPYNTLKYPNGEGGLGEHNYCRNPDGDVSPWCYVAEHEDGVYWKYCEIPACQMPGNLGCYKDHGNPPPLTGTSKTSNKLTIQTCISFCRSQRFKFAGMESGYACFCGNNPDYWKYGEAASTECNSVCFGDHTQPCGGDGRIILFDTLVGACGGNYSAMSSVVYSPDFPDTYATGRVCYWTIRVPGASHIHFSFPLFDIRDSADMVELLDGYTHRVLARFHGRSRPPLSFNVSLDFVILYFFSDRINQAQGFAVLYQAVKEELPQERPAVNQTVAEVITEQANLSVSAARSSKVLYVITTSPSHPPQTVPGSNSWAPPMGAGSHRVEGWTVYGLATLLILTVTAIVAKILLHVTFKSHRVPASGDLRDCHQPGTSGEIWSIFYKPSTSISIFKKKLKGQSQQDDRNPLVSD

SEQ ID NO: 12753 - protein, 836 aa, Homo sapiens
GKEEYIATFKGSEYFCYDLSQNPIQSSSDEITLSFKTLQRNGLMLHTGKSADYVNLALKNGAVSLVINLGSGAFEALVEPVNGKFNDNAWHDVKVTRNLRQVTISVDGILTTTGYTQEDYTMLGSDDFFYVGGSPSTADLPGSPVSNNFMGCLKEVVYKNNDVRLELSRLAKQGDPKMKIHGVVAFKCENVATLDPITFETPESFISLPKWNAKKTGSISFDFRTTEPNGLILFSHGKPRHQKDAKHPQMIKVDFFAIEMLDGHLYLLLDMGSGTIKIKALLKKVNDGEWYHVDFQRDGRSGTISVNTLRTPYTAPGESEILDLDDELYLGGLPENKAGLVFPTEVWTALLNYGYVGCIRDLFIDGQSKDIRQMAEVQSTAGVKPSCSKETAKPCLSNPCKNNGMCRDGWNRYVCDCSGTGYLGRSCEREATVLSYDGSMFMKIQLPVVMHTEAEDVSLRFRSQRAYGILMATTSRDSADTLRLELDAGRVKLTVNLDCIRINCNSSKGPETLFAGYNLNDNEWHTVRVVRRGKSLKLTVDDQQAMTGQMAGDHTRLEFHNIETGIITERRYLSSVPSNFIGHLQSLTFNGMAYIDLCKNGDIDYCELNARFGFRNIIADPVTFKTKSSYVALATLQAYTSMHLFFQFKTTSLDGLILYNSGDGNDFIVVELVKGYLHYVFDLGNGANLIKGSSNKPLNDNQWHNVMISRDTSNLHTVKIDTKITTQITAGARNLDLKSDLYIGGVAKETYKSLPKLVHAKEGFQGCLASVDLNGRLPDLISDALFCNGQIERGCEGPSTTCQEDSCSNQGVCLQQWDGFSCDCSMTSFSGPLCND

SEQ ID NO: 12754 - protein, 532 aa, Homo sapiens
MSFPMSLARSSVPFADSGLSSSQPSDADWDDLWDQFDERRYLNAKKWRVGDDPYKLYAFNQRESERISSNRAIPDTRHLRCTLLVYCTDLPPTSIIITFHNEARSTLLRTIRSVLNRTPTHLIREIILVDDFSNDPDDCKQLIKLPKVKCLRNNERQGLVRSRIRGADIAQGTTLTFLDSHCEVNRDWLQPLLHRVKEDYTRVVCPVIDIINLDTFTYIESASELRGGFDWSLHFQWEQLSPEQKARRLDPTEPIRTPIIAGGLFVIDKAWFDYLGKYDMDMDIWGGENFEISFRVWMCGGSLEIVPCSRVGHVFRKKHPYVFPDGNANTYIKNTKRTAEVWMDEYKQYYYAARPFALERPFGNVESRLDLRKNLRCQSFKWYLENIYPELSIPKESSIQKGNIRQRQKCLESQRQNNQETPNLKLSPCAKVKGEDAKSQVWAFTYTQQILQEELCLSVITLFPGAPVVLVLCKNGDDRQQWTKTGSHIEHIASHLCLDTDMFGDGTENGKEIVVNPCESSLMSQHWDMVSS

SEQ ID NO: 12755 - protein, 956 aa, Homo sapiens
MEDCNVHSAASILASVKEQEARFERLTRALEQERRHVALQLERAQQPGMVSGGMGSGQPLPMAWQQLVLQEQSPGSQASLATMPEAPDVLEETVTVEEDPGTPTSHVSIVTSEDGTTRRTETKVTKTVKTVTTRTVRQVPVGPDGLPLLDGGPPLGPFADGALDRHFLLRGGGPVATLSRAYLSSGGGFPEGPEPRDSPSYGSLSRGLGMRPPRAGPLGPGPGDGCFTLPGHREAFPVGPEPGPPGGRSLPERFQAEPYGLEDDTRSLAADDEGGPELEPDYGTATRRRPECGRGLHTRAYEDTADDGGELADERPAFPMVTAPLAQPERGSMGSLDRLVRRSPSVDSARKEPRWRDPELPEVLAMLRHPVDPVKANAAAYLQHLCFENEGVKRRVRQLRGLPLLVALLDHPRAEVRRRACGALRNLSYGRDTDNKAAIRDCGGVPALVRLLRAARDNEVRELVTGTLWNLSSYEPLKMVIIDHGLQTLTHEVIVPHSGWEREPNEDSKPRDAEWTTVFKNTSGCLRNVSSDGAEARRRLRECEGLVDALLHALQSAVGRKDTDNKSVENCVCIMRNLSYHVHKEVPGADRYQEAEPGPLGSAVGSQRRRRDDASCFGGKKAKGKKDGEMDRNFDTLDLPKRTEAAKGFELLYQPEVVRLYLSLLTESRNFNTLEAAAGALQNLSAGNWMWATYIRATVRKERGLPVLVELLQSETDKVVRAVAIALRNLSLDRRNKDLIGSYAMAELVRNVRNAQAPPRPGACLEEDTVVAVLNTIHEIVSDSLDNARSLLQARGVPALVALVASSQSVREAKAASHVLQTVWSYKELRGTLQKDGWTKARFQSAAATAKGPKGALSPGGFDDSTLPLVDKSLEGEKTGSRDVIPMDALGPDGYSTVDRRERRPRGASSAGEASEKEPLKLDPSRKAPPPGPSRPAVRLVDAVGDAKPQPVDSWV

SEQ ID NO: 12756 - protein, 1462 aa, Homo sapiens
MSKVIQKKNHWTSRVHECTVKRGPQGELGVTVLGGAEHGEFPYVGAVAAVEAAGLPGGGEGPRLGEGELLLEVQGVRVSGLPRYDVLGVIDSCKEAVTFKAVRQGGRLNKDLRHFLNQRFQKGSPDHELQQTIRDNLYRHAVPCTTRSPREGEVPGVDYNFLTVKEFLDLEQSGTLLEVGTYEGNYYGTPKPPSQPVSGKVITTDALHSLQSGSKQSTPKRTKSYNDMQNAGIVHAENEEEDDVPEMNSSFTADSGEQEEHTLQETALPPVNSSIIAAPITDPSQKFPQYLPLSAEDNLGPLPENWEMAYTENGEVYFIDHNTKTTSWLDPRCLNKQQKPLEECEDDEGVHTEELDSELELPAGWEKIEDPVYGIYYVDHINRKTQYENPVLEAKRKKQLEQQQQQQQQQQQQQQQQQQQQTEEWTEDHSALVPPVIPNHPPSNPEPAREVPLQGKPFFTRNPSELKGKFIHTKLRKSSRGFGFTVVGGDEPDEFLQIKSLVLDGPAALDGKMETGDVIVSVNDTCVLGHTHAQVVKIFQSIPIGASVDLELCRGYPLPFDPDDPNTSLVTSVAILDKEPIIVNGQETYDSPASHSSKTGKVNGMKDARPSSPADVASNSSHGYPNDTVSLASSIATQPELITVHIVKGPMGFGFTIADSPGGGGQRVKQIVDSPRCRGLKEGDLIVEVNKKNVQALTHNQVVDMLVECPKGSEVTLLVQRGGLPVPKKSPKSQPLERKDSQNSSQHSVSSHRSLHTASPSHSTQVLPEFPPAEAQAPDQTDSSGQKKPDPFKIWAQSRSMYENRLPDYQEQDIFLWRKETGFGFRILGGNEPGEPIYIGHIVPLGAADTDGRLRSGDELICVDGTPVIGKSHQLVVQLMQQAAKQGHVNLTVRRKVVFAVPKTENEVPSPASSHHSSNQPASLTEEKRTPQGSQNSLNTVSSGSGSTSGIGSGGGGGSGVVSTVVQPYDVEIRRGENEGFGFVIVSSVSRPEAGTTFGNACVAMPHKIGRIIEGSPADRCGKLKVGDRILAVNGCSITNKSHSDIVNLIKEAGNTVTLRIIPGDESSNATLLTNAEKIATITTTHTPSQQGTQETRNTTKPKQESQFEFKAPQATQEQDFYTVELERGAKGFGFSLRGGREYNMDLYVLRLAEDGPAERCGKMRIGDEILEINGETTKNMKHSRAIELIKNGGRRVRLFLKRGDGSVPEYDPSSDRHGPATGPQGVPEVRAGPDRRQHPSLESSYPPDLHKSSPHGEKRAHARDPKGSREYSRQPNEHHTWNGTSRKPDSGACRPKDRAPEGRRDAQAERAAAANGPKRRSPEKRREGTRSADNTLERREKHEKRRDVSPERRRERSPTRRRDGSPSRRRRSLERLLEQRRSPERRRGGSPERRAKSTDRRRARSPERRRERSLDKRNREDRASHREREEANLKQDAGRSSRHPPEQRRRPYKECSTDLSI

SEQ ID NO: 12757 - protein, 802 aa, Homo sapiens
MPVAEAPQVAGGQGDGGDGEEAEPEGMFKACEDSKRKARGYLRLVPLFVLLALLVLASAGVLLWYFLGYKAEVMVSQVYSGSLRVLNRHFSQDLTRRESSAFRSETAKAQKMLKELITSTRLGTYYNSSSVYSFGEGPLTCFFWFILQIPEHRRLMLSPEVVQALLVEELLSTVNSSAAVPYRAEYEVDPEGLVILEASVKDIAALNSTLGCYRYSYVGQGQVLRLKGPDHLASSCLWHLQGPKDLMLKLRLEWTLAECRDRLAMYDVAGPLEKRLITSVYGCSRQEPVVEVLASGAIMAVVWKKGLHSYYDPFVLSVQPVVFQACEVNLTLDNRLDSQGVLSTPYFPSYYSPQTHCSWHLTVPSLDYGLALWFDAYALRRQKYDLPCTQGQWTIQNRRLCGLRILQPYAERIPVVATAGITINFTSQISLTGPGVRVHYGLYNQSDPCPGEFLCSVNGLCVPACDGVKDCPNGLDERNCVCRATFQCKEDSTCISLPKVCDGQPDCLNGSDEEQCQEGVPCGTFTFQCEDRSCVKKPNPQCDGRPDCRDGSDEEHCDCGLQGPSSRIVGGAVSSEGEWPWQASLQVRGRHICGGALIADRWVITAAHCFQEDSMASTVLWTVFLGKVWQNSRWPGEVSFKVSRLLLHPYHEEDSHDYDVALLQLDHPVVRSAAVRPVCLPARSHFFEPGLHCWITGWGALREGGPISNALQKVDVQLIPQDLCSEVYRYQVTPRMLCAGYRKGKKDACQGDSGGPLVCKALSGRWFLAGLVSWGLGCGRPNYFGVYTRITGVISWIQQVVT

SEQ ID NO: 12758 - protein, 457 aa, Homo sapiens
TGFTWQDDYTQYVMDQELADLPKTYLRRPEASSPARPSKHSVGSERRYSREGGAALANALRRHLPFLEALSQAPASDVLARTHTAQDRPPAEGDDRFSESILTYVAHTSALTYPPGSRTQLREDLLPRTLGQLQPDELSPKVDSGVDRHHLMAALSAYAAQRPPAPPGEGSLEPQYLLRAPSRMPRPLLAPAAPQKWPSPLGDSEDPSSTGDGARIHTLLKDLQRQPAEVRGLSGLELDGMAELMAGLMQGVDHGVARGSPGRAALGESGEQADGPKATLRGDSFPDDGVQDDDDRLYQEVHRLSATLGGLLQDHGSRLLPGALPFARPLDMERKKSEHPESSLSSEEETAGVENVKSQTYSKDLLGQQPHSEPGAAAFGELQNQMPGPSKEEQSLPAGAQEALSDGLQLEVQPSEEEARGYIVTDRDPLRPEEGRRLVEDVARLLQVPSSAFADVE

SEQ ID NO: 12759 - protein, 451 aa, Homo sapiens
MEAGPPGSARPAEPGPCLSGQRGADHTASASLQSVAGTEPGRHPQAVAAVLPAGGCGERMGVPTPKQFCPILERPLISYTLQALERVCWIKDIVVAVTGENMEVMKSIIQKYQHKRISLVEAGVTRHRSIFNGLKALAEDQINSKLSKPEVVIIHDAVRPFVEEGVLLKVVTAAKEHGAAGAIRPLVSTVVSPSADGCLDYSLERARHRASEMPQAFLFDVIYEAYQQCSDYDLEFGTECLQLALKYCCTKAKLVEGSPDLWKVTYKRDLYAAESIIKERISQEICVVMDTEEDNKHVGHLLEEVLKSELNHVKVTSEALGHAGRHLQQIILDQCYNFVCVNVTTSDFQETQKLLSMLEESSLCILYPVVVVSVHFLDFKLVPPSQKMENLMQIREFAKEVKERNILLYGLLISYPQDDQKLQESLRQGAIIIASLIKERNSGLIGQLLIA

SEQ ID NO: 12760 - protein, 218 aa, Homo sapiens
MALVPYEETTEFGLQKFHKPLATFSFANHTIQIRQDWRHLGVAAVVWDAAIVLSTYLEMGAVELRGRSAVELGAGTGLVGIVAALLGAHVTITDRKVALEFLKSNVQANLPPHIQTKTVVKELTWGQNLGSFSPGEFDLILGADIIYLEETFTDLLQTLEHLCSNHSVILLACRIRYERDNNFLAMLERQFTVRKVHYDPEKDVHIYEAQKRNQKEDL

SEQ ID NO: 12761 - protein, 209 aa, Homo sapiens
MLTNVISRYTGYFPVIFRKAREFIEILFGISLREVDPDDSYVFVNTLDLTSEGCLSDEQGMSQNRLLILILSIIFIKGTYASEEVIWDVLSGIGVRAGREHFAFGEPRELLTKVWVQEHYLEYREVPNSSPPRYEFLWGPRAHSEVIKRKVVEFLAMLKNTVPITFPSSYKDALKDVEERAQAIIDTTDDSTATESASSSVMSPSFSSE

SEQ ID NO: 12762 - protein, 942 aa, Homo sapiens [sequence omitted]

SEQ ID NO: 12763 - protein, 279 aa, Homo sapiens
MLRYPYFCRMYKECLSCWLESGIPNLGVWPNRIHTTAEKYREYEAREQTDQTQAQELHRSQDRDFETMAKLHIPVMVDEVVHCLSPQKGQIFLDMTFGSGGHTKAILQKESDIVLYALDRDPTAYALAEHLSELYPKQIRAMLGQFSQAEALLMKAGVQPGTFDGVLMDLGCSSMQLDTPERGFSLRKDGPLDMRMDGGRSTGTCIYPKNIRGGEACQENRFSNCSGTQHLPHHQNPAACQHRCRSISSLCYLYTERLTTAIYPYCHQDFPGSSHICEQ

SEQ ID NO: 12764 - protein, 1145 aa, Homo sapiens
MVHCDTAVGTPDYISPEVLKSQGGDGFYGRECDWWSVGVFLYEMLVGDTPFYADSLVGTYSKIMDHKNSLCFPEDAEISKHAKNLICAFLTDREVRLGRNGVEEIRQHPFFKNDQWHWDNIRETAAPVVPELSSDIDSSNFDDIEDDKGDVETFPIPKAFVGNQLPFIGFTYYRENLLLSDSPSCRETDSIQSRKNEESQEIQKKLYTLEEHLSNEMQAKEELEQKCKSVNTRLEKTAKELEEEITLRKSVESALRQLEREKALLQHKNAEYQRKADHEADKKRNLENDVNSLKDQLEDLKKRNQNSQISTEKVNQLQRQLDETNALLRTESDTAARLRKTQAESSKQIQQLESNNRDLQDKNCLLETAKLKLEKEFINLQSALESERRDRTHGSEIINDLQGRICGLEEDLKNGKILLAKVELEKRQLQERFTDLEKEKSNMEIDMTYQLKVIQQSLEQEEAEHKATKARLADKNKIYESIEEAKSEAMKEMEKKLLEERTLKQKVENLLLEAEKRCSLLDCDLKQSQQKINELLKQKDVLNEDVRNLTLKIEQETQKRCLTQNDLKMQTQQVNTLKMSEKQLKQENNHLMEMKMNLEKQNAELRKERQDADGQMKELQDQLEAEQYFSTLYKTQVRELKEECEEKTKLGKELQQKKQELQDERDSLAAQLEITLTKADSEQLARSIAEEQYSDLEKEKIMKELEIKEMMARHKQELTEKDATIASLEETNRTLTSDVANLANEKEELNNKLKDVQEQLSRLKDEEISAAAIKAQFEKQLLTERTLKTQAVNKLAEIMNRKEPVKRGNDTDVRRKEKENRKLHMELKSEREKLTQQMIKYQKELNEMQAQIAEESQIRIELQMTLDSKDSDIEQLRSQLQALHIGLDSSSIGSGPGDAEADDGFPESRLEGWLSLPVRNNTKKFGWVKKYVIVSSKKILFYDSEQDKEQSNPYMVLDIDKLFHVRPVTQTDVYRADAKEIPRIFQILYANEGESKKEQEFPVEPVGEKSNYICHKGHEFIPTLYHFPTNCEACMKPLWHMFKPPPALECRRCHIKCHKDHMDKKEEIIAPCKVYYDISTAKNLLLLANSTEEQQKWVSRLVKKIPKKPPAPDPFARSSPRTSMKIQQNQSIRRPSRQLAPNKPS

SEQ ID NO: 12765 - protein, 721 aa, Homo sapiens
MERAAPSRRVPLPLLLLGGLALLAAGVDADVLLEACCADGHRMATHQKDCSLPYATESKECRAVGLASLCQDLNGAWAVWKVGRASQAEGTASARAQRRGMVQEQCCHSQLEELHCATGISLANEQDRCATPHGDNASLEATFVKRCCHCCLLGRAAQAQGQSCEYSLMVGYQCGQVFQACCVKSQETGDLDVGGLQETDKIIEVEEEQEDPYLNDRCRGGGPCKQQCRDTGDEVVCSCFVGYQLLSDGVSCEDVNECITGSHSCRLGESCINTVGSFRCQRDSSCGTGYELTEDNSCKDIDECESGIHNCLPDFICQNTLGSFRCRPKLQCKSGFIQDALGNCIDINECLSISAPCPIGHTCINTEGSYTCQKNVPNCGRGYHLNEEGTRCVDVDECAPPAEPCGKGHRCVNSPGSFRCECKTGYYFDGISRMCVDVNECQRYPGRLCGHKCENTLGSYLCSCSVGFRLSVDGRSCEDINECSSSPCSQECANVYGSYQCYCRRGYQLSDVDGVTCEDIDECALPTGGHICSYRCINIPGSFQCSCPSSGYRLAPNGRNCQDIDECVTGIHNCSINETCFNIQGGFRCLAFECPENYRRSAATRCERLPCHENRECSKLPLRITYYHLSFPTNIQAPAVVFRMGPSSAVPGDSMQLAITGGNEEGFFTTRKVSPHSGVVALTKPVPEPRDLLLTVKMDLSRHGTVSSFVAKLFIFVSAEL

SEQ ID NO: 12766 - protein, 1196 aa, Homo sapiens
MASVWKRLQRVGKHASKFQFVASYQELMVECTKKWQPDKLVVVWTRRSRRKSSKAHSWQPGIKNPYRGVVVWPVPENIEITVTLFKDPHAEEFEDKEWTFVIENESPSGRRKALATSSINMKQYASPMPTQTDVKLKFKPLSKKVVSAALQFSLSCIFLREGKATDEDMQSLASLMSMKQADIGNLDDFEEDNEDDDENRVNQEEKAAKITELINKLNFLDEAEKDLATVNSNPFDDPDAAELNPFGDPDSEEPITETASPRKTEDSFYNNSYNPFKEVQTPQYLNPFDEPEAFVTIKDSPPQSTKRKNIRPVDMSKYLYADSSKTEEEELDESNPFYEPKSTPPPNNLVNPVQELETERRVKRKAPAPPVLSPKTGVLNENTVSAGKDLSTSPKPSPIPSPVLGRKPNASQSLLVWCKEVTKNYRGVKITNFTTSWRNGLSFCAILHHFRPDLIDYKSLNPQDIKENNKKAYDGFASIGISRLLEPSDMVLLAIPDKLTVMTYLYQIRAHFSGQELNVVQIEENSSKSTYKVGNYETDTNSSVDQEKFYAELSDLKREPELQQPISGAVDFLSQDDSVFVNDSGVGESESEHQTPDDHLSPSTASPYCRRTKSDTEPQKSQQSSGRTSGSDDPGICSNTDSTQAQVLLGKKRLLKAETLELSDLYVSDKKKDMSPPFICEETDEQKLQTLDIGSNLEKEKLENSRSLECRSDPESPIKKTSLSPTSKLGYSYSRDLDLAKKKHASLRQTESDPDADRTTLNHADHSSKIVQHRLLSRQEELKERARVLLEQARRDAALKAGNKHNTNTATPFCNRQLSDQQDEERRRQLRERARQLIAEARSGVKMSELPSYGEMAAEKLKERSKASGDENDNIEIDTNEEIPEGFVVGGGDELTNLENDLDTPEQNSKLVDLKLKKLLEVQPQVANSPSSAAQKAVTESSEQDMKSGTEDLRTERLQKTTERFRNPVVFSKDSTVRKTQLQSFSQYIENRPEMKRQRSIQEDTKKGNEEKAAITETQRKPSEDEVLNKGFKDTSQYVVGELAALENEQKQIDTRAALVEKRLRYLMDTGRNTEEEEAMMQEWFMLVNKKNALIRRMNQLSLLEKEHDLERRYELLNRELRAMLAIEDWQKTEAQKRREQLLLDELVALVNKRDALVRDLDAQEKQAEEEDEHLERTLEQNKGKMAKKEEKCVLQ

SEQ ID NO: 12767 - protein, 497 aa, Homo sapiens
MAAPPAPAAKGSPQPEPHAPEPGPGSAKRGREDSRAGRLSFCTKVCYGIGGVPNQIASSATAFYLQLFLLDIAQIPAAQVSLVLFGGKVSGAAADPVAGFFINRSQRTGSGRLMPWVLGCTPFIALAYFFLWFLPPFTSLRGLWYTTFYCLFQALATFFQVPYTALTMLLTPCPRERDSATAYRMTVEMAGTLMGATVHGLIVSGAHRPHRCEATATPGPVTVSPNAAHLYCIAAAVVVVTYPVCISLLCLGVKERPDPSAPASGPGLSFLAGLSLTTRHPPYLKLVISFLFISAAVQVEQSYLVLFCTHASQLHDHVQGLVLTVLVSAVLSTPLWEWVLQRFGKKTSAFGIFAMVPFAILLAAVPTAPVAYVVAFVSGVSIAVSLLLPWSMLPDVVDDFQLQHRHGPGLETIFYSSYVFFTKLSGACALGISTLSLEFSGYKAGVCKQAEEVVVTLKVLIGAVPTCMILAGLCILMVGSTPKTPSRDASSRLSLRR

SEQ ID NO: 12768 - protein, 911 aa, Homo sapiens
MKGSNRNKDHSAEGEGVGKRPKRKCLQWHPLLAKKLLDFSEEEEEEDEEEDIDKVQLLGADGLEQDVGETEDDESPEQRARRPMNAFLLFCKRHRSLVRQEHPRLDNRGATKILADWWAVLDPKEKQKYTDMAKEYKDAFMKANPGYKWCPTTNKPVKSPTPTVNPRKKLWAFPSDSSRDLPSPKKAKTEEMPQLNFGMADPTQMGGLSMLLLAGEHALGTPEVSSGTCRPDVSESPELRQKSPLFQFAEISSSTSHSDASTKQCQTSALFQFAEISSNTSQLGGAEPVKRCGKSALFQLAEMCLASEGMKMEESKLIKAKESDGGRIKELEKGKEEKEIKMEKTDETRLQKEAEFEKSAKENLRDSKELRNFEALQIDDIMAIKMEDPKEIRKEELEEDHKCSHFPDFSYSASSKIIISDVPSRKDHMCHPHGIMIIEDPAALNKPEKLKKKKKKSKMDRHGNDKSTPKKTCKKRQSSESDIESVIYTIEAVAKGDWGIEKLGDTPRKKVRTSSSGKGSILDAKPPKKKVKSREKKMSKEKSSDTTKESRPPDFISISASKNISGETPEGIKAEPLTPMEDALPPSLSGQAKPEDSDCHRKIETCGSRKSERSCKGALYKTLVSEGMLTSLRANVDRGKRSSGKGNSSDHEGCWNEESWTFSQSGTSGSKKFKKTKPKEDCLLGSAKLDEEFEKKFNSLPQYSPVTFDRKCVPVPRKKKKTGNVSSEPTKTSKGSGDKWSNKQLFLDAIHPTEAIFSEDRNTMEPVHKVKNIPSIFNTPEPTTTQEPLVGSQKRKARKTKITHLVRTADGRVSPAGGTLDDKPKEQLQRSLPKATETDCNDKCSHNTEVGETRSSTPEMPAVSAFFSLAALAEVAAMENVHRGQRSTPLTHDGQPKEMPQAPVLISCADQ

SEQ ID NO: 12769 - protein, 104 aa, Homo sapiens
MSTVKEAAHRLSKSEMSLYAVLDLKKGASPEDFKKSYRHLSSCVLCSLVAVSVVAAVFAVEHLNHHLSRIVGENISRMSRVSLQGQEPNVILEARKIAKMIFKR

SEQ ID NO: 12770 - protein, 729 aa, Homo sapiens
LPTGFVAPILCVLLPSPTREAATVASATGDSASERESAAPAAAPTAEAPPPSVVTRPEPQALPSPAIRAPLPDLYPFGTMRGGGFGDRDRDRDRGGFGARGGGGLPPKKFGNPGERLRKKKWDLSELPKFEKNFYVEHPEVARLTPYEVDELRRKKEITVRGGDVCPKPVFAFHHANFPQYVMDVLMDQHFTEPTPIQCQGFPLALSGRDMVGIAQTGSGKTLAYLLPAIVHINHQPYLERGDGPICLVLAPTRELAQQVQQVADDYGKCSRLKSTCIYGGAPKGPQIRDLERGVEICIATPGRLIDFLESGKTNLRRCTYLVLDEADRMLDMGFEPQIRKIVDQIRPDRQTLMWSATWPKEVRQLAEDFLRDYTQINVGNLELSANHNILQIVDVCMESEKDHKLIQLMEEIMAEKENKTIIFVETKRRCDDLTRRMRRDGWPAMCIHGDKSQPERDWVLNEFRSGKAPILIATDVASRGLDVEDVKFVINYDYPNSSEDYVHRIGRTARSTNKGTAYTFFTPGNLKQARELIKVLEEANQAINPKLMQLVDHRGGGGGGGGRSRYRTTSSANNPNLMYQDECDRRLRGVKDGGRRDSASYRDRSETDRAGYANGSGYGSPNSAFGAQAGQYTYGQGTYGAAAYGTSSYTAQEYGAGTYGASSTTSTGRSSQSSSQQFSGIGRSGQQPQPLMSQQFAQPPGATNMIGYMGQTAYQYPPPPPPPPPSRK

SEQ ID NO: 12771 - protein, 469 aa, Homo sapiens
MAKRVAIVGAGVSGLASIKCCLEEGLEPTCFERSDDLGGLWRFTTKVCSVTKCSDSAVSGQWEVVTMHEEKQESAIFDAVMVCTGFLTNPYLPLDSFPGINAFKGQYFHSRQYKHPDIFKDKRVLVIGMGNSGTDIAVEASHLAEKVFLSTTGGGWVISRIFDSGYPWDMVFMTRFQNMLRNSLPTPIVTWLMERKINNWLNHANYGLIPEDRTQLKEFVLNDELPGRIITGKVFIRPSIKEVKENSVIFNNTSKEEPIDIIVFATGYTFAFPFLDESVVKVEDGQASLYKYIFPAHLQKPTLAIIGLIKPLGSMIPTGETQARWAVRVLKGVNKLPPPSVMIEEINARKENKPSWFGLCYCKALQSDYITYIDELLTYINAKPNLFSMLLTDPHLALTVFFGPCSPYQFRLTGPGKWEGARNAIMTQWDRTFKVIKARVVQESPSPFESFLKVFSFLALLVAIFLIFL

SEQ ID NO: 12772 - protein, 2108 aa, Homo sapiens
MNSVAGNKERLAVSTRGKKYGVNEVCSPTKPAAPFSPESWYRKAYEESRAGSRPTPEGAGSALGSSGTPSPGSGTSSPSSFTGSPGPASPGIGTSSPGSLGGSPGFGTGSPGSGSGGGSSPGSDRGVWCENCNARLVELKRQALRLLLPGPFPGKDPAFSAVIHDKLQVPNTIRKAWNDRDNRCDICATHLNQLKQEAIQMVLTLEQAAGSEHYDASPCSPPPLSNIPTLVGSRHVGGLQQPRDWAFVPAPCATSNYTGFANKHGSKPSSLGVSNGAEKKSGSPTHQAKVSLQMATSPSNGNILNSVAIQAHQYLDGTWSLSRTNGVTLYPYQISQLMTESSREGLTEAVLNRYNADKPSACSVPASQGSCVASETSTGTSVAASFFARAAQKLNLSSKKKKHRPSTSSAAEPPLFATSFSGILQTSPPPAPPCLLRAVNKVKDTPGLGKVKVMLRICSTLARDTSESSSFLKVDPRKKQITLYDPLTCGGQNAFQKRGNQVPPKMFAFDAVFPQDASQAEVCAGTVAEVIQSVVNGADGCVFCFGHAKLGKSYTMIGKDDSMQNLGIIPCAISWLFKLINERKEKTGARFSVRVSAVEVWGKEENLRDLLSEVATGSLQDGQSPGVYLCEDPICGTQLQNQSELRAPTAEKAAFFLDAAIASRRSHQQDCDEDDHRNSHVFFTLHIYQYRMEKSGKGGMSGGRSRLHLIDLGSCVKALSKNREGGSGLCLSLSALGNVILALVNGSKHIPYKESKLAMLLRESLGNMNCRTTMIAHISAAVGSYAETLSTIQIASRVLRMKKKKTKYTSSSSGGESSCEEGRMRRPTQLRPFHTRATVDPDFPIAHLSSDPDYSSSSEQSCDTVIYIGPNGTALSDKELTDNEGPPDFVPIVPALQKTRGDSRPAEAGEAAAGKSERDCLKCNTFAELQERLDCIDGSEEPSSFPFEELPAQFGPEQASRGPRLSQAAGASPLSESDKEDNGSEGQLTNREGPELPASKMQRSHSPVPAAAPAHSPSPASPRSVPGSSSQHSASPLVQSPSLQSSRESLNSCGFVEGKPRPMGSPRLGIASLSKTSEYKPPSSPSQRCKVYTQKGVLPSPAPLPPSSKDSGVASRESLLQPEVRTPPVGMSPQVLKKSMSAGSEGFPETPVDDEQQAATPSESKKEILSTTMVTVQQPLELNGEDELVFTLVEELTISGVLDSGRPTSIISFNSDCSARALASGSRPVSIISSISEDLECYSSTAPVSEVSITQFLPLPKMSLDEKAQDAGSRRSSISSWLSEMSAGSEGEQSCHSFIAQTCFGHGEAMAEPVASEFVSSLQNTAVVCREKPKASPDNLLILSEMGDDSFNKAAPIKGCKISTVSKAMVTISNTANLSSCEGYIPMKTNITVYPCIAMSPRNIQEPEAPTATPKAGPTLAQSRESKENSAKKEMKFEDPWLKREEEVKKETAHPNEEGMMRCETATGPSNAETRAEQEQDGKPSPGDRLSSSSGEVSASPVTDNFRRVVDGCEMALPGLATQSPVHPNKSVKSSSLPRAFQKASRQEEPDSLSYYCAAETNGVGAASGTPPSKATLEGKVASPKHCVLARPKGTPPLPPVRKSSLDQKNRASPQHSASGSGTSSPLNQPAAFPAGLPDEPSGKTKDASSSSKLFSAKLEQLASRSNSLGRATVSHYECLSLERAESLSSVSSRLHAGKDGTMPRAGRSLGRSAGTSPPSSGASPKAGQSKISAVSRLLLASPRARGPSASTTKTLSFSTKSLPQAVGQGSSSPPGGKHTPWSTQSLSRNRSSGLASKLPLRAVSGRISELLQGGAGARGLQLRAGPEAEARGGALAEDEPAAAHLLPSPYSKITPPRRPHRCSSGHGSDNSSVLSGELPPAMGKTALFYHSGGSSGYESVMRDSEATGSASSAQDSTSENSSSVGGRCRSLKTPKKRSNPGSQRRRLIPALSLDTSSPVRKPPNSTGVRWVDGPLRSSPRGLGEPFEIKVYEIDDVERLQRRRGGASKEAMCFNAKLKILEHRQQRIAEVRAKYEWLMKELEATKQYLMLDPNKWLSEFDLEQVWELDSLEYLEALECVTERLESRVNFCKAHLMMITCFDITSRRR

SEQ ID NO: 12773 - protein, 477 aa, Homo sapiens
MDGFYDQQVPYMVTNSQRGRNCNEKPTNVRKRKFINRDLAHDSEELFQDLSQLQETWLAEAQVPDNDEQFVPDYQAESLAFHGLPLKIKKEPHSPCSEISSACSQEQPFKFSYGEKCLYNVSAYDQKPQVGMRPSNPPTPSSTPVSPLHHASPNSTHTPKPDRAFPAHLPPSQSIPDSSYPMDHRFRRQLSEPCNSFPPLPTMPREGRPMYQRQMSEPNIPFPPQGFKQEYHDPVYEHNTMVGSAASQSFPPPLMIKQEPRDFAYDSEVPSCHSIYMRQEGFLAHPSRTEGCMFEKGPRQFYDDTCVVPEKFDGDIKQEPGMYREGPTYQRRGSLQLWQFLVALLDDPSNSHFIAWTGRGMEFKLIEPEEVARRWGIQKNRPAMNYDKLSRSLRYYYEKGIMQKVAGERYVYKFVCDPEALFSMAFPDNQRPLLKTDMERHINEEDTVPLSHFDESMAYMPEGGCCNPHPYNEGYVY

SEQ ID NO: 12774 - protein, 1040 aa, Homo sapiens
MISAQTLTGRVLVVLVFALSIGALVIYFIDSSNPIESCQNFYKDFTLQIDMAFNVFFLLYFGLRFIAANDKLWFWLEVNSVVDFFTVPPVFVSVYLNRSWLGLRFLRALRLIQFSEILQFLNILKTSNSIKLVNLLSIFISTWLTAAGFIHLVENSGDPWENFQNNQALTYWECVYLLMVTMSTVGYGDVYAKTTLGRLFMVFFILGGLAMFASYVPEIIELIGNRKKYGGSYSAVSGRKHIVVCGHITLESVSNFLKDFLHKDRDDVNVEIVFLHNISPNLELEALFKRHFTQVEFYQGSVLNPHDLARVKIESADACLILANKYCADPDAEDASNIMRVISIKNYHPKIRIITQMLQYHNKAHLLNIPSWNWKEGDDAICLAELKLGFIAQSCLAQGLSTMLANLFSMRSFIKIEEDTWQKYYLEGVSNEMYTEYLSSAFVGLSFPTVCELCFVKLKLLMIAIEYKSANRESRILINPGNHLKIQEGTLGFFIASDAKEVKRAFFYCKACHDDITDPKRIKKCGCKRLIYFEDEQPSTLSPKKKQRNGGMRNSPNTSPKLMRHDPLLIPGNDQIDNMDSNVKKYDSTGMFHWCAPKEIEKVILTRSEAAMTVLSGHVVVCIFGDVSSALIGLRNLVMPLRASNFHYHELKHIVFVGSIEYLKREWETLHNFPKVSILPGTPLSRADLRAVNINLCDMCVILSANQNNIDDTSLQDKECILASLNIKSMQFDDSIGVLQANSQGFTPPGMDRSSPDNSPVHGMLRQPSITTGVNIPIITELAKPGKLPLVSVNQEKNSGTHILMITELVNDTNVQFLDQDDDDDPDTELYLTQPFACGTAFAVSVLDSLMSATYFNDNILTLIRTLVTGGATPELEALIAEENALRGGYSTPQTLANRDRCRVAQLALLDGPFADLGDGGCYGDLFCKALKTYNMLCFGIYRLRDAHLSTPSQCTKRYVITNPPYEFELVPTDLIFCLMQFDHNAGQSRASLSHSSHSSQSSSKKSSSVHSIPSTANRQNRPKSRESRDKQKYVQEERL

SEQ ID NO: 12775 - protein, 1266 aa, Homo sapiens [sequence omitted]

SEQ ID NO: 12776 - protein, 1198 aa, Homo sapiens
MAPVYEGMASHVQVFSPHTLQSSAFCSVKKLKIEPSSNWDMTGYGSHSKVYSQSKNIPLSQPATTTVSTSLPVPNPSLPYEQTIVFPGSTGHIVVTSASSTSVTGQVLGGPHNLMRRSTVSLLDTYQKCGLKRKSEEIENTSSVQIIEEHPPMIQNNASGATVATATTSTATSKNSGSNSEGDYQLVQHEVLCSMTNTYEVLEFLGRGTFGQVVKCWKRGTNEIVAIKILKNHPSYARQGQIEVSILARLSTESADDYNFVRAYECFQHKNHTCLVFEMLEQNLYDFLKQNKFSPLPLKYIRPVLQQVATALMKLKSLGLIHADLKPENIMLVDPSRQPYRVKVIDFGSASHVSKAVCSTYLQSRYYRAPEIILGLPFCEAIDMWSLGCVIAELFLGWPLYPGASEYDQIRYISQTQGLPAEYLLSAGTKTTRFFNRDTDSPYPLWRLKTPDDHEAETGIKSKEARKYIFNCLDDMAQVNMTTDLEGSDMLVEKADRREFIDLLKKMLTIDADKRITPIETLNHPFVTMTHLLDFPHSTHVKSCFQNMEICKRRVNMYDTVNQSKTPFITHVAPSTSTNLTMTFNNQLTTVHNQAPSSTSATISLANPEVSILNYPSTLYQPSAASMAAVAQRSMPLQTGTAQICARPDPFQQALIVCPPGFQGLQASPSKHAGYSVRMENAVPIVTQAPGAQPLQIQPGLLAQQAWPSGTQQILLPPAWQQLTGVATHTSVQHATVIPETMAGTQQLADWRNTHAHGSHYNPIMQQPALLTGHVTLPAAQPLNVGVAHVMRQQPTSTTSSRKSKQHQSSVRNVSTCEVSSSQAISSPQRSKRVKENTPPRCAMVHSSPACSTSVTCGWGDVASSTTRERQRQTIVIPDTPSPTVSVITISSDTDEEEEQKHAPTSTVSKQRKNVISCVTVHDSPYSDSSSNTSPYSVQQRAGHNNANAFDTKGSLENHCTGNPRTIIVPPLKTQASEVLVECDSLVPVNTSHHSSSYKSKSSSNVTSTSGHSSGSSSGAITYRQQRPGPHFQQQQPLNLSQAQQHITTDRTGSHRRQQAYITPTMAQAPYSFPHNSPSHGTVHPHLAAAAAAAHLPTQPHLYTYTAPAALGSTGTVAHLVASQGSARHTVQHTAYPASIVHQVPVSMGPRVLPSPTIHPSQYPAQFAHQTYISASPASTVYTGYPLSPAKVNQYPYI

SEQ ID NO: 12777 - protein, 266 aa, Homo sapiens
MDGPTRGHGLRKKRRSRSQRDRERRSRGGLGAGAAGGGGAGRTRALSLASSSGSDKEDNGKPPSSAPSRPRPPRRKRRESTSAEEDIIDGFAMTSFVTFEALEKDVALKPQERVEKRQTPLTKKKREALTNGLSFHSKKSRLSHPHHYSSDRENDRNLCQHLGKRKKMPKALRQLKPGQNSCRDSDSESASGESKGFHRSSSRERLSDSSAPSSLGTGYFRSGKMCLGEEACLKSGNDMKRDVSNTSSWASNRESFFSLVKLLKGF

SEQ ID NO: 12778 - protein, 488 aa, Homo sapiens
MVAERSPARSPGSWLFPGLWLLVLSGPGGLLRAQEQPSCRRAFDLYFVLDKSGSVANNWIEIYNFVQQLAERFVSPEMRLSFIVFSSQATIILPLTGDRGKISKGLEDLKRVSPVGETYIHEGLKLANEQIQKAGGLKTSSIIIALTDGKLDGLVPSYAEKEAKISRSLGASVYCVGVLDFEQAQLERIADSKEQVFPVKGGFQALKGIINSILAQSCTEILELQPSSVCVGEEFQIVLSGRGFMLGSRNGSVLCTYTVNETYTTSVKPVSVQLNSMLCPAPILNKAGETLDVSVSFNGGKSVISGSLIVTATECSNGIAAIIVILVLLLLLGIGLMWWFWPLCCKVVIKDPPPPPAPAPKEEEEEPLPTKKWPTVDASYYGGRGVGGIKRMEVRWGDKGSTEEGARLEKAKNAVVKIPEETEEPIRPRPPRPKPTHQPPQTKWYTPIKGRLDALWALLRRQYDRVSLMRPQEGDEGRCINFSRVPSQ

SEQ ID NO: 12779 - protein, 425 aa, Homo sapiens
MALTGYSWLLLSATFLNVGAEISITLEPAQPSEGDNVTLVVHGLSGELLAYSWYAGPTLSVSYLVASYIVSTGDETPGPAHTGREAVRPDGSLDIQGILPRHSGTYILQTFNRQLQTEVGYGHVQVHEILAQPTVLANSTALVERRDTLRLMCSSPSPTAEVRWFFNGGALPVALRLGLSPDGRVLARHGIRREEAGAYQCEVWNPVSVSRSEPINLTVYFGPERVAILQDSTTRTGCTIKVDFNTSLTLWCVSRSCPEPEYVWTFNGQALKNGQDHLNISSMTAAQEGTYTCIAKNTKTLLSGSASVVVKLSAAAVATMIVPVPTKPTEGQDVTLTVQGYPKDLLVYAWYRGPASEPNRLLSQLPSGTWIAGPAHTGREVGFPNCSLLVQKLNLTDTGRYTLKTVTVQGKTETLEVELQVAPLG

SEQ ID NO: 12780 - protein, 801 aa, Homo sapiens
MKEKAMIKTAKMQGNVMELVGSNPPQRNWKGIAIALLVILVICSLIVTSVILLTPAEDNSLSQKKKVTVEDLFSEDFKIHDPEAKWISDTEFIYREQKGTVRLWNVETNTSTVLIEGKKIESLRAIRYEISPDREYALFSYNVEPIYQHSYTGYYVLSKIPHGDPQSLDPPEVSNAKLQYAGWGPKGQQLIFIFENNIYYCAHVGKQAIRVVSTGKEGVIYNGLSDWLYEEEILKTHIAHWWSPDGTRLAYAAINDSRVPIMELPTYTGSIYPTVKPYHYPKAGSENPSISLHVIGLNGPTHDLEMMPPDDPRMREYYITMVKWATSTKVAVTWLNRAQNVSILTLCDATTGVCTKKHEDESEAWLHRQNEEPVFSKDGRKFFFIRAIPQGGRGKFYHITVSSSQPNSSNDNIQSITSGDWDVTKILAYDEKGNKIYFLSTEDLPRRRQLYSANTVGNFNRQCLSCDLVENCTYFSASFSHSMDFFLLKCEGPGVPMVTVHNTTDKKKMFDLETNEHVKKAINDRQMPKVEYRDIEIDDYNLPMQILKPATFTDTTHYPLLLVVDGTPGSQSVAEKFEVSWETVMVSSHGAVVVKCDGRGSGFQGTKLLHEVRRRLGLLEEKDQMEAVRTMLKEQYIDRTRVAVFGKDYGGYLSTYILPAKGENQGQTFTCGSALSPITDFKLYASAFSERYLGLHGLDNRAYEMTKVAHRVSALEEQQFLIIHPTADEKIHFQHTAELITQLIRGKANYSLQIYPDESHYFTSSSLKQHLYRSIINFFVECFRIQDKLLTVTAKEDEEED

SEQ ID NO: 12781 - protein, 718 aa, Homo sapiens
MSRGYSENNNFLNNNNQMVLDMILYPLIGIPQTINWETIARLVPGLTPKECAKRFDELKSSGSSPVDNQYNSLMAAGESPVETLATYIKSSLLDIHGEFQETPVGHDAVSKTGRHSIASTRNCSSESENCTTHNGGEMTEESEGPNMVIHVCDEAKNLKEDFTCPRDLLISEMKYFAEYLSMDAQRWEEVDISVHCDVHIFNWLIKYIKRNTKENKDCEMPTLEPGNVISILISSEFLKMDSLVEQCIQYCHKNMNAIVATPCNMNCINANLLTRIADLFSHNEVDDLKDKKDKFKSKLFCKKIERLFDPEYLNPDSRSNAATLYRCCLCKKLLTKETERRIPCIPGKINVDRRGNIVYIHIRDKTWDVHEYLNSLFEELKSWRDVYWRLWGTINWLTCSRCYQAFLCIEFSHCQYHSETVVYPTAASSLNTVGTGIYPCCNQKVLRFDPTQLTKGCKVRDHMVTLRDQGEGGDLPSCPTARMLDDLHKYRDVIVVPFSKDTVSDVGVGLCDEKGIECDVLLEPNTPWGPKTGELNAFLSLKNWTLQLKQQSLFSEEEEYTTGSEVTEDEVGDEEEVSKKQRKKEKPKKFTRQPKKQVSSPCAQRKEKALEKSASRDVSPFVMSMQKNKWDATRSLRFNQDAQREDDQRRMTEITGHLIKMRLGDLDRVKSKEAKEFAGGIYSRLEAQIKASVPVSARQSSSEKNTRSKSRFGQGRPA

SEQ ID NO: 12782 - protein, 472 aa, Homo sapiens
MYQRMLRCGAELGSPGGGGGGGGGGGAGGRLALLWIVPLTLSGLLGVAWGASSLGAHHIHHFHGSSKHHSVPIAIYRSPASLRGGHAGTTYIFSKGGGQITYKWPPNDRPSTRADRLAIGFSTVQKEAVLVRVDSSSGLGDYLELHIHQGKIGVKFNVGTDDIAIEESNAIINDGKYHVVRFTRSGGNATLQVDSWPVIERYPAGNNDNERLAIARQRIPYRLGRVVDEWLLDKGRQLTIFNSQATIIIGGKEQGQPFQGQLSGLYYNGLKVLNMAAENDANIAIVGNVRLVGEVPSSMTTESTATAMQSEMSTSIMETTTTLATSTARRGKPPTKEPISQTTDDILVASAECPSDDEDIDPCEPSSGGLANPTRAGGREPYPGSAEVIRESSSTTGMVVGIVAAAALCILILLYAMYKYRNRDEGSYHVDESRNYISNSAQSNGAVVKEKQPSSAKSSNKNKKNKDKEYYV

SEQ ID NO: 12783 - protein, 981 aa, Homo sapiens
VDFSSVVCLPPSVIAVNGLDGGGAGENDDEPVLVSLSAAPSPQSEAVANELQELSLQPELTLGLHPGRNPNLPPLSERKNVLQLKLQQRRTREELVSQGIMPPLKSPAAFHEQRRSLERARTEDYLKRKIRSRPERSELVRMHILEETSAEPSLQAKQLKLKRARLADDLNEKIAQRPGPMELVEKNILPVESSLKEAIIVGQVNYPKVADSSSFDEDSSDALSPEQPASHESQGSVPSPLEARVSEPLLSATSASPTQQSQPKSASEKSQRSKKAKELKPKVKKLKYHQYIPPDQKQDRGAPPMDSSYAKILQQQQLFLQLQILNQQQQQHHNYQAILPAPPKSAGEALGSSGTPPVRSLSTTNSSSSSGAPGPCGLARQNSTSLTGKPGALPANLDDMKVAELKQELKLRSLPVSGTKTELIERLRAYQDQISPVPGAPKAPAATSILHKAGEVVVAFPAARLSTGPALVAAGLAPAEVVVATVASSGVVKFGSTGSTPPVSPTPSERSLLSTGDENSTPGDTFGEMVTSPLTQLTLQASPLQILVKEEGPRAGSCCLSPGGRAELEGRDKDQMLQEKDKQIEALTRMLRQKQQLVERLKLQLEQEKRAQQPAPAPAPLGTPVKQENSFSSCQLSQQPLGPAHPFNPSLAAPATNHIDPCAVAPGPPSVVVKQEALQPEPEPVPAPQLLLGPQGPSLIKGVAPPTLITDSTGTHLVLTVTNKNADSPGLSSGSPQQPSSQPGSPAPAPSAQMDLEHPLQPLFGTPTSLLKKEPPGYEEAMSQQPKQQENGSSSQQMDDLFDILIQSGEISADFKEPPSLPGKEKPSPKTVCGSPLAAQPSPSAELPQAAPPPPGSPSLPGRLEDFLESSTGLPLLTSGHDGPEPLSLIDDLHSQMLSSTAILDHPPSPMDTSELHFVPEPSSTMGLDLADGHLDSMDWLELSSGGPVLSLAPLSTTAPSLFSTDFLDGHDLQLHWDSCL

SEQ ID NO: 12784 - protein, 1545 aa, Homo sapiens
MVQKKKFCPRLLDYLVIVGARHPSSDSVAQTPELLRRYPLEDHTEFPLPPDVVFFCQPEGCLSVRQRRMSLRDDTSFVFTLTDKDTGVTRYGICVNFYRSFQKRISKEKGEGGAGSRGKEGTHATCASEEGGTESSESGSSLQPLSADSTPDVNQSPRGKRRAKAGSRSRNSTLTSLCVLSHYPFFSTFRECLYTLKRLVDCCSERLLGKKLGIPRGVQRDTMWRIFTGSLLVEEKSSALLHDLREIEAWIYRLLRSPVPVSGQKRVDIEVLPQELQPALTFALPDPSRFTLVDFPLHLPLELLGVDACLQVLTCILLEHKVVLQSRDYNALSMSVMAFVAMIYPLEYMFPVIPLLPTCMASAEQLLLAPTPYIIGVPASFFLYKLDFKMPDDVWLVDLDSNRVIAPTNAEVLPILPEPESLELKKHLKQALASMSLNTQPILNLEKFHEGQEIPLLLGRPSNDLQSTPSTEFNPLIYGNDVDSVDVATRVAMVRFFNSANVLQGFQMHTRTLRLFPRPVVAFQAGSFLASRPRQTPFAEKLARTQAVEYFGEWILNPTNYAFQRIHNNMFDPALIGDKPKWYAHQLQPIHYRVYDSNSQLAEALSVPPERDSDSEPTDDSGSDSMDYDDSSSSYSSLGDFVSEMMKCDINGDTPNVDPLTHAALGDASEVEIDELQNQKEAEEPGPDSENSQENPPLRSSSSTTASSSPSTVIHGANSEPADSTEMDDKAAVGVSKPLPSVPPSIGKSNVDRRQAEIGEGAQKLLRPNSLRLASDSDAESDSRASSPNSTVSNTSTEGFGGIMSFASSLYRNHSTSFSLSNLTLPTKGAREKATPFPSLKGNRRALVDQKSSVIKHSPTVKREPPSPQGRSSNSSENQQFLKEVVHSVLDGQGVGWLNMKKVRRLLESEQLRVFVLSKLNRMVQSEDDARQDIIPDVEISRKVYKGMLDLLKCTVLSLEQSYAHAGLGGMASIFGLLEIAQTHYYSKEPDKRKRSPTESVNTPVGKDPGLAGRGDPKAMAQLRVPQLGPRAPSATGKGPKELDTRSLKEENFIASIGPEVIKPVFDLGETEEKKSQISADSGVSLTSSSQRTDQDSVIGVSPAVMIRSSSQDSEVSTVVSNSSGETLGADSDLSSNAGDGPGGEGSVHLASSRGTLSDSEIETNSATSTIFGKAHSLKPSIKEKLAGSPIRTSEDVSQRVYLYEGLLGKERSTLWDQMQFWEDAFLDAVMLEREGMGMDQGPQEMIDRYLSLGEHDRKRLEDDEDRLLATLLHNLISYMLLMKVNKNDIRKKVRRLMGKSHIGLVYSQQINEVLDQLANLNGRDLSIWSSGSRHMKKQTFVVHAGTDTNGDIFFMEVCDDCVVLRSNIGTVYERWWYEKLINMTYCPKTKVLCLWRRNGSETQLNKFYTKKCRELYYCVKDSMERAAARQQSIKPGPELGGEFPVQDLKTGEGGLLQVTLEGINLKFMHNQVFIELNHIKKCNTVRGVFVLEEFVPEIKEVVSHKYKTPMAHEICYSVLCLFSYVAAVHSSEEDLRTPPRPVSS

SEQ ID NO: 12785 - protein, 270 aa, Homo sapiens
MCERSLYRAGYVGSLLNLQSPDSFYFSNLRPNGGQLAALPPISYPRGALPWAATPASCAPAQPAGATAFGGFSQPYLAGSGPLGLQPPTAKDGPEEQAKFYAPEAAAGPEERGRTRPSFAPESSLAPAVAALKAAKYDYAGVGRATPGSTTLLQGAPCAPGFKDDTKGPLNLNMTVQAAGVASCLRPSLPDGLPWGAAPGRARKKRKPYTKQQIAELENEFLVNEFINRQKRKELSNRLNLSDQQVKIWFQNRRMKKKRVVLREQALALY

SEQ ID NO: 12786 - protein, 711 aa, Homo sapiens
MNRNISHQKGDDENTFKILVATDIHLGFMEKDAVRGNDTFVTLDEILRLAQENEVDFILLGGDLFHENKPSRKTLHTCLELLRKYCMGDRPVQFEILSDQSVNFGFSKFPWVNYQDGNLNISIPVFSIHGNHDDPTGADALCALDILSCAGFVNHFGRSMSVEKIDISPVLLQKGSTKIALYGLGSIPDERLYRMFVNKKVTMLRPKEDENSWFNLFVIHQNRSKHGSTNFIPEQFLDDFIDLVIWGHEHECKIAPTKNEQQLFYISQPGSSVVTSLSPGEAVKKHVGLLRIKGRKMNMHKIPLHTVRQFFMEDIVLANHPDIFNPDNPKVTQAIQSFCLEKIEEMLENAERERLGNSHQPEKPLVRLRVDYSGGFEPFSVLRFSQKFVDRVANPKDIIHFFRHREQKEKTGEEINFGKLITKPSEGTTLRVEDLVKQYFQTAEKNVQLSLLTERGMGEAVQEFVDKEEKDAIEELVKYQLEKTQRFLKERHIDALEDKIDEEVRRFRETRQKNTNEEDDEVREAMTRARALRSQSEESASAFSADDLMSIDLAEQMANDSDDSISAATNKGRGRGRGRRGGRGQNSASRGGSQRGRADTGLETSTRSRNSKTAVSASRNMSIIDAFKSTRQQPSRNVTTKNYSEVIEVDESDVEEDIFPTTSKTDQRWSSTSSSKIMSQSQVSKGVDFESSEDDDDDPFMNTSSLRRNRR

SEQ ID NO: 12787 - protein, 738 aa, Homo sapiens
MSRRSQRLTRYSQGDDDGSSSSGGSSVAGSQSTLFKDSPLRTLKRKSSNMKRLSPAPQLGPSSDAHTSYYSESLVHESWFPPRSSLEELHGDANWGEDLRVRRRRGTGGSESSRASGLVGRKATEDFLGSSSGYSSEDDYVEDSEGRGSKVTETEPVSSFPAGYSDVDQQSSSSRLRSAVSRAGSLLWMVATSPGRLFRLLYWWAGTTWYRLTTAASLLDVFVLTRRFSSLKTFLWFLLPLLLLTCLTYGAWYFYPYGLQTFHPALVSWWAAKDSRRPDEGWEARDSSPHFQAEQRVMSRVHSLERRLEALAAEFSSNWQKEAMRLERLELRQGAPGQGGGGGLSHEDTLALLEGLVSRREAALKEDFRRETAARIQEELSALRAEHQQDSEDLFKKIVRASQESEARIQQLKSEWQSMTQESFQESSVKELRRLEDQLAGLQQELAALALKQSSVAEEVGLLPQQIQAVRDDVESQFPAWISQFLARGGGGRVGLLQREEMQAQLRELESKILTHVAEMQGKSAREAAASLSLTLQKEGVIGVTEEQVHHIVKQALQRYSEDRIGLADYALESGGASVISTRCSETYETKTALLSLFGIPLWYHSQSPRVILQPDVHPGNCWAFQGPQGFAVVRLSARIRPTAVTLEHVPKALSPNSTISSAPKDFAIFGFDEDLQQEGTLLGKFTYDQDGEPIQTFHFQAPTMATYQVVELRILTNWGHPEYTCIYRFRVHGEPAH

SEQ ID NO: 12788 - protein, 2062 aa, Homo sapiens
FMQHPKNFGLIASFLERKTVAECVLYYYLTKKNENYKSLVRRSYRRRGKSQQQQQQQQQQQQQQQQQPMPRSSQEEKDEKEKEKEAEKEEEKPEVENDKEDLLKEKTDDTSGEDNDEKEAVASKGRKTANSQGRRKGRITRSMANEANSEEAITPQQSAELASMELNESSRWTEEEMETAKKGLLEHGRNWSAIARMVGSKTVSQCKNFYFNYKKRQNLDEILQQHKLKMEKERNARRKKKKAPAAASEEAAFPPVVEDEEMEASGVSGNEEEMVEEAEATVNNSSDTESIPSPHTEAAKDTGQNGPKPPATLGADGPPPGPPTPPPEDIPAPTEPTPASEATGAPTPPPAPPSPSAPPPVVPKEEKEEETAAAPPVEEGEEQKPPAAEELAVDTGKAEEPVKSECTEEAEEGPAKGKDAEAAEATAEGALKAEKKEGGSGRATTAKSSGAPQDSDSSATCSADEVDEAEGGDKNRLLSPRPSLLTPTGDPRANASPQKPLDLKQLKQRAAAIPPIQVTKVHEPPREDAAPTKPAPPAPPPPQNLQPESDAPQQPGSSPRGKSRSPAPPADKEAEKPVFFPAFAAEAQKLPGDPPCWTSGLPFPVPPREVIKASPHAPDPSAFSYAPPGHPLPLGLHDTARPVLPRPPTISNPPPLISSAKHPSVLERQIGAISQGMSVQLHVPYSEHAKAPVGPVTMGLPLPMDPKKLAPFSGVKQEQLSPRGQAGPPESLGVPTAQEASVLRGTALGSVPGGSITKGIPSTRVPSDSAITYRGSITHGTPADVLYKGTITRIIGEDSPSRLDRGREDSLPKGHVIYEGKKGHVLSYEGGMSVTQCSKEDGRSSSGPPHETAAPKRTYDMMEGRVGRAISSASIEGLMGRAIPPERHSPHHLKEQHHIRGSITQGIPRSYVEAQEDYLRREAKLLKREGTPPPPPPSRDLTEAYKTQALGPLKLKPAHEGLVATVKEAGRSIHEIPREELRHTPELPLAPRPLKEGSITQGTPLKYDTGASTTGSKKHDVRSLIGSPGRTFPPVHPLDVMADARALERACYEESLKSRPGTASSSGGSIARGAPVIVPELGKPRQSPLTYEDHGAPFAGHLPRGSPVTTREPTPRLQEGSLSSSKASQDRKLTSTPREIAKSPHSTVPEHHPHPISPYEHLLRGVSGVDLYRSHIPLAFDPTSIPRGIPLDAAAAYYLPRHLAPNPTYPHLYPPYLIRGYPDTAALENRQTIINDYITSQQMHHNAATAMAQRADMLRGLSPRESSLALNYAAGPRGIIDLSQVPHLPVLVPPTPGTPATAMDRLAYLPTAPQPFSSRHSSSPLSPGGPTHLTKPTTTSSSERERDRDRERDRDREREKSILTSTTTVEHAPIWRPGTEQSSGSSGGGGGSSSRPASHSHAHQHSPISPRTQDALQQRPSVLHNTGMKGIITAVEPSTPTVLRSTSTSSPVRPAATFPPATHCPLGGTLDGVYPTLMEPVLLPKEAPRVARPERPRADTGHAFLAKPPARSGLEPASSPSKGSEPRPLVPPVSGHATIARTPAKNLAPHHASPDPPAPPASASDPHREKTQSKPFSIQELELRSLGYHGSSYSPEGVEPVSPVSSPSLTHDKGLPKHLEELDKSHLEGELRPKQPGPVKLGGEAAHLPHLRPLPESQPSSSPLLQTAPGVKGHQRVVTLAQHISEVITQDYTRHHPQQLSAPLPAPLYSFPGASCPVLDLRRPPSDLYLPPPDHGAPARGSPHSEGGKRSPEPNKTSVLGGGEDGIEPVSPPEGMTEPGHSRSAVYPLLYRDGEQTEPSRMGSKSPGNTSQPPAFFSKLTESNSAMVKSKKQEINKKLNTHNRNEPEYNISQPGTEIFNMPAITGTGLMTYRSQAVQEHASTNMGLEAIIRKALMGKYDQWEESPPLSANAFNPLNASASLPAAMPITAADGRSDHTLTSPGGGGKAKVSGRPSSRKAKSPAPGLASGDRPPSVSSVHSEGDCNRRTPLTNRVWEDRPSSAGSTPFPYNPLIMRLQAGVMASPPPPGLPAGSGPLAGPHHAWDEEPKPLLCSQYETLSDSE

SEQ ID NO: 12789 - protein, 482 aa, Homo sapiens
MEVCYQLPVLPLDRPVPQHVLSRRGAISFSSSSALFGCPNPRQLSQRRGAISYDSSDQTALYIRMLGDVRVRSRAGFESERRGSHPYIDFRIFHSQSEIEVSVSARNIRRLLSFQRYLRSSRFFRGTAVSNSLNILDDDYNGQAKCMLEKVGNWNFDIFLFDRLTNGNSLVSLTFHLFSLHGLIEYFHLDMMKLRRFLVMIQEDYHSQNPYHNAVHAADVTQAMHCYLKEPKLANSVTPWDILLSLIAAATHDLDHPGVNQPFLIKTNHYLATLYKNTSVLENHHWRSAVGLLRESGLFSHLPLESRQQMETQIGALILATDISRQNEYLSLFRSHLDRGDLCLEDTRHRHLVLQMALKCADICNPCRTWELSKQWSEKVTEEFFHQGDIEKKYHLGVSPLCDRHTESIANIQIGFMTYLVEPLFTEWARFSNTRLSQTMLGHVGLNKASWKGLQREQSSSEDTDAAFELNSQLLPQENRLS

SEQ ID NO: 12790 - protein, 1896 aa, Homo sapiens
MKASSGDQGSPPCFLRFPRPVRVVSGAEAELKCVVLGEPPPVVVWEKGGQQLAASERLSFPADGAEHGLLLTAALPTDAGVYVCRARNAAGEAYAAAAVTVLEPPASDPELQPAERPLPSPGSGEGAPVFLTGPRSQWVLRGAEVVLTCRAGGLPEPTLYWEKDGMALDEVWDSSHFALQPGRAEDGPGASLALRILAARLPDSGVYVCHARNAHGHAQAGALLQVHQPPESPPADPDEAPAPVVEPLKCAPKTFWVNEGKHAKFRCYVMGKPEPEIEWHWEGRPLLPDRRRLMYRDRDGGFVLKVLYCQAKDRGLYVCAARNSAGQTLSAVQLHVKEPRLRFTRPLQDVEGREHGIAVLECKVPNSRIPTAWFREDQRLLPCRKYEQIEEGTVRRLIIHRLKADDDGIYLCEMRGRVRTVANVTVKGPILKRLPRKLDVLEGENAVLLVETLEAGVEGRWSRDGEELPVICQSSSGHMHALVLPGVTREDAGEVTFSLGNSRTTTLLRVKCVKHSPPGPPILAEMFKGHKNTVLLTWKPPEPAPETPFIYRLERQEVGSEDWIQCFSIEKAGAVEVPGDCVPSEGDYRFRICTVSGHGRSPHVVFHGSAHLVPTARLVAGLEDVQVYDGEDAVFSLDLSTIIQGTWFLNGEELKSNEPEGQVEPGALRYRIEQKGLQHRLILHAVKHQDSGALVGFSCPGVQDSAALTIQESPVHILSPQDRVSLTFTTSERVVLTCELSRVDFPATWYKDGQKVEESELLVVKMDGRKHRLILPEAKVQDSGEFECRTEGVSAFFGVTVQDPPVHIVDPREHVFVHAITSECVMLACEVDREDAPVRWYKDGQEVEESDFVVLENEGPHRRLVLPATQPSDGGEFQCVAGDECAYFTVTITDVSSWIVYPSGKVYVAAVRLERVVLTCELCRPWAEVRWTKDGEEVVESPALLLQKEDTVRRLVLPAVQLEDSGEYLCEIDDESASFTVTVTEPPVRIIYPRDEVTLIAVTLECVVLMCELSREDAPVRWYKDGLEVEESEALVLERDGPRCRLVLPAAQPEDGGEFVCDAGDDSAFFTVTVTAPPERIVHPAARSLDLHFGAPGRVELRCEVAPAGSQVRWYKDGLEVEASDALQLGAEGPTRTLTLPHAQPEDAGEYVCETRHEAITFNVILAEPPVQFLALETTPSPLCVAPGEPVVLSCELSRAGAPVVWSHNGRPVQEGEGLELHAEGPRRVLCIQAAGPAHAGLYTCQSGAAPGAPSLSFTVQVAEPPVRVVAPEAAQTRVRSTPGGDLELVVHLSGPGGPVRWYKDGERLASQGRVQLEQAGARQVLRVQGARSGDAGEYLCDAPQDSRIFLVSVEEPLLVKLVSELTPLTVHEGDDATFRCEVSPPDADVTWLRNGAVVTPGPQVEMAQNGSSRILTLRGCQLGDAGTVTLRAGSTATSARLHVRETELLFLRRLQDVRAEEGQDVCLEVETGRVGAAGAVRWVRGGQPLPHDSRLSMAQDGHIHRLFIHGVILADQGTYGCESHHDRTLARLSVRPRQLRVLRPLEDVTISEGGSATFQLELSQEGVTGEWARGGVQLYPGPKCHIHSDGHRHRLVLNGLGLADSGCVSFTADSLRCAARLIVREVPVTIVRGPHDLEVTEGDTATFECELSQALADVTWEKDGNALTPSPRLRLQALGTRRLLQLRRCGPSDAGTYSCAVGTARAGPVRLTVRERTVAVLSELRSVSAREGDGATFECTVSEVETTGRWELGGRPLRPGARVRIRQEGKKHILVLSELRAEDAGEVRFQAGPAQSLALLEVEALPLQMCRHPPREKTVLVGRRAVLEVTVSRSGGHVCWLREGAELCPGDKYEMRSHGPTHSLVIHDVRPEDQGTYCCQAGQDSTHTRLLVEGN

SEQ ID NO: 12791 - protein, 388 aa, Homo sapiens
MLTFTSECGCTTFGVFDIVFATNSTQVIKMILNSSTEDGIKRIQDDCPKAGRHNYIFVMIPTLYSIIFVVGIFGNSLVVIVIYFYMKLKTVASVFLLNLALADLCFLLTLPLWAVYTAMEYRWPFGNYLCKIASASVSFNLYASVFLLTCLSIDRYLAIVHPMKSRLRRTMLVAKVTCIIIWLLAGLASLPAIIHRNVFFIENTNITVCAFHYESQNSTLPIGLGLTKNILGFLFPFLIILTSYTLIWKALKKAYEIQKNKPRNDDIFKIIMAIVLFFFFSWIPHQIFTFLDVLIQLGIIRDCRIADIVDTAMPITICIAYFNNCLNPLFYGFLGKKFKRYFLQLLKYIPPKAKSHSNLSTKMSTLSYRPSDNVSSSTKKPAPCFEVE

SEQ ID NO: 12792 - protein, 1012 aa, Homo sapiens
MCAPGIHVSSEGWEEVRSVDSEEGTIEARRAVAGDLDYYWLDPATWHSRETSPISSHPVTWQPSKEGDRLIGRVILNKRTTMPKDSGALLGLKVVGGKMTDLGRLGAFITKVKKGSLADVVGHLRAGDEVLEWNGKPLPGATNEEVYNIILESKSEPQVEIIVSRPIGDIPRIPESSHPPLESSSSSFESQKMERPSISVISPTSPGALKDAPQVLPGQLSVKLWYDKVGHQLIVNVLQATDLPARVDGRPRNPYVKMYFLPDRSDKSKRRTKTVKKILEPKWNQTFVYSHVHRRDFRERMLEITVWDQPRVQEEESEFLGEILIELETALLDDEPHWYKLQTHDESSLPLPQPSPFMPRRHIHGESSSKKLQRSQRISDSDISDYEVDDGIGVVPPGYRSSARESKSTTLTVPEQQRTTHHRSRSVSPHRGNDQGKPRSRLPNVPLQRSLDEIHPTRRSRSPTRHHDASRSPVDHRTRDVDSQYLSEQDSELLMLPRAKRGRSAECLHTTSELQPFLDRARSASTNCLRPDTSLHSPERERHSRKSERSSIQKQTRKGTASDAERMHRQRSPTQSPPADTSFSSRRGRQLPQVPVRSGSIEQASLVVEERTRQMKMKVHRFKQTTGSGSSQELDREQYSKYNIHKDQYRSCDNVSAKSSDSDVSDVSAISRTSSASRLSSTSFMSEQSERPRGRISSFTPKMQGRRMGTSGRSIMKSTSVSGEMYTLEHNDGSQSDTAVGTVGAGGKKRRSSLSAKVVAIVSRRSRSTSQLSQTESGHKKLKSTIQRSTETGMAAEMRKMVRQPSRESTDGSINSYSSEGNLIFPGVRLGADSQFSDFLDGLGPAQLVGRQTLATPAMGDIQIGMEDKKGQLEVEVIRARSLTQKPGSKSTPAPYVKVYLLENGACIAKKKTRIARKTLDPLYQQSLVFDESPQGKVLQVIVWGDYGRMDHKCFMGVAQILLEELDLSSMVIGWYKLFPPSSLVDPTLTPLTRRASQSSLESSTGPPCIRS

SEQ ID NO: 12793 - protein, 657 aa, Homo sapiens
MRTVVLTMKASVIEMFLVLLVTGVHSNKETAKKIKRPKFTVPQINCDVKAGKIIDPEFIVKCPAGCQDPKYHVYGTDVYASYSSVCGAAVHSGVLDNSGGKILVRKVAGQSGYKGSYSNGVQSLSLPRWRESFIVLESKPKKGVTYPSALTYSSSKSPAAQAGETTKAYQRPPIPGTTAQPVTLMQLLAVTVAVATPTTLPRPSPSAASTTSIPRPQSVGHRSQEMDLWSTATYTSSQNRPRADPGIQRQDPSGAAFQKPVGADVSLDCKIDLSFLIDGSTSIGKRRFRIQKQLLADVAQALDIGPAGPLMGVVQYGDNPATHFNLKTHTNSRDLKTAIEKITQRGGLSNVGRAISFVTKNFFSKANGNRSGAPNVVVVMVDGWPTDKVEEASRLARESGINIFFITIEGAAENEKQYVVEPNFANKAVCRTNGFYSLHVQSWFGLHKTLQPLVKRVCDTDRLACSKTCLNSADIGFVIDGSSSVGTGNFRTVLQFVTNLTKEFEISDTDTRIGAVQYTYEQRLEFGFDKYSSKPDILNAIKRVGYWSGGTSTGAAINFALEQLFKKSKPNKRKLMILITDGRSYDDVRIPAMAAHLKGVITYAIGVAWAAQEELEVIATHPARDHSFFVDEFDNLHQYVPRIIQNICTEFNSQPRN

SEQ ID NO: 12794 - protein, 1157 aa, Homo sapiens
MARQPPPPWVHAAFLLCLLSLGGAIEIPMDLTQPPTITKQSAKDHIVDPRDNILIECEAKGNPAPSFHWTRNSRFFNIAKDPRVSMRRRSGTLVIDFRSGGRPEEYEGEYQCFARNKFGTALSNRIRLQVSKSPLWPKENLDPVVVQEGAPLTLQCNPPPGLPSPVIFWMSSSMEPITQDKRVSQGHNGDLYFSNVMLQDMQTDYSCNARFHFTHTIQQKNPFTLKVLTTRGVAERTPSFMYPQGTASSQMVLRGMDLLLECIASGVPTPDIAWYKKGGDLPSDKAKFENFNKALRITNVSEEDSGEYFCLASNKMGSIRHTISVRVKAAPYWLDEPKNLILAPGEDGRLVCRANGNPKPTVQWMVNGEPLQSAPPNPNREVAGDTIIFRDTQISSRAVYQCNTSNEHGYLLANAFVSVLDVPPRMLSPRNQLIRVILYNRTRLDCPFFGSPIPTLRWFKNGQGSNLDGGNYHVYENGSLEIKMIRKEDQGIYTCVATNILGKAENQVRLEVKDPTRIYRMPEDQVARRGTTVQLECRVKHDPSLKLTVSWLKDDEPLYIGNRMKKEDDSLTIFGVAERDQGSYTCVASTELDQDLAKAYLTVLGRPDRPRDLELTDLAERSVRLTWIPGDANNSPITDYVVQFEEDQFQPGVWHDHSKYPGSVNSAVLRLSPYVNYQFRVIAINEVGSSHPSLPSERYRTSGAPPESNPGDVKGEGTRKNNMEITWTPMNATSAFGPNLRYIVKWRRRETREAWNNVTVWGSRYVVGQTPVYVPYEIRVQAENDFGKGPEPESVIGYSGEDYPRAAPTEVKVRVMNSTAISLQWNRVYSDTVQGQLREYRAYYWRESSLLKNLWVSQKRQQASFPGDRLRGVVSRLFPYSNYKLEMVVVNGRGDGPRSETKEFTTPEGVPSAPRRFRVRQPNLETINLEWDHPEHPNGIMIGYTLKYVAFNGTKVGKQIVENFSPNQTKFTVQRTDPVSRYRFTLSARTQVGSGEAVTEESPAPPNEATPTAAYTNNQADIATQGWFIGLMCAIALLVLILLIVCFIKRSRGGKYPVREKKDVPLGPEDPKEEDGSFDYSDEDNKPLQGSQTSLDGTIKQQESDDSLVDYGEGGEGQFNEDGSFIGQYTVKKDKEETEGNESSEATSPVNAIYSLA

SEQ ID NO: 12795 - protein, 968 aa, Homo sapiens
MYNMRRLSLSPTFSMGFHLLVTVSLLFSHVDHVIAETEMEGEGNETGECTGSYYCKKGVILPIWEPQDPSFGDKIARATVYFVAMVYMFLGVSIIADRFMSSIEVITSQEKEITIKKPNGETTKTTVRIWNETVSNLTLMALGSSAPEILLSVIEVCGHNFTAGDLGPSTIVGSAAFNMFIIIALCVYVVPDGETRKIKHLRVFFVTAAWSIFAYTWLYIILSVISPGVVEVWEGLLTFFFFPICVVFAWVADRRLLFYKYVYKRYRAGKQRGMIIEHEGDRPSSKTEIEMDGKVVNSHVENFLDGALVLEVDERDQDDEEARREMARILKELKQKHPDKEIEQLIELANYQVLSQQQKSRAFYRIQATRLMTGAGNILKRHAADQARKAVSMHEVNTEVTENDPVSKIFFEQGTYQCLENCGTVALTIIRRGGDLTNTVFVDFRTEDGTANAGSDYEFTEGTVVFKPGDTQKEIRVGIIDDDIFEEDENFLVHLSNVKVSSEASEDGILEANHVSTLACLGSPSTATVTIFDDDHAGIFTFEEPVTHVSESIGIMEVKVLRTSGARGNVIVPYKTIEGTARGGGEDFEDTCGELEFQNDEIVKTISVKVIDDEEYEKNKTFFLEIGEPRLVEMSEKKALLLNELGGFTITGQPVFRKVHAREHPILSTVITIADEYDDKQPLTSKEEEERRIAEMGRPILGEHTKLEVIIEESYEFKSTVDKLIKKTNLALVVGTNSWREQFIEAITVSAGEDDDDDECGEEKLPSCFDYVMHFLTVFWKVLFAFVPPTEYWNGWACFIVSILMIGLLTAFIGDLASHFGCTIGLKDSVTAVVFVALGTSVPDTFASKVAATQDQYADASIGNVTGSNAVNVFLGIGVAWSIAAIYHAANGEQFKVSPGTLAFSVTLFTIFAFINVGVLLYRRRPEIGGELGGPRTAKLLTSCLFVLLWLLYIFFSSLEAYCHIKGF

SEQ ID NO: 12796 - protein, 1981 aa, Homo sapiens
MAESASPPSSSAAAPAAEPGVTTEQPGPRSPPSSPPGLEEPLDGADPHVPHPDLAPIAFFCLRQTTSPRNWCIKMVCNPWFECVSMLVILLNCVTLGMYQPCDDMDCLSDRCKILQVFDDFIFIFFAMEMVLKMVALGIFGKKCYLGDTWNRLDFFIVMAGMVEYSLDLQNINLSAIRTVRVLRPLKAINRVPSMRILVNLLLDTLPMLGNVLLLCFFVFFIFGIIGVQLWAGLLRNRCFLEENFTIQGDVALPPYYQPEEDDEMPFICSLSGDNGIMGCHEIPPLKEQGRECCLSKDDVYDFGAGRQDLNASGLCVNWNRYYNVCRTGSANPHKGAINFDNIGYAWIVIFQVITLEGWVEIMYYVMDAHSFYNFIYFILLIIVGSFFMINLCLVVIATQFSETKQREHRLMLEQRQRYLSSSTVASYAEPGDCYEEIFQYVCHILRKAKRRALGLYQALQSRRQALGPEAPAPAKPGPHAKEPRHYQLCPQHSPLDATPHTLVQPIPATLASDPASCPCCQHEDGRRPSGLGSTDSGQEGSGSGSSAGGEDEADGDGARSSEDGASSELGKEEEEEEQADGAVWLCGDVWRETRAKLRGIVDSKYFNRGIMMAILVNTVSMGIEHHEQPEELTNILEICNVVFTSMFALEMILKLAAFGLFDYLRNPYNIFDSIIVIISIWEIVGQADGGLSVLRTFRLLRVLKLVRFMPALRRQLVVLMKTMDNVATFCMLLMLFIFIFSILGMHIFGCKFSLRTDTGDTVPDRKNFDSLLWAIVTVFQILTQEDWNVVLYNGMASTSPWASLYFVALMTFGNYVLFNLLVAILVEGFQAEGDANRSYSDEDQSSSNIEEFDKLQEGLDSSGDPKLCPIPMTPNGHLDPSLPLGGHLGPAGAAGPAPRLSLQPDPMLVALGSRKSSVMSLGRMSYDQRSLSSSRSSYYGPWGRSAAWASRRSSWNSLKHKPPSAEHESLLSAERGGGARVCEVAADEGPPRAAPLHTPHAHHIHHGPHLAHRHRHHRRTLSLDNRDSVDLAELVPAVGAHPRAAWRAAGPAPGHEDCNGRMPSIAKDVFTKMGDRGDRGEDEEEIDYTLCFRVRKMIDVYKPDWCEVREDWSVYLFSPENRFRVLCQTIIAHKLFDYVVLAFIFLNCITIALERPQIEAGSTERIFLTVSNYIFTAIFVGEMTLKVVSLGLYFGEQAYLRSSWNVLDGFLVFVSIIDIVVSLASAGGAKILGVLRVLRLLRTLRPLRVISRAPGLKLVVETLISSLKPIGNIVLICCAFFIIFGILGVQLFKGKFYHCLGVDTRNITNRSDCMAANYRWVHHKYNFDNLGQALMSLFVLASKDGWVNIMYNGLDAVAVDQQPVTNHNPWMLLYFISFLLIVSFFVLNMFVGVVVENFHKCRQHQEAEEARRREEKRLRRLEKKRRKAQRLPYYATYCHTRLLIHSMCTSHYLDIFITFIICLNVVTMSLEHYNQPTSLETALKYCNYMFTTVFVLEAVLKLVAFGLRRFFKDRWNQLDLAIVLLSVMGITLEEIEINAALPINPTIIRIMRVLRIARVLKLLKMATGMRALLDTVVQALPQVGNLGLLFMLLFFIYAALGVELFGKLVCNDENPCEGMSRHATFENFGMAFLTLFQVSTGDNWNGIMKDTLRDCTHDERSCLSSLQFVSPLYFVSFVLTAQFVLINVVVAVLMKHLDDSNKEAQEDAEMDAELELEMAHGLGPGPRLPTGSPGAPGRGPGGAGGGGDTEGGLCRRCYSPAQENLWLDSVSLIIKDSLEGELTIIDNLSGSIFHHYSSPAGCKKCHHDKQEVQLAETEAFSLNSDRSSSILLGDDLSLEDPTACPPGRKDSKGELDPPEPMRVGDLGECFFPLSSTAVSPDPENFLCEMEEIPFNPVRSWLKHDSSQAPPSPFSPDASSPLLPMPAEFFHPAVSASQKGPEKGTGTGTLPKIALQGSWASLRSPRVNCTLLRQVPTPPRP

SEQ ID NO: 12797 - protein, 851 aa, Homo sapiens
GKEEYIATFKGSEYFCYDLSQNPIQSSSDEITLSFKTLQRNGLMLHTGKSADYVNLALKNGAVSLVINLGSGAFEALVEPVNGKFNDNAWHDVKVTRNLRQHSGIGHAMVNKLHCSVTISVDGILTTTGYTQEDYTMLGSDDFFYVGGSPSTADLPGSPVSNNFMGCLKEVVYKNNDVRLELSRLAKQGDPKMKIHGVVAFKCENVATLDPITFETPESFISLPKWNAKKTGSISFDFRTTEPNGLILFSHGKPRHQKDAKHPQMIKVDFFAIEMLDGHLYLLLDMGSGTIKIKALLKKVNDGEWYHVDFQRDGRSGTISVNTLRTPYTAPGESEILDLDDELYLGGLPENKAGLVFPTEVWTALLNYGYVGCIRDLFIDGQSKDIRQMAEVQSTAGVKPSCSKETAKPCLSNPCKNNGMCRDGWNRYVCDCSGTGYLGRSCEREATVLSYDGSMFMKIQLPVVMHTEAEDVSLRFRSQRAYGILMATTSRDSADTLRLELDAGRVKLTVNLDCIRINCNSSKGPETLFAGYNLNDNEWHTVRVVRRGKSLKLTVDDQQAMTGQMAGDHTRLEFHNIETGIITERRYLSSVPSNFIGHLQSLTFNGMAYIDLCKNGDIDYCELNARFGFRNIIADPVTFKTKSSYVALATLQAYTSMHLFFQFKTTSLDGLILYNSGDGNDFIVVELVKGYLHYVFDLGNGANLIKGSSNKPLNDNQWHNVMISRDTSNLHTVKIDTKITTQITAGARNLDLKSDLYIGGVAKETYKSLPKLVHAKEGFQGCLASVDLNGRLPDLISDALFCNGQIERGCEGPSTTCQEDSCSNQGVCLQQWDGFSCDCSMTSFSGPLCND

SEQ ID NO: 12798 - protein, 590 aa, Homo sapiens [sequence omitted]

SEQ ID NO: 12799 - protein, 1158 aa, Homo sapiens
MCSTNPGKWVTFDDDPAVQSSQKSKNFPLENQGVCRPNGLKLNLPGLREFPSGSSSTSSTPLSSPIVDFYFSPGPPSNSPLSTPTKDFPGFPGIPKAGTHVLYPIPESSSDSPLAISGGESSLLPTRPTCLSHALLPSDHSCTHPTPKVGLPDEVNPQQAESLGFQSDDLPQFQYFREDCAFSSPFWKDEGSDSHFTLDPPGSKKMFSSRNKEMPIDQKSLNKCSLNYICEKLEHLQSAENQDSLRSLSMHCLCAEENASSFVPHTLFRSQPKSGWSFMLRIPEKKNMMSSRQWGPIFLKVLPGGILQMYYEQGLEKPFKEIQLDPYCRLSEPKVENFSVAGKIHTVKIEHVSYTEKRKYHSKTEVVHEPDIEQMLKLGSTSYHDFLDFLTTVEEELMKLPAVSKPKKNYEEQEISLEIVDNFWGKVTKEGKFVESAVITQIYCLCFVNGNLECFLTLNDLELPKRDESYYEKDSEKKGIDILDYHFHKCVNVQEFEQSRIIKFVPLDACRFELMRFKTLYNGDNLPFSLKSVVVVQGAYVELQAFVNMASLAQRSSYAGSLRSCDNIRIHFPVPSQWIKALWTMNLQRQKSLKAKMNRRACLGSLQELESEPVIQVTVGSAKYESAYQAVVWKIDRLPDKNSSLDHPHCLSYKLELGSDQEIPSDWYPFATVQFSVPDTCASRTEVRSLGVESDVQPQKHVQQRACYNIQPKLYRSVIEDVIEGVRNLFAEEGIEEQVLKDLKQLWETKVLQSKATEDFFRNSIQSPLFTLQLPHSLHQTLQSSTASLVIPAGRTLPSFTTAELGTSNSSANFTFPGYPIHVPAGVTLQTVSGHLYKVNVPIMVTETSGRAGILQHPIQQVFQQLGQPSVIQTSVPQLNPWSLQATTEKSQRIETVLQQPAILPSGPVDRKHLENATSDILVSPGNEHKIVPEALLCHQESSHYISLPGVVFSPQVSQTNSNVESVLSGSASMAQNLHDESLSTSPHGALHQHVTDIQLHILKNRMYGCDSVKQPRNIEEPSNIPVSEKDSNSQVDLSIRVTDDDIGEIIQVDGSGDTSSNEEIGSTRDADENEFLGNIDGGDLKVPEEEADSISNEDSATNSSDNEDPQVNIVEEDPLNSGDDVSEQDVPDLFDTDNVIVCQYDKQGDTRVRHGQQ

SEQ ID NO: 12800 - protein, 703 aa, Homo sapiens
MAANMYRVGDYVYFENSSSNPYLIRRIEELNKTANGNVEAKVVCFYRRRDISSTLIALADKHATLSVCYKAGPGADNGEEGEIEEEMENPEMVDLPEKLKHQLRHRELFLSRQLESLPATHIRGKCSVTLLNETESLKSYLEREDFFFYSLVYDPQQKTLLADKGEIRVGNRYQADITDLLKEGEEDGRDQSRLETQVWEAHNPLTDKQIDQFLVVARSVGTFARALDCSSSVRQPSLHMSAAAASRDITLFHAMDTLHKNIYDISKAISALVPQGGPVLCRDEMEEWSASEANLFEEALEKYGKDFTDIQQDFLPWKSLTSIIEYYYMWKTTDRYVQQKRLKAAEAESKLKQVYIPNYNKPNPNQISVNNVKAGVVNGTGAPGQSPGAGRACESCYTTQSYQWYSWGPPNMQCRLCASCWTYWKKYGGLKMPTRLDGERPGPNRSNMSPHGLPARSSGSPKFAMKTRQAFYLHTTKLTRIARRLCREILRPWHAARHPYLPINSAAIKAECTARLPEASQSPLVLKQAVRKPLEAVLRYLETHPRPPKPDPVKSVSSVLSSLTPAKVAPVINNGSPTILGKRSYEQHNGVDGLANHGQARHMGPSRNLLLNGKSYPTKVRLIRGGSLPPVKRRRMNWIDAPDDVFYMATEETRKIRKLLSSSETKRAARRPYKPIALRQSQALPPRPPPPAPVNDEPIVIED

SEQ ID NO: 12801 - protein, 571 aa, Homo sapiens
MKCQPRSGARRIEERLHYLITTYLKFGNNNNYMNMAEANNAFFAASETFHTPSLGDEEFEIPPITPPPESDPALGMPDVLLPFQALSDPLPSQGSEFTPQFPPQSLDLPSITISRNLVEQDGVLHSSGLHMDQSHTQVSQYRQDPSLIMRSIVHMTDAARSGVMPPAQLTTINQSQLSAQLGLNLGGASMPHTSPSPPASKSATPSPSSSINEEDADEANRAIGEKRAAPDSGKKPKTPKKKKKKDPNEPQKPVSAYALFFRDTQAAIKGQNPNATFGEVSKIVASMWDSLGEEQKQVYKRKTEAAKKEYLKALAAYRASLVSKAAAESAEAQTIRSVQQTLASTNLTSSLLLNTPLSQHGTVSASPQTLQQSLPRSIAPKPLTMRLPMNQIVTSVTIAANMPSNIGAPLISSMGTTMVGSAPSTQVSPSVQTQQHQMQLQQQQQQQQQQMQQMQQQQLQQHQMHQQIQQQMQQQHFQHHMQQHLQQQQQHLQQQINQQQLQQQLQQRLQLQQLQHMQHQSQPSPRQHSPVASQITSPIPAIGSPQPASQQHQSQIQSQTQTQVLSQVSIF

SEQ ID NO: 12802 - protein, 335 aa, Homo sapiens
MGPLSAPPCTEHIKWKGLLVTASLLNFWNLPTTAQVTIEAQPPKVSEGKDVLLLVHNLPQNLTGYIWYKGQIRDLYHYITSYVVDGQIIIYGPAYSGRETAYSNASLLIQNVTREDAGSYTLHIIKRGDGTRGVTGYFTFTLYLETPKPSISSSNLNPREAMETVILTCDPETPDTSYQWWMNGQSLPMTHRFQLSETNRTLFLFGVTKYTAGPYECEIRNSGSASRSDPVTLNLLHGPDLPRIHPSYTNYRSGDNLYLSCFANSNPPAQYSWTINGKFQQSGQNLFIPQITTKHSGLYVCSVRNSATGEESSTSLTVKVSASTRIGLLPLLNPT

SEQ ID NO: 12803 - protein, 1288 aa, Homo sapiens
MANGGGGGGGSSGGGGGGGGSSLRMSSNIHANHLSLDASSSSSSSSSSSSSSSSSSSSSSVHEPKMDALIIPVTMEVPCDSRGQRMWWAFLASSMVTFFGGLFIILLWRTLKYLWTVCCHCGGKTKEAQKINNGSSQADGTLKPVDEKEEAVAAEVGWMTSVKDWAGVMISAQTLTGRVLVVLVFALSIGALVIYFIDSSNPIESCQNFYKDFTLQIDMAFNVFFLLYFGLRFIAANDKLWFWLEVNSVVDFFTVPPVFVSVYLNRSWLGLRFLRALRLIQFSEILQFLNILKTSNSIKLVNLLSIFISTWLTAAGFIHLVENSGDPWENFQNNQALTYWECVYLLMVTMSTVGYGDVYAKTTLGRLFMVFFILGGLAMFASYVPEIIELIGNRKKYGGSYSAVSGRKHIVVCGHITLESVSNFLKDFLHKDRDDVNVEIVFLHNISPNLELEALFKRHFTQVEFYQGSVLNPHDLARVKIESADACLILANKYCADPDAEDASNIMRVISIKNYHPKIRIITQMLQYHNKAHLLNIPSWNWKEGDDAICLAELKLGFIAQSCLAQGLSTMLANLFSMRSFIKIEEDTWQKYYLEGVSNEMYTEYLSSAFVGLSFPTVCELCFVKLKLLMIAIEYKSANRESRILINPGNHLKIQEGTLGFFIASDAKEVKRAFFYCKACHDDITDPKRIKKCGCKRPKMSIYKRMRRACCFDCGRSERDCSCMSGRVRGNVDTLERAFPLSSVSVNDCSTSFRAFEDEQPSTLSPKKKQRNGGMRNSPNTSPKLMRHDPLLIPGNDQIDNMDSNVKKYDSTGMFHWCAPKEIEKVILTRSEAAMTVLSGHVVVCIFGDVSSALIGLRNLVMPLRASNFHYHELKHIVFVGSIEYLKREWETLHNFPKVSILPGTPLSRADLRAVNINLCDMCVILSANQNNIDDTSLQDKECILASLNIKSMQFDDSIGVLQANSQGFTPPGMDRSSPDNSPVHGMLRQPSITTGVNIPIITELVNDTNVQFLDQDDDDDPDTELYLTQPFACGTAFAVSVLDSLMSATYFNDNILTLIRTLVTGGATPELEALIAEENALRGGYSTPQTLANRDRCRVAQLALLDGPFADLGDGGCYGDLFCKALKTYNMLCFGIYRLRDAHLSTPSQCTKRYVITNPPYEFELVPTDLIFCLMQFDHNAGQSRASLSHSSHSSQSSSKKSSSVHSIPSTANRQNRPKSRESRDKQNATRMNRMGQEKKWFTDEPDNAYPRNIQIKPMSTHMANQINQYKSTSSLIPPIREVEDEC

SEQ ID NO: 12804 - protein, 1499 aa, Homo sapiens
MMMARKQDVRIPTYNISVVGLSGTEKEKGQCGIGKSCLCNRFVRPSADEFHLDHTSVLSTSDFGGRVVNNDHFLYWGEVSRSLEDCVECKMHIVEQTEFIDDQTFQPHRSTALQPYIKRAAATKLASAEKLMYFCTDQLGLEQDFEQKQMPDGKLLVDGFLLGIDVSRGMNRNFDDQLKFVSNLYNQLAKTKKPIVVVLTKCDEGVERYIRDAHTFALSKKNLQVVETSARSNVNVDLAFSTLVQLIDKSRGKTKIIPYFEALKQQSQQIATAKDKYEWLVSRIVKNHNENWLSVSRKMQASPEYQDYVYLEGTQKAKKLFLQHIHRLKHEHIERRRKLYLAALPLAFEALIPNLDEIDHLSCIKAKKLLETKPEFLKWFVVLEETPWDATSHIDNMENERIPFDLMDTVPAEQLYEAHLEKLRNERKRVEMRRAFKENLETSPFITPGKPWEEARSFIMNEDFYQWLEESVYMDIYGKHQKQIIDKAKEEFQELLLEYSELFYELELDAKPSKEKMGVIQDVLGEEQRFKALQKLQAERDALILKHIHFVYHPTKETCPSCPACVDAKIEHLISSRFIRPSDRNQKNSLSDPNIDRINLVILGKDGLARELANEIRALCTNDDKYVIDGKMYELSLRPIEGNVRLPVNSFQTPTFQPHGCLCLYNSKESLSYVVESIEKSRESTLGRRDNHLVHLPLTLILVNKRGDTSGETLHSLIQQGQQIASKLQCVFLDPASAGIGYGRNINEKQISQVLKGLLDSKRNLNLVSSTASIKDLADVDLRIVMCLMCGDPFSADDILFPVLQSQTCKSSHCGSNNSVLLELPIGLHKKRIELSVLSYHSSFSIRKSRLVHGYIVFYSAKRKASLAMLRAFLCEVQDIIPIQLVALTDGAVDVLDNDLSREQLTEGEEIAQEIDGRFTSIPCSQPQHKLEIFHPFFKDVVEKKNIIEATHMYDNAAEACSTTEEVFNSPRAGSPLCNSNLQDSEEDIEPSYSLFREDTSLPSLSKDHSKLSMELEGNDGLSFIMSNFESKLNNKVPPPVKPKPPVHFEITKGDLSYLDQGHRDGQRKSVSSSPWLPQDGFDPSDYAEPMDAVVKPRNEEENIYSVPHDSTQGKIITIRNINKAQSNGSGNGSDSEMDTSSLERGRKVSIVSKPVLYRTRCTRLGRFASYRTSFSVGSDDELGPIRKKEEDQASQGYKGDNAVIPYETDEDPRRRNILRSLRRNTKKPKPKPRPSITKATWESNYFGVPLTTVVTPEKPIPIFIERCIEYIEATGLSTEGIYRVSGNKSEMESLQRQFDQDHNLDLAEKDFTVNTVAGAMKSFFSELPDPLVPYNMQIDLVEAHKINDREQKLHALKEVLKKFPKENHEVFKYVISHLNKVSHNNKVNLMTSENLSICFWPTLMRPDFSTMDALTATRTYQTIIELFIQQCPFFFYNRPITEPPGARPSSPSAVASTVPFLTSTPVTSQPSPPQSPPPTPQSPMQPLLPSQLQAEHTL

SEQ ID NO: 12805 - protein, 2190 aa, Homo sapiens
MNRAKPTTVRRPSAAAKPSGHPPPGDFIALGSKGQANESKTASTLLKPAPSGLPSERKRDAAAALSSASALTGLTKRPKLSSTPPLSALGRLAEAAVAEKRAISPSIKEPSVVPIEVLPTVLLDEIEAAELEGNDDRIEGVLCGAVKQLKVTRAKPDSTLYLSLMYLAKIKPNIFATEGVIEALCSLLRRDASINFKAKGNSLVSVLACNLLMAAYEEDENWPEIFVKVYIEDSLGERIWVDSPHCKTFVDNIQTAFNTRMPPRSVLLQGEAGRVAGDLGAGSSPHPSLTEEEDSQTELLIAEEKLSPEQEGQLMPRYEELAESVEEYVLDMLRDQLNRRQPIDNVSRNLLRLLTSTCGYKEVRLLAVQKLEMWLQNPKLTRPAQDLLMSVCMNCNTHGSEDMDVISHLIKIRLKPKVLLNHFMLCIRELLSAHKDNLGTTIKLVIFNELSSARNPNNMQVLYTALQHSSELAPKFLAMVFQDLLTNKDDYLRASRALLREIIKQTKHEINFQAFCLGLMQERKEPQYLEMEFKERFVVHITDVLAVSMMLGITAQVKEAGIAWDKGEKRNLEVLRSFQNQIAAIQRDAVWWLHTVVPSISKLAPKDYVHCLHKVLFTEQPETYYKWDNWPPESDRNFFLRLCSEVPILEDTLMRILVIGLSRELPLGPADAMELADHLVKRAAAVQADDVEVLKVGRTQLIDAVLNLCTYHHPENIQLPPGYQPPNLAISTLYWKAWPLLLVVAAFNPENIGLAAWEEYPTLKMLMEMVMTNNYSYPPCTLTDEETRTEMLNRELQTAQREKQEILAFEGHLAAASTKQTITESSSLLLSQLTSLDPQGPPRRPPPHILDQVKSLNQSLRLGHLLCRSRNPDFLLHIIQRQASSQSMPWLADLVQSSEGSLDVLPVQCLCEFLLHDAVDDAASGEEDDEGESKEQKAKKRQRQQKQRQLLGRLQDLLLGPKADEQTTCEVLDYFLRRLGSSQVASRVLAMKGLSLVLSEGSLRDGEEKEPPMEEDVGDTDVLQGYQWLLRDLPRLPLFDSVRSTTALALQQAIHMETDPQTISAYLIYLSQHTPVEEQAQHSDLALDVARLVVERSTIMSHLFSKLSPSAASDAVLSALLSIFSRYVRRMRQSKEGEEVYSWSESQDQVFLRWSSGETATMHILVVHAMVILLTLGPPRADDSEFQALLDIWFPEEKPLPTAFLVDTSEEALLLPDWLKLRMIRSEVLRLVDAALQDLEPQQLLLFVQSFGIPVSSMSKLLQFLDQAVAHDPQTLEQNIMDKNYMAHLVEVQHERGASGGQTFHSLLTASLPPRRDSTEAPKPKSSPEQPIGQGRIRVGTQLRVLGPEDDLAGMFLQIFPLSPDPRWQSSSPRPVALALQQALGQELARVVQGSPEVPGITVRVLQALATLLSSPHGGALVMSMHRSHFLACPLLRQLCQYQRCVPQDTGFSSLFLKVLLQMLQWLDSPGVEGGPLRAQLRMLASQASAGRRLSDVRGGLLRLAEALAFRQDLEVVSSTVRAVIATLRSGEQCSVEPDLISKVLQGLIEVRSPHLEELLTAFFSATADAASPFPACKPVVVVSSLLLQEEEPLAGGKPGADGGSLEAVRLGPSSGLLVDWLEMLDPEVVSSCPDLQLRLLFSRRKGKGQAQVPSFRPYLLTLFTHQSSWPTLHQCIRVLLGKSREQRFDPSASLDFLWACIHVPRIWQGRDQRTPQKRREELVLRVQGPELISLVELILAEAETRSQDGDTAACSLIQARLPLLLSCCCGDDESVRKVTEHLSGCIQQWGDSVLGRRCRDLLLQLYLQRPELRVPVPEVLLHSEGAASSSVCKLDGLIHRFITLLADTSDSRALENRGADASMACRKLAVAHPLLLLRHLPMIAALLHGRTHLNFQEFRQQNHLSCFLHVLGLLELLQPHVFRSEHQGALWDCLLSFIRLLLNYRKSSRHLAAFINKFVQFIHKYITYNAPAAISFLQKHADPLHDLSFDNSDLVMLKSLLAGLSLPSRDDRTDRGLDEEGEEESSAGSLPLVSVSLFTPLTAAEMAPYMKRLSRGQTVEDLLEVLSDIDEMSRRRPEILSFFSTNLQRLMSSAEECCRNLAFSLALRSMQNSPSIAAAFLPTFMYCLGSQDFEVVQTALRNLPEYALLCQEHAAVLLHRAFLVGMYGQMDPSAQISEALRILHMEAVM

SEQ ID NO: 12806 - protein, 2157 aa, Homo sapiens
MVNENTRMYIPEENHQGSNYGSPRPAHANMNANAAAGLAPEHIPTPGAALSWQAAIDAARQAKLMGSAGNATISTVSSTQRKRQQYGKPKKQGSTTATRPPRALLCLTLKNPIRRACISIVEWKPFEIIILLTIFANCVALAIYIPFPEDDSNATNSNLERVEYLFLIIFTVEAFLKVIAYGLLFHPNAYLRNGWNLLDFIIVVVGLFSAILEQATKADGANALGGKGAGFDVKALRAFRVLRPLRLVSGVPSLQVVLNSIIKAMVPLLHIALLVLFVIIIYAIIGLELFMGKMHKTCYNQEGIADVPAEDDPSPCALETGHGRQCQNGTVCKPGWDGPKHGITNFDNFAFAMLTVFQCITMEGWTDVLYWVNDAVGRDWPWIYFVTLIIIGSFFVLNLVLGVLSGEFSKEREKAKARGDFQKLREKQQLEEDLKGYLDWITQAEDIDPENEDEGMDEEKPRNMSMPTSETESVNTENVAGGDIEGENCGARLAHRISKSKFSRYWRRWNRFCRRKCRAAVKSNVFYWLVIFLVFLNTLTIASEHYNQPNWLTEVQDTANKALLALFTAEMLLKMYSLGLQAYFVSLFNRFDCFVVCGGILETILVETKIMSPLGISVLRCVRLLRIFKITRYWNSLSNLVASLLNSVRSIASLLLLLFLFIIIFSLLGMQLFGGKFNFDEMQTRRSTFDNFPQSLLTVFQILTGEDWNSVMYDGIMAYGGPSFPGMLVCIYFIILFICGNYILLNVFLAIAVDNLADAESLTSAQKEEEEEKERKKLARTASPEKKQELVEKPAVGESKEEKIELKSITADGESPPATKINMDDLQPNENEDKSPYPNPETTGEEDEEEPEMPVGPRPRPLSELHLKEKAVPMPEASAFFIFSSNNRFRLQCHRIVNDTIFTNLILFFILLSSISLAAEDPVQHTSFRNHILFYFDIVFTTIFTIEIALKMTAYGAFLHKGSFCRNYFNILDLLVVSVSLISFGIQSSAINVVKILRVLRVLRPLRAINRAKGLKHVVQCVFVAIRTIGNIVIVTTLLQFMFACIGVQLFKGKLYTCSDSSKQTEAECKGNYITYKDGEVDHPIIQPRSWENSKFDFDNVLAAMMALFTVSTFEGWPELLYRSIDSHTEDKGPIYNYRVEISIFFIIYIIIIAFFMMNIFVGFVIVTFQEQGEQEYKNCELDKNQRQCVEYALKARPLRRYIPKNQHQYKVWYVVNSTYFEYLMFVLILLNTICLAMQHYGQSCLFKIAMNILNMLFTGLFTVEMILKLIAFKPKGYFSDPWNVFDFLIVIGSIIDVILSETNPAEHTQCSPSMNAEENSRISITFFRLFRVMRLVKLLSRGEGIRTLLWTFIKSFQALPYVALLIVMLFFIYAVIGMQVFGKIALNDTTEINRNNNFQTFPQAVLLLFRCATGEAWQDIMLACMPGKKCAPESEPSNSTEGETPCGSSFAVFYFISFYMLCAFLIINLFVAVIMDNFDYLTRDWSILGPHHLDEFKRIWAEYDPEAKGRIKHLDVVTLLRRIQPPLGFGKLCPHRVACKRLVSMNMPLNSDGTVMFNATLFALVRTALRIKTEEGPSPSEAHQGAEDPFRPAGNLEQANEELRAIIKKIWKRTSMKLLDQVVPPAGDDEVTVGKFYATFLIQEYFRKFKKRKEQGLVGKPSQRNALSLQAGLRTLHDIGPEIRRAISGDLTAEEELDKAMKEAVSAASEDDIFRRAGGLFGNHVSYYQSDGRSAFPQTFTTQRPLHINKAGSSQGDTESPSHEKLVDSTFTPSSYSSTGSNANINNANNTALGRLPRPAGYPSTVSTVEGHGPPLSPAIRVQEVAWKLSSNRCHSRESQAAMAGQEETSQDETYEVKMNHDTEACSEPSLLSTEMLSYQDDENRQLTLPEEDKRDIRQSPKRGFLRSASLGRRASFHLECLKRQKDRGGDISQKTVLPLHLVHHQALAVAGLSPLLQRSHSPASFPRPFATPPATPGSRGWPPQPVPTLRLEGVESSEKLNSSFPSIHCGSWAETTPGGGGSSAARRVRPVSLMVPSQAGAPGRQFHGSASSLVEAVLISEGLGQFAQDPKFIEVTTQELADACDMTIEEMESAADNILSGGAPQSPNGALLPFVNCRDAGQDRAGGEEDAGCVRARGRPSEEELQDSRVYVSSL

SEQ ID NO: 12807 - protein, 655 aa, Homo sapiens
MASTDYSTYSQAAAQQGYSAYTAQPTQGYAQTTQAYGQQSYGTYGQPTDVSYTQAQTTATYGQTAYATSYGQPPTGYTTPTAPQAYSQPVQGYGTGAYDTTTATVTTTQASYAAQSAYGTQPAYPAYGQQPAATAPTRPQDGNKPTETSQPQSSTGGYNQPSLGYGQSNYSYPQVPGSYPMQPVTAPPSYPPTSYSSTQPTSYDQSSYSQQNTYGQPSSYGQQSSYGQQSSYGQQPPTSYPPQTGSYSQAPSQYSQQSSSYGQQSSFRQDHPSSMGVYGQESGGFSGPGENRSMSGPDNRGRGRGGFDRGGMSRGGRGGGRGGMGAGERGGFNKPGGPMDEGPDLDLGPPVDPDEDSDNSAIYVQGLNDSVTLDDLADFFKQCGVVKMNKRTGQPMIHIYLDKETGKPKGDATVSYEDPPTAKAAVEWFDGKDFQGSKLKVSLARKKPPMNSMRGGLPPREGRGMPPPLRGGPGGPGGPGGPMGRMGGRGGDRGGFPPRGPRGSRGNPSGGGNVQHRAGDWQCPNPGCGNQNFAWRTECNQCKAPKPEGFLPPPFPPPGGDRGRGGPGGMRGGRGGLMDRGGPGGMFRGGRGGDRGGFRGGRGMDRGGFGGGRRGGPGGPPGPLMEQMGGRRGGRGGPGKMDKGEHRQERRDRPY

SEQ ID NO: 12808 - protein, 2623 aa, Homo sapiens
MGEKVSEAPEPVPRGCSGHGSRTPASALVAASSPGASSAESSSGSETLSEEGEPGGFSREHQPPPPPPLGGTLGARAPAAWAPASVLLERGVLALPPPLPGGAVPPAPRGSSASQEEQDEELDHILSPPPMPFRKCSNPDVASGPGKSLKYKRQLSEDGRQLRRGSLGGALTGRYLLPNPVAGQAWPASAETSNLVRMRSQALGQSAPSLTASLKELSLPRRGSFCRTSNRKSLIGNGQSPALPRPHSPLSAHAGNSPQDSPRNFSPSASAHFSFARRTDGRRWSLASLPSSGYGTNTPSSTVSSSCSSQEKLHQLPYQPTPDELHFLSKHFCTTESIATENRCRNTPMRPRSRSLSPGRSPACCDHEIIMMNHVYKERFPKATAQMEERLKEIITSYSPDNVLPLADGVLSFTHHQIIELARDCLDKSHQGLITSRYFLELQHKLDKLLQEAHDRSESGELAFIKQLVRKILIVIARPARLLECLEFDPEEFYYLLEAAEGHAKEGQGIKTDIPRYIISQLGLNKDPLEEMAHLGNYDSGTAETPETDESVSSSNASLKLRRKPRESDFETIKLISNGAYGAVYFVRHKESRQRFAMKKINKQNLILRNQIQQAFVERDILTFAENPFVVSMYCSFETRRHLCMVMEYVEGGDCATLMKNMGPLPVDMARMYFAETVLALEYLHNYGIVHRDLKPDNLLVTSMGHIKLTDFGLSKVGLMSMTTNLYEGHIEKDAREFLDKQVCGTPEYIAPEVILRQGYGKPVDWWAMGIILYEFLVGCVPFFGDTPEELFGQVISDEINWPEKDEAPPPDAQDLITLLLRQNPLERLGTGGAYEVKQHRFFRSLDWNSLLRQKAEFIPQLESEDDTSYFDTRSEKYHHMETEEEDDTNDEDFNVEIRQFSSCSHRFSKVFSSIDRITQNSAEEKEDSVDKTKSTTLPSTETLSWSSEYSEMQQLSTSNSSDTESNRHKLSSGLLPKLAISTEGEQDEAASCPGDPHEEPGKPALPPEECAQEEPEVTTPASTISSSTLSVGSFSEHLDQINGRSECVDSTDNSSKPSSEPASHMARQRLESTEKKKISGKVTKSLSASALSLMIPGDMFAVSPLGSPMSPHSLSSDPSSSRDSSPSRDSSAASASPHQPIVIHSSGKNYGFTIRAIRVYVGDSDIYTVHHIVWNVEEGSPACQAGLKAGDLITHINGEPVHGLVHTEVIELLLKSGNKVSITTTPFENTSIKTGPARRNSYKSRMVRRSKKSKKKESLERRRSLFKKLAKQPSPLLHTSRSFSCLNRSLSSGESLPGSPTHSLSPRSPTPSYRSTPDFPSGTNSSQSSSPSSSAPNSPAGSGHIRPSTLHGLAPKLGGQRYRSGRRKSAGNIPLSPLARTPSPTPQPTSPQRSPSPLLGHSLGNSKIAQAFPSKMHSPPTIVRHIVRPKSAEPPRSPLLKRVQSEEKLSPSYGSDKKHLCSRKHSLEVTQEEVQREQSQREAPLQSLDENVCDVPPLSRARPVEQGCLKRPVSRKVGRQESVDDLDRDKLKAKVVVKKADGFPEKQESHQKSHGPGSDLENFALFKLEEREKKVYPKAVERSSTFENKASMQEAPPLGSLLKDALHKQASVRASEGAMSDGRVPAEHRQGGGDFRRAPAPGTLQDGLCHSLDRGISGKGEGTEKSSQAKELLRCEKLDSKLANIDYLRKKMSLEDKEDNLCPVLKPKMTAGSHECLPGNPVRPTGGQQEPPPASESRAFVSSTHAAQMSAVSFVPLKALTGRVDSGTEKPGLVAPESPVRKSPSEYKLEGRSVSCLKPIEGTLDIALLSGPQASKTELPSPESAQSPSPSGDVRASVPPVLPSSSGKKNDTTSARELSPSSLKMNKSYLLEPWFLPPSRGLQNSPAVSLPDPEFKRDRKGPHPTARSPGTVMESNPQQREGSSPKHQDHTTDPKLLTCLGQNLHSPDLARPRCPLPPEASPSREKPGLRESSERGPPTARSERSAARADTCREPSMELCFPETAKTSDNSKNLLSVGRTHPDFYTQTQAMEKAWAPGGKTNHKDGPGEARPPPRDNSSLHSAGIPCEKELGKVRRGVEPKPEALLARRSLQPPGIESEKSEKLSSFPSLQKDGAKEPERKEQPLQRHPSSIPPPPLTAKDLSSPAARQHCSSPSHASGREPGAKPSTAEPSSSPQDPPKPVAAHSESSSHKPRPGPDPGPPKTKHPDRSLSSQKPSVGATKGKEPATQSLGGSSREGKGHSKSGPDVFPATPGSQNKASDGIGQGEGGPSVPLHTDRAPLDAKPQPTSGGRPLEVLEKPVHLPRPGHPGPSEPADQKLSAVGEKQTLSPKHPKPSTVKDCPTLCKQTDNRQTDKSPSQPAANTDRRAEGKKCTEALYAPAEGDKLEAGLSFVHSENRLKGAERPAAGVGKGFPEARGKGPGPQKPPTEADKPNGMKRSPSATGQSSFRSTALPEKSLSCSSSFPETRAGVREASAASSDTSSAKAAGGMLELPAPSNRDHRKAQPAGEGRTHMTKSDSLPSFRVSTLPLESHHPDPNTMGGASHRDRALSVTATVGETKGKDPAPAQPPPARKQNVGRDVTKPSPAPNTDRPISLSNEKDFVVRQRRGKESLRSSPHKKAL

SEQ ID NO: 12809 - protein, 331 aa, Homo sapiens
MGPLSAPPCTQHITWKGLLLTASLLNFWNLPTTAQVIIEAKPPKVSEGKDVLLLVHNLPQNLTGYIWYKGQMTDLYHYITSYVVHGQIIYGPAYSGRETVYSNASLLIQNVTQEDAGSYTLHIIKRGDGTGGVTGYFTVTLYSETPKPSISSSNLNPREVMEAVRLICDPETPDASYLWLLNGQNLPMTHRLQLSKTNRTLYLFGVTKYIAGPYECEIRNPVSASRSDPVTLNLLHGPDLPRIYPSFTYYRSGENLDLSCFADSNPPAEYSWTINGKFQLSGQKLFIPQITTNHSGLYACSVRNSATGKEISKSMIVKVSGPCHGNQTESH

SEQ ID NO: 12810 - protein, 543 aa, Homo sapiens
MSRESDVEAQQSHGSSACSQPHGSVTQSQGSSSQSQGISSSSTSTMPNSSQSSHSSSGTLSSLETVSTQELYSIPEDQEPEDQEPEEPTPAPWARLWALQDGFANLECVNDNYWFGRDKSCEYCFDEPLLKRTDKYRTYSKKHFRIFREVGPKNSYIAYIEDHSGNGTFVNTELVGKGKRRPLNNNSEIALSLSRNKVFVFFDLTVDDQSVYPKALRDEYIMSKTLGSGACGEVKLAFERKTCKKVAIKIISKRKFAIGSAREADPALNVETEIEILKKLNHPCIIKIKNFFDAEDYYIVLELMEGGELFDKVVGNKRLKEATCKLYFYQMLLAVQYLHENGIIHRDLKPENVLLSSQEEDCLIKITDFGHSKILGETSLMRTLCGTPTYLAPEVLVSVGTAGYNRAVDCWSLGVILFICLSGYPPFSEHRTQVSLKDQITSGKYNFIPEVWAEVSEKALDLVKKLLVVDPKARFTTEEALRHPWLQDEDMKRKFQDLLSEENESTALPQVLAQPSTSRKRPREGEAEGAETTKRPAVCAAVL

SEQ ID NO: 12811 - protein, 608 aa, Homo sapiens
GFLSTGDQAAKGNYGLLDLIQALRWTSENIGFFGGDPLRITVFGSGAGGSCVNLLTLSHYSEGNRWSNSTKGLFQRAIAQSGTALSSWAVSFQPAKYARMLATKVGCNVSDTVELVECLQKKPYKELVDQDIQPARYHIAFGPVIDGDVIPDDPQILMEQGEFLNYDIMLGVNQGEGLKFVENIVDSDDGISASDFDFAVSNFVDNLYGYPEGKDVLRETIKFMYTDWADRHNPETRRKTLLALFTDHQWVAPAVATADLHSNFGSPTYFYAFYHHCQTDQVPAWADAAHGDEVPYVLGIPMIGPTELFPCNFSKNDVMLSAVVMTYWTNFAKTGDPNQPVPQDTKFIHTKPNRFEEVAWTRYSQKDQLYLHIGLKPRVKEHYRANKVNLWLELVPHLHNLNDISQYTSTTTKVPSTDITFRPTRKNSVPVTSAFPTAKQDDPKQQPSPFSVDQRDYSTELSVTIAVGASLLFLNILAFAALYYKKDKRRHDVHRRCSPQRTTTNDLTHAQEEEIMSLQMKHTDLDHECESIHPHEVVLRTACPPDYTLAMRRSPDDVPLMTPNTITMIPNTIPGIQPLHTFNTFTGGQNNTLPHPHPHPHSHSTTRV

SEQ ID NO: 12812 - protein, 272 aa, Homo sapiens
MTHIVREVDRPGSKVNKKEVVEAVTIVETPPMVVVGIVGYVETPRGLRTFKTVFAEHISDECKRRFYKNWHKSKKKAFTKYCKKWQDEDGKKQLEKDFSSMKKYCQVIRVIAHTQMRLLPLRQKKAHLMEIQVNGGTVAEKLDWARERLEQQVPVNQVFGQDEMIDVIGVTKGKGYKGVTSRWHTKKLPRKTHRGLRKVACIGAWHPARVAFSVARAGQKGYHHRTEINKKIYKIGQGYLIKDGKLIKNNASTDYDLSDKSINPLGGFVHYG

SEQ ID NO: 12813 - protein, 247 aa, Homo sapiens
MAKERGLISPSDFAQLQKYMEYSTKKVSDVLKLFEDGEMAKYVQGDAIGYEGFQQFLKIYLEVDNVPRHLSLALFQSFETGHCLNETNVTKDVVCLNDVSCYFSLLEGGRPEDKLEFTFKLYDTDRNGILDSSEVDKIILQMMRVAEYLDWDVSELRPILQEMMKEIDYDGSGSVSQAEWVRAGATTVPLLVLLGLEMTLKDDGQHMWRPKRFPRPVYCNLCESSIGLGKQGLSCNRPITCVGARRL

SEQ ID NO: 12814 - protein, 661 aa, Homo sapiens
MRVLGGRCGALLACLLLVLPVSEANFLSKQQASQVLVRKRRANSLLEETKQGNLERECIEELCNKEEAREVFENDPETDYFYPKYLVCLRSFQTGLFTAARQSTNAYPDLRSCVNAIPDQCSPLPCNEDGYMSCKDGKASFTCTCKPGWQGEKCEFDINECKDPSNINGGCSQICDNTPGSYHCSYVDECSLKPSICGTAVCKNIPGDFECECPEGYRYNLKSKSCEDIDECSENMCAQLCVNYPGGYTCYCDGKKGFKLAQDQKSCEVVSVCLPLNLDTKYELLYLAEQFAGVVLYLKFRLPEISRFSAEFDFRTYDSEGVILYAESIDHSAWLLIALRGGKIEVQLKNEHTSKITTGGDVINNGLWNMVSVEELEHSISIKIAKEAVMDINKPGPLFKPENGLLETKVYFAGFPRKVESELIKPINPRLDGCIRSWNLMKQGASGIKEIIQEKQNKHCLVTVEKGSYYPGSGIAQFHIDYNNVSSAEGWHVNVTLNIRPSTGTGVMLALVSGNNTVPFAVSLVDSTSEKSQDILLSVENTVIYRIQALSLCSDQQSHLEFRVNRNNLELSTPLKIETISHEDLQRQLAVLDKAMKAKVATYLGGLPDVPFSATPVNAFYNGCMEVNINGVQLDLDEAISKHNDIRAHSCPSVWKKTKNS

SEQ ID NO: 12815 - protein, 888 aa, Homo sapiens
MDRSSKRRQVKPLAASLLEALDYDSSDDSDFKVGDASDSEGSGNGSEDASKDSGEGSCSDSEENILEEELNEDIKVKEEQLKNSAEEEVLSSEKQLIKMEKKEEEENGERPRKKKEKEKEKEKEKEKEKEREKEKEKATVSENVAASAAATTPATSPPAVNTSPSVPTTTTATEEQVSEPKKWNLRRNRPLLDFVSMEELNDMDDYDSEDDNDWRPTVVKRKGRSASQKEGSDGDNEDDEDEGSGSDEDENDEGNDEDHSSPASEGGCKKKKSKVLSRNSADDEELTNDSLTLSQSKSNEDSLILEKSQNWSSQKMDHILICCVCLGDNSEDADEIIQCDNCGITVHEGCYGVDGESDSIMSSASENSTEPWFCDACKCGVSPSCELCPNQDGIFKETDAGRWVHIVCALYVPGVAFGDIDKLRPVTLTEMNYSKYGAKECSFCEDPRFARTGVCISCDAGMCRAYFHVTCAQKEGLLSEAAAEEDIADPFFAYCKQHADRLDRKWKRKNYLALQSYCKMSLQEREKQLSPEAQARINARLQQYRAKAELARSTRPQAWVPREKLPRPLTSSASAIRKLMRKAELMGISTDIFPVDNSDTSSSVDGRRKHKQPALTADFVNYYFERNMRMIQIQENMAEQKNIKDKLENEQEKLHVEYNKLCESLEELQNLNGKLRSEGQGIWALLGRITGQKLNIPAILRAPKERKPSKKEGGTQKTSTLPAVLYSCGICKKNHDQHLLLLCDTCKLHYHLGCLDPPLTRMPRKTKNSYWQCSECDQAGSSDMEADMAMETLPDGTKRSRRQIKEPVKFVPQDVPPEPKKIPIRNTRTRGRKRSFVPEEEKHEERVPRERRQRQSVLQKKPKAEDLRTECATCKGTGDNENLVRYPS

SEQ ID NO: 12816 - protein, 725 aa, Homo sapiens
MWGFLKRPVVVTADINLSLVALTGMGLLSRLWRLTYPRAVVFDEVYYGQYISFYMKQIFFLDDSGPPFGHMVLALGGYLGGFDGNFLWNRIGAEYSSNVPVWSLRLLPALAGALSVPMAYQIVLELHFSHCAAMGAALLMLIENALITQSRLMLLESVLIFFNLLAVLSYLKFFNCQKHSPFSLSWWFWLTLTGVACSCAVGIKYMGVFTYVLVLGVAAVHAWHLLGDQTLSNVCVFCHLLARAVALLVIPVVLYLLFFYVHLILVFRSGPHDQIMSSAFQASLEGGLARITQGQPLEVAFGSQVTLRNVFGKPVPCWLHSHQDTYPMIYENGRGSSHQQQVTCYPFKDVNNWWIVKDPRRHQLVVSSPPRPVRHGDMVQLVHGMTTRSLNTHDVAAPLSPHSQEVSCYIDYNISMPAQNLWRLEIVNRGSDTDVWKTILSEVRFVHVNTSAVLKLSGAHLPDWGYRQLEIVGEKLSRGYHGSTVWNVEEHRYGASQEQRERERELHSPAQVDVSRNLSFMARFSELQWRMLALRSDDSEHKYSSSPLEWVTLDTNIAYWLHPRTSAQIHLLGNIVIWVSGSLALAIYALLSLWYLLRRRRNVHDLPQDAWLRWVLAGALCAGGWAVNYLPFFLMEKTLFLYHYLPALTFQILLLPVVLQHISDHLCRSQLQRSIFSALVVAWYSSACHVSNTLRPLTYGDKSLSPHELKALRWKDSWDILIRKH

SEQ ID NO: 12817 - protein, 604 aa, Homo sapiens
MGGCFSKPKPGAALPTVELKIEVVLPEKERGKEELSASGKGSPRAYQGNGTARHFHTEERLSTPHPYPSPQDCVEAAVCHVKDLENGQMREVELGWGKVLLVKDNGEFHALGHKCPHYGAPLVKGVLSRGRVRCPWHGACFNISTGDLEDFPGLDSLHKFQVKIEKEKVYVRASKQALQLQRRTKVMAKCISPSAGYSSSTNVLIVGAGAAGLVCAETLRQEGFSDRIVLCTLDRHLPYDRPKLSKSLDTQPEQLALRPKEFFRAYGIEVLTEAQVVTVDVRTKKVVFKDGFKLEYSKLLLAPGSSPKTLSCKGKEVENVFTIRTPEDANRVVRLARGRNVVVVGAGFLGMEVAAYLTEKAHSVSVVELEETPFRRFLGERVGRALMKMFENNRVKFYMQTEVSELRGQEGKLKEVVLKSSKVVRADVCVVGIGAVPATGFLRQSGIGLDSRGFIPVNKMMQTNVPGVFAAGDAVTFPLAWRNNRKVNIPHWQMAHAQGRVAAQNMLAQEAEMSTVPYLWTAMFGKSLRYAGYGEGFDDVIIQGDLEELKFVAFYTKGDEVIAVASMNYDPIVSKVAEVLASGRAIRKREVETGDMSWLTGKGS

SEQ ID NO: 12818 - protein, 500 aa, Homo sapiens
MECGIPPTLVCVGRGGGLHTVGVFHVLSQLISLCTIPEVFKEKPKINIIIWYYFPSAWRTCFNISSSVGLLLTNSYKFYTTTYSTERSEHFKPCRDKDLAYCLNDGECFVIETLTGSHKHCRCKEGYQGVRCDQFLPKTDSILSDPTDHLGIEFMESEEVYQRQVLSISCIIFGIVIVGMFCAAFYFKSKKQAKQIQEQLKVPQNGKSYSLKASSTMAKSENLVKSHVQLQNYSKVERHPVTALEKMMESSFVGPQSFPEVPSPDRGSQSVKHHRSLSSCCSPGQRSGMLHRNAFRRTPPSPRSRLGGIVGPAYQQLEESRIPDQDTIPCQGYSSSGLKTQRNTSINMQLPSRETNPYFNSLEQKDLVGYSSTRASSVPIIPSVGLEETCLQMPGISEVKSIKWCKNSYSADVVNVSIPVSDCLIAEQQEVKILLETVQEQIRILTDARRSEDYELASVETEDSASENTAFLPLSPTAKSEREAQFVLRNEIQRDSALTK

SEQ ID NO: 12819 - protein, 1142 aa, Homo sapiens
MDALIIPVTMEVPCDSRGQRMWWAFLASSMVTFFGGLFIILLWRTLKYLWTVCCHCGGKTKEAQKINNGSSQADGTLKPVDEKEEAVAAEVGWMTSVKDWAGVMISAQTLTGRVLVVLVFALSIGALVIYFIDSSNPIESCQNFYKDFTLQIDMAFNVFFLLYFGLRFIAANDKLWFWLEVNSVVDFFTVPPVFVSVYLNRSWLGLRFLRALRLIQFSEILQFLNILKTSNSIKLVNLLSIFISTWLTAAGFIHLVENSGDPWENFQNNQALTYWECVYLLMVTMSTVGYGDVYAKTTLGRLFMVFFILGGLAMFASYVPEIIELIGNRKKYGGSYSAVSGRKHIVVCGHITLESVSNFLKDFLHKDRDDVNVEIVFLHNISPNLELEALFKRHFTQVEFYQGSVLNPHDLARVKIESADACLILANKYCADPDAEDASNIMRVISIKNYHPKIRIITQMLQYHNKAHLLNIPSWNWKEGDDAICLAELKLGFIAQSCLAQGLSTMLANLFSMRSFIKIEEDTWQKYYLEGVSNEMYTEYLSSAFVGLSFPTVCELCFVKLKLLMIAIEYKSANRESRILINPGNHLKIQEGTLGFFIASDAKEVKRAFFYCKACHDDITDPKRIKKCGCKRLKVAARSRYSKDPFEFKKETPNSRLVTEPVEDEQPSTLSPKKKQRNGGMRNSPNTSPKLMRHDPLLIPGNDQIDNMDSNVKKYDSTGMFHWCAPKEIEKVILTRSEAAMTVLSGHVVVCIFGDVSSALIGLRNLVMPLRASNFHYHELKHIVFVGSIEYLKREWETLHNFPKVSILPGTPLSRADLRAVNINLCDMCVILSANQNNIDDTSLQDKECILASLNIKSMQFDDSIGVLQANSQGFTPPGMDRSSPDNSPVHGMLRQPSITTGVNIPIITELVNDTNVQFLDQDDDDDPDTELYLTQPFACGTAFAVSVLDSLMSATYFNDNILTLIRTLVTGGATPELEALIAEENALRGGYSTPQTLANRDRCRVAQLALLDGPFADLGDGGCYGDLFCKALKTYNMLCFGIYRLRDAHLSTPSQCTKRYVITNPPYEFELVPTDLIFCLMQFDHNAGQSRASLSHSSHSSQSSSKKSSSVHSIPSTANRQNRPKSRESRDKQNRKEMVYR

SEQ ID NO: 12820 - protein, 726 aa, Homo sapiens
MPINKSEKPESCDNVKVVVRCRPLNEREKSMCYKQAVSVDEMRGTITVHKTDSSNEPPKTFTFDTVFGPESKQLDVYNLTARPIIDSVLEGYNGTIFAYGQTGTGKTFTMEGVRAIPELRGIIPNSFAHIFGHIAKAEGDTRFLVRVSYLEIYNEEVRDLLGKDQTQRLEVKERPDVGVYIKDLSAYVVNNADDMDRIMTLGHKNRSVGATNMNEHSSRSHAIFTITIECSEKGIDGNMHVRMGKLHLVDLAGSERQAKTGATGQRLKEATKINLSLSTLGNVISALVDGKSTHVPYRNSKLTRLLQDSLGGNSKTMMCANIGPADYNYDETISTLRYANRAKNIKNKARINEDPKDALLRQFQKEIEELKKKLEEGEEISGSDISGSEEDDDEEGEVGEDGEKRKKRRGSSSSSSSDSTCSVIEKPLDKFLPNQAGKKKVSPDKMIEMQAKIDEERKALETKLDMEEEERNKARAELEKREKDLLKAQQEHQSLLEKLSALEKKVIVGGVDLLAKAEEQEKLLEESNMELEERRKRAEQLRRELEEKEQERLDIEEKYTSLQEEAQGKTKKLKKVWTMLMAAKSEMADLQQEHQREIEGLLENIRQLSRELRLQMLIIDNFIPRDYQEMIENYVHWNEDIGEWQLKCVAYTGNNMRKQTPVPDKKEKDPFEVDLSHVYLAYTEESLRQSLMKLERPRTSKGKARPKTGRRKRSAKPETVIDSLLQ

SEQ ID NO: 12821 - protein, 231 aa, Homo sapiens
MAESLRSPRRSLYKLVGSPPWKEAFRQRCLERMRNSRDRLLNRYRQAGSSGPGNSQNSFLVQEVMEEEWNALQSVENCPEDLAQLEELIDMAVLEEIQQELINQEQSIISEYEKSLQFDEKCLSIMLAEWEANPLICPVCTKYNLRITSGVVVCQCGLSIPSHSSELTEQKLRACLEGSINEHSAHCPHTPEFSVTGGTEEKSSLLMSCLVSVSWDPLCGKRDLWLVLFPP

SEQ ID NO: 12822 - protein, 622 aa, Homo sapiens
MELGKGKLLRTGLNALHQAVHPIHGLAWTDGNQVVLTDLRLHSGEVKFGDSKVIGQFECVCGLSWAPPVADDTPVLLAVQHEKHVTVWQLCPSPMESSKWLTSQTCEIRGSLPILPQGCVWHPKCAILTVLTAQDVSIFPNVHSDDSQVKADINTQGRIHCACWTQDGLRLVVAVGSSLHSYIWDSAQKTLHRCSSCLVFDVDSHVCSITATVDSQVAIATELPLDKICGLNASETFNIPPNSKDMTPYALPVIGEVRSMDKEATDSETNSEVSVSSSYLEPLDLTHIHFNQHKSEGNSLICLRKKDYLTGTGQDSSHLVLVTFKKAVTMTRKVTIPGILVPDLIAFNLKAHVVAVASNTCNIILIYSVIPSSVPNIQQIRLENTERPKGICFLTDQLLLILVGKQKLTDTTFLPSSKSDQYAISLIVREIMLEEEPSITSGESQTTYSTFSAPLNKANRKKLIESLSPDFCHQNKGLLLTVNTSSQNGRPGRTLIKEIQSPLSSICDGSIALDAEPVTQPASLPRHSSTPDHTSTLEPPRLPQRKNLQSEKETYQLSKEVEILSRNLVEMQRCLSELTNRLHNGKKSSSVYPLSQDLPYVHIIYQIPTGFFSLLTVRALSR

SEQ ID NO: 12823 - protein, 173 aa, Homo sapiens
MSTVKEAAHRLSKSEMSLYAVLDLKKGASPEDFKKSYRKLALRYHPDKNPGNAQAAEIFKEINAAHAILSDSKKRKIYDQHGSLGIYLYDHFGEEGVRYYFILNSCWFKTLVILCTLLTCCCFCCCCCFCCGALKPPPEQDSGRKYQQNVQSQPPRSGAKCDFRSEENSEDDF

SEQ ID NO: 12824 - protein, 782 aa, Homo sapiens
MEKLTFYALSAPEKLDRIGAYLSERLIRDVGRHRYGYVCIAMEALDQLLMACHCQSINLFVESFLKMVAKLLESEKPNLQILGTNSFVKFANIEEDTPSYHRSYDFFVSRFSEMCHSSHDDLEIKTKIRMSGIKGLQGVVRKTVNDELQANIWDPQHMDKIVPSLLFNLQHVEEAESRSPSPLQAPEKEKESPAELAERCLRELLGRAAFGNIKNAIKPVLIHLDNHSLWEPKVFAIRCFKIIMYSIQPQHSHLVIQQLLGHLDANSRSAATVRAGIVEVLSEAAVIAATGSVGPTVLEMFNTLLRQLRLSIDYALTGSYDGAVSLGTKIIKEHEERMFQEAVIKTVGSFASTLPTYQRSEVILFIMSKVPRPSLHQAVDTGRTGENRNRLTQIMLLKSLLQVSTGFQCNNMMSALPSNFLDRLLSTALMEDAEIRLFVLEILISFIDRHGNRHKFSTISTLSDISVLKLKVDKCSRQDTVFMKKHSQQLYRHIYLSCKEETNVQKHYEALYGLLALISIELANEEVVVDLIRLVLAVQDVAQVNEENLPVYNRCALYALGAAYLNLISQLTTVPAFCQHIHEVIETRKKEAPYMLPEDVFVERPRLSQNLDGVVIELLFRQSKISEVLGGSGYNSDRLCLPYIPQLTDEDRLSKRRSIGETISLQVEVESRNSPEKEERVPAEEITYETLKKAIVDSVAVEEQERERRRQVVEKFQKAPFEEIAAHCGARASLLQSKLNQIFEITIRPPPSPSGTITAAYGQPQNHSIPVYEMKFPDLCVY

SEQ ID NO: 12825 - protein, 698 aa, Homo sapiens
MRLAVGALLVCAVLGLCLAVPDKTVRWCAVSEHEATKCQSFRDHMKSVIPSDGPSVACVKKASYLDCIRAIAANEADAVTLDAGLVYDAYLAPNNLKPVVAEFYGSKEDPQTFYYAVAVVKKDSGFQMNQLRGKKSCHTGLGRSAGWNIPIGLLYCDLPEPRKPLEKAVANFFSGSCAPCADGTDFPQLCQLCPGCGCSTLNQYFGYSGAFKCLKDGAGDVAFVKHSTIFENLANKADRDQYELLCLDNTRKPVDEYKDCHLAQVPSHTVVARSMGGKEDLIWELLNQAQEHFGKDKSKEFQLFSSPHGKDLLFKDSAHGFLKVPPRMDAKMYLGYEYVTAIRNLREGTCPEAPTDECKPVKWCALSHHERLKCDEWSVNSVGKIECVSAETTEDCIAKIMNGEADAMSLDGGFVYIAGKCGLVPVLAENYNKSDNCEDTPEAGYFAIAVVKKSASDLTWDNLKGKKSCHTAVGRTAGWNIPMGLLYNKINHCRFDEFFSEGCAPGSKKDSSLCKLCMGSGLNLCEPNNKEGYYGYTGAFRCLVEKGDVAFVKHQTVPQNTGGKNPDPWAKNLNEKDYELLCLDGTRKPVEEYANCHLARAPNHAVVTRKDKEACVHKILRQQQHLFGSNVTDCSGNFCLFRSETKDLLFRDDTVCLAKLHDRNTYEKYLGEEYVKAVGNLRKCSTSSLLEACTFRRP

SEQ ID NO: 12826 - protein, 931 aa, Homo sapiens
MPPLKSPAAFHEQRRSLERARTEDYLKRKIRSRPERSELVRMHILEETSAEPSLQAKQLKLKRARLADDLNEKIAQRPGPMELVEKNILPVESSLKEAIIVGQVNYPKVADSSSFDEDSSDALSPEQPASHESQGSVPSPLEARVSEPLLSATSASPTQVVSQLPMGRDSREMLFLAEQPPLPPPPLLPPSLTNGTTIPTAKSTPTLIKQSQPKSASEKSQRSKKAKELKPKVKKLKYHQYIPPDQKQDRGAPPMDSSYAKILQQQQLFLQLQILNQQQQQHHNYQAILPAPPKSAGEALGSSGTPPVRSLSTTNSSSSSGAPGPCGLARQNSTSLTGKPGALPANLDDMKVAELKQELKLRSLPVSGTKTELIERLRAYQDQISPVPGAPKAPAATSILHKAGEVVVAFPAARLSTGPALVAAGLAPAEVVVATVASSGVVKFGSTGSTPPVSPTPSERSLLSTGDENSTPGDTFGEMVTSPLTQLTLQASPLQILVKEEGPRAGSCCLSPGGRAELEGRDKDQMLQEKDKQIEALTRMLRQKQQLVERLKLQLEQEKRAQQPAPAPAPLGTPVKQENSFSSCQLSQQPLGPAHPFNPSLAAPATNHIDPCAVAPGPPSVVVKQEALQPEPEPVPAPQLLLGPQGPSLIKGVAPPTLITDSTGTHLVLTVTNKNADSPGLSSGSPQQPSSQPGSPAPAPSAQMDLEHPLQPLFGTPTSLLKKEPPGYEEAMSQQPKQQENGSSSQQMDDLFDILIQSGEISADFKEPPSLPGKEKPSPKTVCGSPLAAQPSPSAELPQAAPPPPGSPSLPGRLEDFLESSTGLPLLTSGHDGPEPLSLIDDLHSQMLSSTAILDHPPSPMDTSELHFVPEPSSTMGLDLADGHLDSMDWLELSSGGPVLSLAPLSTTAPSLFSTDFLDGHDLQLHWDSCL

SEQ ID NO: 12827 - protein, 990 aa, Homo sapiens
MSNSNTTQETLEIMKESEKKLVEESVNKNKFISKTPSKEEIEKECEDTSLRQETQRRTSNHGHARKRAKSNSKLKLVRSLAVCEESSTPFADGPLETQDIIQLHISCPSDKEEEKSTKDVSEKEDKDKNKEKIPRKMLSRDSSQEYTDSTGIDLHEFLVNTLKKNPRDRMMLLKLEQEILEFINDNNNQFKKFPQMTSYHRMLLHRVAAYFGMDHNVDQTGKAVIINKTSNTRIPEQRFSEHIKDEKNTEFQQRFILKRDDASMDRDDNQIRVPLQDGRRSKSIEEREEEYQRVRERIFARETGQNGYLNDIRGNREGLSRTSSSRQSSTDSELKSLEPRPWSSTDSDGSVRSMRPPVTKASSFSGISILTRGDSIGSSKGGSAGRISRPGMALGAPEVCNQVTSSQSVRGLLPCTAQQQQQQQQQQLPALPPTPQQQPPLNNHMISQADDLSNPFGQMSLSRQGSTEAADPSAALFQTPLISQHPQQTSFIMASTGQPLPTSNYSTSSHAPPTQQVLPPQGYMQPPQQIQVSYYPPGQYPNSNQQYRPLSHPVAYSPQRGQQLPQPSQQPGLQPMMPNQQQAAYQGMIGVQQPQNQGLLSSQRSSMGGQMQGLVVQYTPLPSYQVPVGSDSQNVVQPPFQQPMLVPVSQSVQGGLPAAGVPVYYSMIPPAQQNGTSPSVGFLQPPGSEQYQMPQSPSPCSPPQMPQQYSGVSPSGPGVVVMQLNVPNGPQPPQNPSMVQWSHCKYYSMDQRGQKPGDLYSPDSSPQANTQMSSSPVTSPTQSPAPSPVTSLSSVCTGLSPLPVLTQFPRPGGPAQGDGRYSLLGQPLQYNLSICPPLLHGQSTYTVHQGQSGLKHGNRGKRQALKSASTDLGTADVVLGRVLEVTDLPEGITRTEADKLFTQLAMSGAKIQWLKDAQGLPGGGGGDNSGTAENGRHSDLAALYTIVAVFPSPLAAQNASLRLNNSVSRFKLRMAKKNYDLRILERASSQ

SEQ ID NO: 12828 - protein, 3829 aa, Homo sapiens
MNTFWPGRELIVQWYPFDENRNHPSVSWLKMVWKNLYIHFSEDLTLFDEMPLIPRTILEEGQTCVELIRLRIPSLVILDDESEAQLPEFLADIVQKLGGFVLKKLDASIQHPLIKKYIHSPLPSAVLQIMEKMPLQKLCNQITSLLPTHKDALRKFLASLTDSSEKEKRIIQELAIFKRINHSSDQGISSYTKLKGCKVLHHTAKLPADLRLSISVIDSSDEATIRLANMLKIEQLKTTSCLKLVLKDIENAFYSHEEVTQLMLWVLENLSSLKNENPNVLEWLTPLKFIQISQEQMVSAGELFDPDIEVLKDLFCNEEGTYFPPSVFTSPDILHSLRQIGLKNEASLKEKDVVQVAKKIEALQVGACPDQDVLLKKAKTLLLVLNKNHTLLQSSEGKMTLKKIKWVPACKERPPNYPGSLVWKGDLCNLCAPPDMCDVGHAILIGSSLPLVESIHVNLEKALGIFTKPSLSAVLKHFKIVVDWYSSKTFSDEDYYQFQHILLEIYGFMHDHLNEGKDSFRALKFPWVWTGKKFCPLAQAVIKPIHDLDLQPYLHNVPKTMAKFHQLFKVCGSIEELTSDHISMVIQKIYLKSDQDLSEQESKQNLHLMLNIIRWLYSNQIPASPNTPVPIHHSKNPSKLIMKPIHECCYCDIKVDDLNDLLEDSVEPIILVHEDIPMKTAEWLKVPCLSTRLINPENMGFEQSGQREPLTVRIKNILEEYPSVSDIFKELLQNADDANATECSFLIDMRRNMDIRENLLDPGMAACHGPALWSFNNSQFSDSDFVNITRLGESLKRGEVDKVGKFGLGFNSVYHITDIPIIMSREFMIMFDPNINHISKHIKDKSNPGIKINWSKQQKRLRKFPNQFKPFIDVFGCQLPLTVEAPYSYNGTLFRLSFRTQQEAKVSEVSSTCYNTADIYSLVDEFSLCGHRLIIFTQSVKSMYLKYLKIEETNPSLAQDTVIIKKKSCSSKALNTPVLSVLKEAAKLMKTCSSSNKKLPSDEPKSSCILQITVEEFHHVFRRIADLQSPLFRGPDDDPAALFEMAKSGQSKKPSDELSQKTVECTTWLLCTCMDTGEALKFSLSESGRRLGLVPCGAVGVQLSEIQDQKWTVKPHIGEVFCYLPLRIKTGLPVHINGCFAVTSNRKEIWKTDTKGRWNTTFMRHVIVKAYLQVLSVLRDLATSGELMDYTYYAVWPDPDLVHDDFSVICQGFYEDIAHGKGKELTKVFSDGSTWVSMKNVRFLDDSILKRRDVGSAAFKIFLKYLKKTGSKNLCAVELPSSVKLGFEEAGCKQILLENTFSEKQFFSEVFFPNIQEIEAELRDPLMIFVLNEKVDEFSGVLRVTPCIPCSLEGHPLVLPSRLIHPEGRVAKLFDIKDGRFPYGSTQDYLNPIILIKLVQLGMAKDDILWDDMLERAVSVAEINKSDHVAACLRSSILLSLIDEKLKIRDPRAKDFAAKYQTIRFLPFLTKPAGFSLDWKGNSFKPETMFAATDLYTAEHQDIVCLLQPILNENSHSFRGCGSVSLAVKEFLGLLKKPTVDLVINQLKEVAKSVDDGITLYQENITNACYKYLHEALMQNEITKMSIIDKLKPFSFILVENAYVDSEKVSFHLNFEAAPYLYQLPNKYKNNFRELFETVGVRQSCTVEDFALVLESIDQERGTKQITEENFQLCRRIISEGIWSLIREKKQEFCEKNYGKILLPDTNLMLLPAKSLCYNDCPWIKVKDTTVKYCHADIPREVAVKLGAVPKRHKALERYASNVCFTTLGTEFGQKEKLTSRIKSILNAYPSEKEMLKELLQNADDAKATEICFVFDPRQHPVDRIFDDKWAPLQGPALCVYNNQPFTEDDVRGIQNLGKGTKEGNPYKTGQYGIGFNSVYHITDCPSFISGNDILCIFDPHARYAPGATSISPGRMFRDLDADFRTQFSDVLDLYLGTHFKLDNCTMFRFPLRNAEMAKVSEISSVPASDRMVQNLLDKLRSDGAELLMFLNHMEKISICEIDKSTGALNVLYSVKGKITDGDRLKRKQFHASVIDSVTKKRQLKDIPVQQITYTMDTEDSEGNLTTWLICNRSGFSSMEKVSKSVISAHKNQDITLFPRGGVAACITHNYKKPHRAFCFLPLSLETGLPFHVNGHFALDSARRNLWRDDNGVGVRSDWNNSLMTALIAPAYVELLIQLKKRYFPGSDPTLSVLQNTPIHVVKDTLKKFLSFFPVNRLDLQPDLYCLVKALYNCIHEDMKRLLPVVRAPNIDGSDLHSAVIITWINMSTSNKTRPFFDNLLQDELQHLKNADYNITTRKTVAENVYRLKHLLLEIGFNLVYNCDETANLYHCLIDADIPVSYVTPADIRSFLMTFSSPDTNCHIGKLPCRLQQTNLKLFHSLKLLVDYCFKDAEENEIEVEGLPLLITLDSVLQTFDAKRPKFLTTYHELIPSRKDLFMNTLYLKYSNILLNCKVAKVFDISSFADLLSSVLPREYKTKSCTKWKDNFASESWLKNAWHFISESVSVKEDQEETKPTFDIVVDTLKDWALLPGTKFTVSANQLVVPEGDVLLPLSLMHIAVFPNAQSDKVFHALMKAGCIQLALNKICSKDSAFVPLLSCHTANIESPTSILKALHYMVQTSTFRAEKLVENDFEALLMYFNCNLNHLMSQDDIKILKSLPCYKSISGRYVSIGKFGTCYVLTKSIPSAEVEKWTQSSSSAFLEEKIHLKELYEVIGCVPVDDLEVYLKHLLPKIENLSYDAKLEHLIYLKNRLSSAEELSEIKEQLFEKLESLLIIHDANSRLKQAKHFYDRTVRVFEVMLPEKLFIPNDFFKKLEQLIKPKNHVTFMTSWVEFLRNIGLKYILSQQQLLQFAKEISVRANTENWSKETLQNTVDILLHHIFQERMDLLSGNFLKELSLIPFLCPERAPAEFIRFHPQYQEVNGTLPLIKFNGAQVNPKFKQCDVLQLLWTSCPILPEKATPLSIKEQEGSDLGPQEQLEQVLNMLNVNLDPPLDKVINNCRNICNITTLDEEMVKTRAKVLRSIYEFLSAEKREFRFQLRGVAFVMVEDGWKLLKPEEVVINLEYESDFKPYLYKLPLELGTFHQLFKHLGTEDIISTKQYVEVLSRIFKNSEGKQLDPNEMRTVKRVVSGLFRSLQNDSVKVRSDLENVRDLALYLPSQDGRLVKSSILVFDDAPHYKSRIQGNIGVQMLVDLSQCYLGKDHGFHTKLIMLFPQKLRPRLLSSILEEQLDEETPKVCQFGALCSLQGRLQLLLSSEQFITGLIRIMKHENDNAFLANEEKAIRLCKALREGLKVSCFEKLQTTLRVKGFNPIPHSRSETFAFLKRFGNAVILLYIQHSDSKDINFLLALAMTLKSATDNLISDTSYLIAMLGCNDIYRIGEKLDSLGVKYDSSEPSKLELPMPGTPIPAEIHYTLLMDPMNVFYPGEYVGYLVDAEGGDIYGSYQPTYTYAIIVQEVEREDADNSSFLGKIYQIDIGYSEYKIVSSLDLYKFSRPEESSQSRDSAPSTPTSPTEFLTPGLRSIPPLFSGRESHKTSSKHQSPKKLKVNSLPEILKEVTSVVEQAWKLPESERKKIIRRLYLKWHPDKNPENHDIANEVFKHLQNEINRLEKQAFLDQNADRASRRTFSTSASRFQSDKYSFQRFYTSWNQEATSHKSERQQQNKEKCPPSAGQTYSQRFFVPPTFKSVGNPVEARRWLRQARANFSAARNDLHKNANEWVCFKCYLSTKLALIAADYAVRGKSDKDVKPTALAQKIEEYSQQLEGLTNDVHTLEAYGVDSLKTRYPDLLPFPQIPNDRFTSEVAMRVMECTACIIIKLENFMQQKV

SEQ ID NO: 12829 - protein, 765 aa, Homo sapiens
MNVALQELGAGSNMVEYKRATLRDEDAPETPVEGGASPDAMEVGFQKGTRQLLGSRTQLELVLAGASLLLAALLLGCLVALGVQYHRDPSHSTCLTEACIRVAGKILESLDRGVSPCEDFYQFSCGGWIRRNPLPDGRSRWNTFNSLWDQNQAILKHLLENTTFNSSSEAEQKTQRFYLSCLQVERIEELGAQPLRDLIEKIGGWNITGPWDQDNFMEVLKAVAGTYRATPFFTVYISADSKSSNSNVIQVDQSGLFLPSRDYYLNRTANEKVLTAYLDYMEELGMLLGGRPTSTREQMQQVLELEIQLANITVPQDQRRDEEKIYHKMSISELQALAPSMDWLEFLSFLLSPLELSDSEPVVVYGMDYLQQVSELINRTEPSILNNYLIWNLVQKTTSSLDRRFESAQEKLLETLYGTKKSCVPRWQTCISNTDDALGFALGSLFVKATFDRQSKEIAEGMISEIRTAFEEALGQLVWMDEKTRQAAKEKADAIYDMIGFPDFILEPKELDDVYDGYEISEDSFFQNMLNLYNFSAKVMADQLRKPPSRDQWSMTPQTVNAYYLPTKNEIVFPAGILQAPFYARNHPKALNFGGIGVVMGHELTHAFDDQGREYDKEGNLRPWWQNESLAAFRNHTACMEEQYNQYQVNGERLNGRQTLGENIADNGGLKAAYNAYKAWLRKHGEEQQLPAVGLTNHQLFFVGFAQVWCSVRTPESSHEGLVTDPHSPARFRVLGTLSNSRDFLRHFGCPVGSPMNPGQLCEVW

SEQ ID NO: 12830 - protein, 329 aa, Homo sapiens
MKQRFSALQLLKLLLLLQPPLPRALREALCPEPCNCVPDGALRCPGPTAGLTRLSLAYLPVKVIPSQAFRGLNEVIKIEISQIDSLERIEANAFDNLLNLSEILIQNTKNLRYIEPGAFINLPRLKYLSICNTGIRKFPDVTKVFSSESNFILEICDNLHITTIPGNAFQGMNNESVTLKLYGNGFEEVQSHAFNGTTLTSLELKENVHLEKMHNGAFRGATGPKTLDISSTKLQALPSYGLESIQRLIATSSYSLKKLPSRETFVNLLEATLTYPSHCCAFRNLPTKEQNFSHSISENFSKQCESTVRKVNNKTLLLHGALSAAHSLS

SEQ ID NO: 12831 - protein, 1205 aa, Homo sapiens
MKVTVCFGRTGIVVPCKEGQLRVGELTQQALQRYLKTREKGPGYWVKIHHLEYTDGGILDPDDVLADVVEDKDKLIAVFEEQEPLHKIESPSGNPADRQSPDAFETEVAAQLAAFKPIGGEIEVTPSALKLGTPLLVRRSSDPVPGPPADTQPSASHPGGQSLKLVVPDSTQNLEDREVLNGVQTELLTSPRTKDTLSDMTRTVEISGEGGPLGIHVVPFFSSLSGRILGLFIRGIEDNSRSKREGLFHENECIVKINNVDLVDKTFAQAQDVFRQAMKSPSVLLHVLPPQNREQYEKSVIGSLNIFGNNDGVLKTKVPPPVHGKSGLKTANLTGTDSPETDASASLQQNKSPRVPRLGGKPSSPSLSPLMGFGSNKNAKKIKIDLKKGPEGLGFTVVTRDSSIHGPGPIFVKNILPKGAAIKDGRLQSGDRILEVNGRDVTGRTQEELVAMLRSTKQGETASLVIARQEGHFLPRELKGEPDCCALSLETSEQLTFEIPLNDSGSAGLGVSLKGNKSRETGTDLGIFIKSIIHGGAAFKDGRLRMNDQLIAVNGESLLGKSNHEAMETLRRSMSMEGNIRGMIQLVILRRPERPMEDPAECGAFSKPCFENCQNAVTTSRRNDNSILHPLGTCSPQDKQKGLLLPNDGWAESEVPPSPTPHSALGLGLEDYSHSSGVDSAVYFPDQHINFRSVTPARQPESINLKASKSMDLVPDESKVHSLAGQKSESPSKDFGPTLGLKKSSSLESLQTAVAEVRKNDLPFHRPRPHMVRGRGCNESFRAAIDKSYDGPEEIEADGLSDKSSHSGQGALNCESAPQGNSELEDMENKARKVKKTKEKEKKKEKGKLKVKEKKRKEENEDPERKIKKKGFGAMLRFGKKKEDKGGKAEQKGTLKHGGLREEELEKMKEERERIGAKHQELREKQARGLLDYATGAIGSVYDMDDDEMDPNYARVNHFREPCTSANVFRSPSPPRAGPFGYPRDGHPLSPERDHLEGLYAKVNKPYHPLVPADSGRPTGGSTDRIQKLRKEYYQARREGFPLYEDDEGRARPSEYDLLWVPGRGPDGNAHNLRFEGMERQYASLPRGGPADPVDYLPAAPRGLYKERELPYYPGAHPMHPPKGSYPRPTELRVADLRYPQHYPPPPAPQHKGPFRQDVPPSPPQHQRMPAYQETGRPGPRGGSPDQYPYRTQDSRQKNPMTAAV

SEQ ID NO: 12832 - protein, 470 aa, Homo sapiens
ITLCKMVKHSNTLKPDSSRLENINNYRVCDGYYNTDLPGSWVLGAFALLCLLGLTWSFGLLFINEETIVMAYLFTIFNAFQGVFIFIFHCALQKKVRKEYGKCFRHSYCCGGLPTESPHSSVKASTTRTSARYSSGTQSRIRRMWNDTVRKQSESSFISGDINSTSTLNQGMTGNYLLTNPLLRPHGTNNPYNTLLAETVVCNAPSAPVFNSPATYRETRHSLNNARDTSAMDTLPLNGNFNNSYSLHKGDYNDSVQVVDCGLSLNDTAFEKMIISELVHNNLRGSSKTHNLELTLPVKPVIGGSSSEDDAIVADASSLMHSDNPGLELHHKELEAPLIPQRTHSLLYQPQKKVKSEGTDSYVSQLTAEAEDHLQSPNRDSLYTSMPNLRDSPYPESSPDMEEDLSPSRRSENEDIYYKSMPNLGAGHQLQMCYQISRGNSDGYIIPINKEGCIPEGDVREGQMQLVTSL

SEQ ID NO: 12833 - protein, 1189 aa, Homo sapiens
MRRKGRCHRGSAARHPSSPCSVKHSPTRETLTYAQAQRMVEIEIEGRLHRISIFDPLEIILEDDLTAQEMSECNSNKENSERPPVCLRTKRHKNNRVKKKNEALPSAHGTPASASALPEPKVRIVEYSPPSAPRRPPVYYKFIEKSAEELDNEVEYDMDEEDYAWLEIVNEKRKGDCVPAVSQSMFEFLMDRFEKESHCENQKQGEQQSLIDEDAVCCICMDGECQNSNVILFCDMCNLAVHQECYGVPYIPEGQWLCRHCLQSRARPADCVLCPNKGGAFKKTDDDRWGHVVCALWIPEVGFANTVFIEPIDGVRNIPPARWKLTCYLCKQKGVGACIQCHKANCYTAFHVTCAQKAGLYMKMEPVKELTGGGTTFSVRKTAYCDVHTPPGCTRRPLNIYGDVEMKNGVCRKESSVKTVRSTSKVRKKAKKAKKALAEPCAVLPTVCAPYIPPQRLNRIANQVAIQRKKQFVERAHSYWLLKRLSRNGAPLLRRLQSSLQSQRSSQQRENDEEMKAAKEKLKYWQRLRHDLERARLLIELLRKREKLKREQVKVEQVAMELRLTPLTVLLRSVLDQLQDKDPARIFAQPVSLKEVPDYLDHIKHPMDFATMRKRLEAQGYKNLHEFEEDFDLIIDNCMKYNARDTVFYRAAVRLRDQGGVVLRQARREVDSIGLEEASGMHLPERPAAAPRRPFSWEDVDRLLDPANRAHLGLEEQLRELLDMLDLTCAMKSSGSRSKRAKLLKKEIALLRNKLSQQHSQPLPTGPGLEGFEEDGAALGPEAGEEGDKSPPKLEPSDALPLPSNSETNSEPPTLKPVELNPEQSKLFKRVTFDNESHSACTQSALVSGRPPEPTRASSGDVPAAAASAVAEPASDVNRRTSVLFCKSKSVSPPKSAKNTETQPTSPQLGTKTFLSVVLPRLETLLQPRKRSRSTCGDSEVEEESPGKRLDAGLTNGFGGARSEQEPGGGLGRKATPRRRCASESSISSSNSPLCDSSFNAPKCGRGKPALVRRHTLEDRSELISCIENGNYAKAARIAAEVGQSSMWISTDAAASVLEPLKVVWAKCSGYPSYPALIIDPKMPRVPGHHNGVTIPAPPLDVLKIGEHMQTKSDEKLFLVLFFDNKRSWQWLPKSKMVPLGIDETIDKLKMMEGRNSSIRKAVRIAFDRAMNHLSRVHGEPTSDLSDID

SEQ ID NO: 12834 - protein, 891 aa, Homo sapiens
MTENKTVSSSSTRDDQTNIGLTCQEVKALREKAWSRTNEGNAMSQSLVLYGASKENSEGFHESKMTNTEGVNKGIYFSYPCRRHSCAVVNIPAPCVNKMISHIQDVESKIQEHLKRFETSFEEWSRTSSTKDLKEDWSVTTPVKEVKPGEKRDEKCPELKQEMETLLSEAIRLIKSLETDRADAEEALKQQRSRKNMINMKIDSWSVWKLQELPLAVQKEHEAYLSDVIELQWHLEDKANQLQHFEKQKTELEEANAKIQADIDYMNEHGPLLDSKQNQELQDLKNHYKKKMEVMDLHRKVNEELEEALEACENARLKAQQIKEEIDKDIYQDEKTIEAYKREIYQLNSLFDHYSSSVINVNTNIEEKEEEVTEAIRETKSSKNELHSLSKMLEDLRRVYDQLTWKQKSHENQYLEAVNDFYAAKKTWDIELSDVAKDFSAISLACTKLTEDNKKLEIDINKITVKTNESIRKKSKYESEIKYLTIMKLKNDKHLKNIYKEAYRIGTLFHLTKHKTDEMEDKIAEVRRKFKGREEFLKKLTQGEVAAGMVLQKKLYSIYEVQALERKELIKNRAICAMSLAELQEPLLQLEDEAERIRSLDKEHSVMLNNIIDQKDLIRRKVGKVKKKLRKKGKKTLDALIETESKRSAIFKDLEATKSKTMIFYAKINELNEELKAKEEEKKSFDQTLEILKNKFITMRFKREHAQTVFDHYMQEKKDCEERIFEEDQRFRVLLAVRQKTLQDTQKIIADSLEENLRLAQEYQQLQITFLKEKDNYFNIYDKQLSLDTSIRDKKQVAGFLPKKLPNSLPIISDELSNFQLCQLQRRMHTLWQEHFKLVVLFSQMRLANFQTDSQESIQKILAVQEESSNLMQHILGFFQTLTDGTCENDG

SEQ ID NO: 12835 - protein, 937 aa, Homo sapiens
MDDDDDDDDVGDHDDDHPGMEVVLHEDKKYYPTAEEVYGPEVETIVQEEDTQPLTEPIIKPVKTKKFTLMEQTLPVTVYEMDFLADLMDNSELIRNVTLCGHLHHGKTCFVDCLIEQTHPEIRKRYDQDLCYTDILFTEQERGVGIKSTPVTVVLPDTKGKSYLFNIMDTPGHVNFSDEVTAGLRISDGVVLFIDAAEGVMLNTERLIKHAVQERLAVTVCINKIDRLILELKLPPTDAYYKLRHIVDEVNGLISMYSTDENLILSPLLGNVCFSSSQYSICFTLGSFAKIYADTFGDINYQEFAKRLWGDIYFNPKTRKFTKKAPTSSSQRSFVEFILEPLYKILAQVVGDVDTSLPRTLDELGIHLTKEELKLNIRPLLRLVCKKFFGEFTGFVDMCVQHIPSPKVGAKPKIEHTYTGGVDSDLGEAMSDCDPDGPLMCHTTKMYSTDDGVQFHAFGRVLSGTIHAGQPVKVLGENYTLEDEEDSQICTVGRLWISVARYHIEVNRVPAGNWVLIEGVDQPIVKTATITEPRGNEEAQIFRPLKFNTTSVIKIAVEPVNPSELPKMLDGLRKVNKSYPSLTTKVEESGEHVILGTGELYLDCVMHDLRKMYSEIDIKVADPVVTFCETVVETSSLKCFAETPNKKNKITMIAEPLEKGLAEDIENEVVQITWNRKKLGEFFQTKYDWDLLAARSIWAFGPDATGPNILVDDTLPSEVDKALLGSVKDSIVQGFQWGTREGPLCDELIRNVKFKILDAVVAQEPLHRGGGQIIPTARRVVYSAFLMATPRLMEPYYFVEVQAPADCVSAVYTVLARRRGHVTQDAPIPGSPLYTIKAFIPAIDSFGFETDLRTHTQGQAFSLSVFHHWQIVPGDPLDKSIVIRPLEPQPAPHLAREFMIKTRRRKGLSEDVSISKFFDDPMLLELAKQDVVLNYPM

SEQ ID NO: 12836 - protein, 1030 aa, Homo sapiens
MEGAHASLSLEDEVSGAGSRQRPLEGKGGETPAAEEPGSLKNYAVFATRDVSAAPEKEEEEAEGPLRAQDLRESYIQLVQGVQEWQDGCMYQGEFGLNMKLGYGKFSWPTGESYHGQFYRDHCHGLGTYMWPDGSSFTGTFYLSHREGYGTMYMKTRLFQGLYKADQRFGPGVETYPDGSQDVGLWFREQLIKLCTQIPSGFSLLRYPEFSSFITHSPARISLSEEEKTEWGLQEGQDPFFYDYKRFLLNDNLTLPPEMYVYSTNSDHLPMTSSFRKELDARIFLNEIPPFVEDGEPWFIINETPLLVKIQKQTYKFRNKPAHTSWNMGAILEGKRSGFAPCGPKEQLSMEMILKAEEGNHEWICRILKDNFASADVADAKGYTVLAAAATHCHNDIVNLLLDCGADVNKCSDEGLTALSMCFLLHYPAQSFKPNVAERTIPEPQEPPKFPVVPILSSSFMDTNLESLYYEVNVPSQGSYELRPPPAPLLLPRVSGSHEGGHFQDTGQCGGSIDHRSSSLKGDSPLVKGSLGHVESGLEDVLGNTDRGSLCSAETKFESNVCVCDFSIELSQAMLERSAQSHSLLKMASPSPCTSSFDKGTMRRMALSMIERRKRWRTIKLLLRRGADPNLCCVPMQVLFLAVKAGDVDGVRLLLEHGARTDICFPPQLSTLTPLHIAAALPGEEGVQIVELLLHAITDVDAKASDEDDTYKPGKLDLLPSSLKLSNEPGPPQAYYSTDTALPEEGGRTALHMACEREDDNKCARDIVRLLLSHGANPNLLWSGHSPLSLSIASGNELVVKELLTQGADPNLPLTKGLGSALCVACDLTYEHQRNMDSKLALIDRLISHGADILKPVMLRQGEKEAVGTAVDYGYFRFFQDRRIARCPFHTLMPAERETFLARKRLLEYMGLQLRQAVFAKESQWDPTWLYLCKRAELIPSHRMKKKGPSLPRGLDVKEQGQIPFFKFCYQCGRSIGVRLLPCPRCYGILTCSKYCKTKAWTEFHKKDCGDLVAIVTQLEQVSRRREEFQ

SEQ ID NO: 12837 - protein, 2006 aa, Homo sapiens
MVKLANPLYTEWILEAIKKVKKQKQRPSEERICNAVSSSHGLDRKTVLEQLELSVKDGTILKVSNKGLNSYKDPDNPGRIALPKPRNHGKLDNKQNVDWNKLIKRAVEGLAESGGSTLKSIERFLKGQKDVSALFGGSAASGFHQQLRLAIKRAIGHGRLLKDGPLYRLNTKATNVDGKESCESLSCLPPVSLLPHEKDKPVAEPIPICSFCLGTKEQNREKKPEELISCADCGNSGHPSCLKFSPELTVRVKALRWQCIECKTCSSCRDQGKNADNMLFCDSCDRGFHMECCDPPLTRMPKGMWICQICRPRKKGRKLLQKKAAQIKRRYTNPIGRPKNRLKKQNTVSKGPFSKVRTGPGRGRKRKITLSSQSASSSSEEGYLERIDGLDFCRDSNVSLKFNKKTKGLIDGLTKFFTPSPDGRKARGEVVDYSEQYRIRKRGNRKSSTSDWPTDNQDGWDGKQENEERLFGSQEIMTEKDMELFRDIQEQALQKVGVTGPPDPQVRCPSVIEFGKYEIHTWYSSPYPQEYSRLPKLYLCEFCLKYMKSRTILQQHMKKCGWFHPPANEIYRKNNISVFEVDGNVSTIYCQNLCLLAKLFLDHKTLYYDVEPFLFYVLTQNDVKGCHLVGYFSKEKHCQQKYNVSCIMILPQYQRKGYGRFLIDFSYLLSKREGQAGSPEKPLSDLGRLSYMAYWKSVILECLYHQNDKQISIKKLSKLTGICPQDITSTLHHLRMLDFRSDQFVIIRREKLIQDHMAKLQLNLRPVDVDPECLRWTPVIVSNSVVSEEEEEEAEEGENEEPQCQERELEISVRVGKSVSHENKEQDSYSVESEKKPEVMAPVSSTRLSKQVLPHDSLPANSQPSRRGRWGRKNRKTQERFGDKDSKLLLEETSSAPQEQYGECGEKSEATQEQYTESEEQLVASEEQPSQDGKPDLPKRRLSEGVEPWRGQLKKSPEALKCRLTEGSERLPRRYSEGDRAVLRGFSESSEEEEEPESPRSSSPPILTKPTLKRKKPFLHRRRRVRKRKHHNSSVVTETISETTEVLDEPFEDSDSERPMPRLEPTFEIDEEEEEEDENELFPREYFRRLSSQDVLRCQSSSKRKSKDEEEDEESDDADDTPILKPVSLLRKRDVKNSPLEPDTSTPLKKKKGWPKGKSRKPIHWKKRPGRKPGFKLSREIMPVSTQACVIEPIVSIPKAGRKPKIQESEETVEPKEDMPLPEERKEEEEMQAEAEEAEEGEEEDAASSEVPAASPADSSNSPETETKEPEVEEEEEKPRVSEEQRQSEEEQQELEEPEPEEEEDAAAETAQNDDHDADDEDDGHLESTKKKELEEQPTREDVKEEPGVQESFLDANMQKSREKIKDKEETELDSEEEQPSHDTSVVSEQMAGSEDDHEEDSHTKEELIELKEEEEIPHSELDLETVQAVQSLTQEESSEHEGAYQDCEETLAACQTLQSYTQADEDPQMSMVEDCHASEHNSPISSVQSHPSQSVRSVSSPNVPALESGYTQISPEQGSLSAPSMQNMETSPMMDVPSVSDHSQQVVDSGFSDLGSIESTTENYENPSSYDSTMGGSICGNSSSQSSCSYGGLSSSSSLTQSSCVVTQQMASMGSSCSMMQQSSVQPAANCSIKSPQSCVVERPPSNQQQQPPPPPPQQPQPPPPQPQPAPQPPPPQQQPQQQPQPQPQQPPPPPPPQQQPPLSQCSMNNSFTPAPMIMEIPESGSTGNISIYERIPGDFGAGSYSQPSATFSLAKLQQLTNTIMDPHAMPYSHSPAVTSYATSVSLSNTGLAQLAPSHPLAGTPQAQATMTPPPNLASTTMNLTSPLLQCNMSATNIGIPHTQRLQGQMPVKGHISIRSKSAPLPSAAAHQQQLYGRSPSAVAMQAGPRALAVQRGMNMGVNLMPTPAYNVNSMNMNTLNAMNSYRMTQPMMNSSYHSNPAYMNQTAQYPMQMQMGMMGSQAYTQQPMQPNPHGNMMYTGPSHHSYMNAAGVPKQSLNGPYMRR

SEQ ID NO: 12838 - protein, 660 aa, Homo sapiens
MATSHRVAKLVASSLQTPVNPITGARVAQYEREDPLKALAAAEAILEDEEEEKVAQPAGASADLNTSFSGVDEHAPISYEDFVNFPDIHHSNEEYFKKVEELKAAHIETMAKLEKMYQDKLHLKEVQPVVIREDSLSDSSRSVSEKNSYHPVSLMTSFSEPDLGQSSSLYVSSSEEELPNLEKEYPRKNRMMTYAKELINNMWTDFCVEDYIRCKDTGFHAAEKRRKKRKEWVPTITVPEPFQMMIREQKKKEESMKSKSDIEMVHKALKKQEEDPEYKKKFRANPVPASVFLPLYHDLVKQKEERRRSLKEKSKEALLASQKPFKFIAREEQKRAAREKQLRDFLKYKKKTNRFKARPIPRSTYGSTTNDKLKEEELYRNLRTQLRAQEHLQNSSPLPCRSACGCRNPRCPEQAVKLKCKHKVRCPTPDFEDLPERYQKHLSEHKSPKLLTVCKPFDLHASPHASIKREKILADIEADEENLKETRWPYLSPRRKSPVRCAGVNPVPCNCNPPVPTVSSRGREQAVRKSEKERMREYQRELEEREEKLKKRPLLFERVAQKNARMAAEKHYSNTLKALGISDEFVSKKGQSGKVLEYFNNQETKSVTEDKESFNEEEKIEERENGEENYFIDTNSQDSYKEKDEANEESEEEKSVEESH

SEQ ID NO: 12839 - protein, 2209 aa, Homo sapiens
MVNENTRMYIPEENHQGSNYGSPRPAHANMNANAAAGLAPEHIPTPGAALSWQAAIDAARQAKLMGSAGNATISTVSSTQRKRQQYGKPKKQGSTTATRPPRALLCLTLKNPIRRACISIVEWKPFEIIILLTIFANCVALAIYIPFPEDDSNATNSNLERVEYLFLIIFTVEAFLKVIAYGLLFHPNAYLRNGWNLLDFIIVVVGLFSAILEQATKADGANALGGKGAGFDVKALRAFRVLRPLRLVSGVPSLQVVLNSIIKAMVPLLHIALLVLFVIIIYAIIGLELFMGKMHKTCYNQEGIADVPAEDDPSPCALETGHGRQCQNGTVCKPGWDGPKHGITNFDNFAFAMLTVFQCITMEGWTDVLYWMQDAMGYELPWVYFVSLVIFGSFFVLNLVLGVLSGEFSKEREKAKARGDFQKLREKQQLEEDLKGYLDWITQAEDIDPENEDEGMDEEKPRNMSMPTSETESVNTENVAGGDIEGENCGARLAHRISKSKFSRYWRRWNRFCRRKCRAAVKSNVFYWLVIFLVFLNTLTIASEHYNQPNWLTEVQDTANKALLALFTAEMLLKMYSLGLQAYFVSLFNRFDCFVVCGGILETILVETKIMSPLGISVLRCVRLLRIFKITRYWNSLSNLVASLLNSVRSIASLLLLLFLFIIIFSLLGMQLFGGKFNFDEMQTRRSTFDNFPQSLLTVFQILTGEDWNSVMYDGIMAYGGPSFPGMLVCIYFIILFICGNYILLNVFLAIAVDNLADAESLTSAQKEEEEEKERKKLARTASPEKKQELVEKPAVGESKEEKIELKSITADGESPPATKINMDDLQPNENEDKSPYPNPETTGEEDEEEPEMPVGPRPRPLSELHLKEKAVPMPEASAFFIFSSNNRFRLQCHRIVNDTIFTNLILFFILLSSISLAAEDPVQHTSFRNHILFYFDIVFTTIFTIEIALKMTAYGAFLHKGSFCRNYFNILDLLVVSVSLISFGIQSSAINVVKILRVLRVLRPLRAINRAKGLKHVVQCVFVAIRTIGNIVIVTTLLQFMFACIGVQLFKGKLYTCSDSSKQTEAECKGNYITYKDGEVDHPIIQPRSWENSKFDFDNVLAAMMALFTVSTFEGWPELLYRSIDSHTEDKGPIYNYRVEISIFFIIYIIIIAFFMMNIFVGFVIVTFQEQGEQEYKNCELDKNQRQCVEYALKARPLRRYIPKNQHQYKVWYVVNSTYFEYLMFVLILLNTICLAMQHYGQSCLFKIAMNILNMLFTGLFTVEMILKLIAFKPKGYFSDPWNVFDFLIVIGSIIDVILSETNPAEHTQCSPSMNAEENSRISITFFRLFRVMRLVKLLSRGEGIRTLLWTFIKSFQALPYVALLIVMLFFIYAVIGMQVFGKIALNDTTEINRNNNFQTFPQAVLLLFRCATGEAWQDIMLACMPGKKCAPESEPSNSTEGETPCGSSFAVFYFISFYMLCAFLIINLFVAVIMDNFDYLTRDWSILGPHHLDEFKRIWAEYDPEAKGRIKHLDVVTLLRRIQPPLGFGKLCPHRVACKRLVSMNMPLNSDGTVMFNATLFALVRTALRIKTEGNLEQANEELRAIIKKIWKRTSMKLLDQVVPPAGDDEVTVGKFYATFLIQEYFRKFKKRKEQGLVGKPSQRNALSLQAGLRTLHDIGPEIRRAISGDLTAEEELDKAMKEAVSAASEDDIFRRAGGLFGNHVSYYQSDGRSAFPQTFTTQRPLHINKAGSSQGDTESPSHEKLVDSTFTPSSYSSTGSNANINNANNTALGRLPRPAGYPSTVSTVEGHGPPLSPAIRVQEVAWKLSSNRMHCCDMLDGGTFPPALGPRRAPPCLHQQLQGSLAGLREDTPCIVPGHASLCCSSRVGEWLPAGCTAPQHARCHSRESQAAMAGQEETSQDETYEVKMNHDTEACSEPSLLSTEMLSYQDDENRQLTLPEEDKRDIRQSPKRGFLRSASLGRRASFHLECLKRQKDRGGDISQKTVLPLHLVHHQALAVAGLSPLLQRSHSPASFPRPFATPPATPGSRGWPPQPVPTLRLEGVESSEKLNSSFPSIHCGSWAETTPGGGGSSAARRVRPVSLMVPSQAGAPGRQFHGSASSLVEAVLISEGLGQFAQDPKFIEVTTQELADACDMTIEEMESAADNILSGGAPQSPNGALLPFVNCRDAGQDRAGGEEDAGCVRARGRPSEEELQDSRVYVSSL

SEQ ID NO: 12840 - protein, 624 aa, Homo sapiens
MSKEAVSLWALTVSLQPPVPLCVCREMTGSGRRKQQCVTLPFISRELCFYLLLFPPPRLEYTEHQGRIKNAREAHSQIEKRRRDKMNSFIDELASLVPTCNAMSRKLDKLTVLRMAVQHMKTLRGATNPYTEANYKPTFLSDDELKHLILRAADGFLFVVGCDRGKILFVSESVFKILNYSQNDLIGQSLFDYLHPKDIAKVKEQLSSSDTAPRERLIDAKTGLPVKTDITPGPSRLCSGARRSFFCRMKCNRPSVKVEDKDFPSTCSKKKADRKSFCTIHSTGYLKSWPPTKMGLDEDNEPDNEGCNLSCLVAIGRLHSHVVPQPVNGEIRVKSMEYVSRHAIDGKFVFVDQRATAILAYLPQELLGTSCYEYFHQDDIGHLAECHRQVLQTREKITTNCYKFKIKDGSFITLRSRWFSFMNPWTKEVEYIVSTNTVVLANVLEGGDPTFPQLTASPHSMDSMLPSGEGGPKRTHPTVPGIPGGTRAGAGKIGRMIAEEIMEIHRIRGSSPSSCGSSPLNITSTPPPDASSPGGKKILNGGTPDIPSSGLLSGQAQENPGYPYSDSSSILGENPHIGIDMIDNDQGSSSPSNDEAAMAVIMSLLEADAGLGGPVDFSDLPWPL

SEQ ID NO: 12841 - protein, 2213 aa, Homo sapiens
MARGARPSAAGGGGGGAEPPERAGPGRPRGSPPGRARPSLAPRPGPEPSRPRAAPETSGGDTAGAGRCGGRRAAKLGPGRRGWWALLALQLHLLRALAQDDVAPYFKTEPGLPQIHLEGNRLVLTCLAEGSWPLEFKWMRDDSELTTYSSEYKYIIPSLQKLDAGFYRCVVRNRMGALLQRKSEVQVAYMGSFMDTDQRKTVSQGRAAILNLLPITSYPRPQVTWFREGHKIIPSNRIAITLENQLVILATTTSDAGAYYVQAVNEKNGENKTSPFIHLSIARDVGTPETMAPTIVVPPGNRSVVAGSSETTLECIASARPVEDLSVTWKRNGVRITSGLHSFGRRLTISNPTSADTGPYVCEAALPGSAFEPARATAFLFIIEPPYFTAEPESRISAEVEETVDIGCQAMGVPLPTLQWYKDAISISRLQNPRYKVLASGGLRIQKLRPEDSGIFQCFASNEGGEIQTHTYLDVTNIAPVFTQRPVDTTVTDGMTAILRCEVSGAPKPAITWKRENHILASGSVRIPRFMLLESGGLQIAPVFIQDAGNYTCYAANTEGSLNASATLTVWNRTSIVHPPEDHVVIKGTTATLHCGATHDPRVSLRYVWKKDNVALTPSSTSRIVVEKDGSLLISQTWSGDIGDYSCEIVSEGGNDSRMARLEVIELPHSPQNLLVSPNSSHSHAVVLSWVRPFDGNSPILYYIVELSENNSPWKVHLSNVGPEMTGVTVSGLTPARTYQFRVCAVNEVGRGQYSAETSRLMLPEEPPSAPPKNIVASGRTNQSIMVQWQPPPETEHNGVLRGYILRYRLAGLPGEYQQRNITSPEVNYCLVTDLIIWTQYEIQVAAYNGAGLGVFSRAVTEYTLQGVPTAPPQNVQTEAVNSTTIQFLWNPPPQQFINGINQGYKLLAWPADAPEAVTVVTIAPDFHGVHHGHITNLKKFTAYFTSVLCFTTPGDGPPSTPQLVWTQEDKPGAVGHLSFTEILDTSLKVSWQEPLEKNGIITGYQISWEVYGRNDSRLTHTLNSTTHEYKIQGLSSLTTYTIDVAAVTAVGTGLVTSSTISSGVPPDLPGAPSNLVISNISPRSATLQFRPGYDGKTSISRWIVEGQVGAIGDEEEWVTLYEEENEPDAQMLEIPNLTPYTHYRFRMKQVNIVGPSPYSPSSRVIQTLQAPPDVAPTSVTVRTASETSLRLRWVPLPDSQYNGNPESVGYRIKYWRSDLQSSAVAQVVSDRLEREFTIEELEEWMEYELQMQAFNAVGAGPWSEVVRGRTRESVPSAAPENVSAEAVSSTQILLTWTSVPEQDQNGLILGYKILFRAKDLDPEPRSHIVRGNHTQSALLAGLRKFVLYELQVLAFTRIGNGVPSTPLILERTKDDAPGPPVRLVFPEVRLTSVRIVWQPPEEPNGIILGYQIAYRLASSSPHTFTTVEVGATVRQFTATDLAPESAYIFRLSAKTRQGWGEPLEATVITTEKRERPAPPRELLVPQAEVTARSLRLQWVPGSDGASPIRYFTMQVRELPRGEWQTYSSSISHEATACVVDRLRPFTSYKLRLKATNDIGDSDFSSETEAVTTLQDVPGEPPGSVSATPHTTSSVLIQWQPPRDESLNGLLQGYRIYYRELEYEAGSGTEAKTLKNPIALHAELTAQSSFKTVNSSSTSTMCELTHLKKYRRYEVIMTAYNIIGESPASAPVEVFVGEAAPAMAPQNVQVTPLTASQLEVTWDPPPPESQNGNIQGYKIYYWEADSQNETEKMKVLFLPEPVVRLKNLTSHTKYLVSISAFNAAGDGPKSDPQQGRTHQAAPGAPSFLAFSEITSTTLNVSWGEPAAANGILQGYRVVYEPLAPVQGVSKVVTVEVRGNWQRWLKVRDLTKGVTYFFRVQARTITYGPELQANITAGPAEGSPGSPRDVLVTKSASELTLQWTEGHSGDTPTTGYVIEARPSDEGLWDMFVKDIPRSATSYTLSLDKLRQGVTYEFRVVAVNEAGYGEPSNPSTAVSAQVEAPFYEEWWFLLVMALSSLIVILLVVFALVLHGQNKKYKNCSTGKGISTMEESVTLDNGGFAALELSSRHLNVKSTFSKKNGTRSPPRPSPGGLHYSDEDICNKYNGAVLTESVSLKEKSADASESEATDSDYEDALPKHSFVNHYMSDPTYYNSWKRRAQGRAPAPHRYEAVAGSEAGAQLHPVITTQSAGGVYTPAGPGARTPLTGFSSFV

SEQ ID NO: 12842 - protein, 1161 aa, Homo sapiens
MAHLELLLVENFKSWRGRQVIGPFRRFTCIIGPNGSGKSNVMDALSFVMGEKIANLRVKNIQELIHGAHIGKPISSSASVKIIYVEESGEEKTFARIIRGGCSEFRFNDNLVSRSVYIAELEKIGIIVKAQNCLVFQGTVESISVKKPKERTQFFEEISTSGELIGEYEEKKRKLQKAEEDAQFNFNKKKNIAAERRQAKLEKEEAERYQSLLEELKMNKIQLQLFQLYHNEKKIHLLNTKLEHVNRDLSVKRESLSHHENIVKARKKEHGMLTRQLQQTEKELKSVETLLNQKRPQYIKAKENTSHHLKKLDVAKKSIKDSEKQCSKQEDDIKALETELADLDAAWRSFEKQIEEEILHKKRDIELEASQLDRYKELKEQVRKKVATMTQQLEKLQWEQKTDEERLAFEKRRHGEVQGNLKQIKEQIEDHKKRIEKLEEYTKTCMDCLKEKKQQEETLVDEIEKTKSRMSEVNEELNLIRSELQNAGIDTHEGKRQQKRAEVLEHLKRLYPDSVFGRLFDLCHPIHKKYQLAVTKVFGRFITAIVVASEKVAKDCIRFLKEERAEPETFLALDYLDIKPINERLRELKGCKMVIDVIKTQFPQLKKVIQFVCGNGLVCETMEEARHIALSGPERQKTVALDGTLFLKSGVISGGSSDLKYKARCWDEKELKNLRDRRSQKIQELKGLMKTLRKETDLKQIQTLIQGTQTRLKYSQNELEMIKKKHLVAFYQEQSQLQSELLNIESQCIMLSEGIKERQRRIKEFQEKIDKVEDDIFQHFCEEIGVENIREFENKHVKRQQEIDQKRLEFEKQKTRLNVQLEYSRSHLKKKLNKINTLKETIQKGSEDIDHLKKAEENCLQTVNELMAKQQQLKDIRVTQNSSAEKVQTQIEEERKKFLAVDREVGKLQKEVVSIQTSLEQKRLEKHNLLLDCKVQDIEIILLSGSLDDIIEVEMGTEAESTQATIDIYEKEEAFEIDYSSLKEDLKALQSDQEIEAHLRLLLQQVASQEDILLKTAAPNLRALENLKTVRDKFQESTDAFEASRKEARLCRQEFEQVKKRRYDLFTQCFEHVSISIDQIYKKLCRNNSAQVSSYIKEQTQDQFQMIVISLKEEFYSRADALIGIYPEYDDCMFSRVLTLDLSQYPDTEGQESSKRHGESR

SEQ ID NO: 12843 - protein, 242 aa, Homo sapiens
MTEVVPSSALSEVSLRLLCHDDIDTVKHLCGDWFPIEYPDSWYRDITSNKKFFSLAATYRGAIVGMIVAEIKNRTKIHKEDGDILASNFSVDTQVAYILSLGVVKEFRKHGIGSLLLESLKDHISTTAQDHCKAIYLHVLTTNNTAINFYENRDFKQHHYLPYYYSIRGVLKDGFTYVLYINGGHPPWTILDYIQHLGSALASLSPCSIPHRVYRQAHSLLCSFLPWSGISSKSGIEYSRTM

SEQ ID NO: 12844 - protein, 95 aa, Homo sapiens
MTSKLAVALLAAFLISAALCEGAVLPRSAKELRCQCIKTYSKPFHPKFIKELRVIESGPHCANTEIIVKLSDGRELCLDPKENWVQRVVEKFLKR

SEQ ID NO: 12845 - protein, 423 aa, Homo sapiens
MRHLGAFLFLLGVLGALTEMCEIPEMDSHLVEKLGQHLLPWMDRLSLEHLNPSIYVGLRLSSLQAGTKEDLYLHSLKLGYQQCLLGEDDGDCQGKPSMGQLALYLLALRANCEFVRGHKGDRLVSQLKWFLEDEKRAIGHDHKGHPHTSYYQYGLGILALCLHQKRVHDSVVDKLLYAVEPFHQGHHSVDTAAMAGLAFTCLKRSNFNPGRRQRITMAIRTVREEILKAQTPEGHFGNVYSTPLALQFLMTSPMRGAELGTACLKARVALLASLQDGAFQNALMISQLLPVLNHKTYIDLIFPDCLAPRVMLEPAAETIPQTQEIISVTLQVLSLLPPYRQSISVLAGSTVEDVLKKAHELGGFTYETQASLSGPYLTSVMGKAAGEREFWQLLRDPNTPLLQGIADYRPKDGETIELRLVSW

SEQ ID NO: 12846 - protein, 582 aa, Homo sapiens
MINIESMDTDKDDPHGRLEYTEHQGRIKNAREAHSQIEKRRRDKMNSFIDELASLVPTCNAMSRKLDKLTVLRMAVQHMKTLRGATNPYTEANYKPTFLSDDELKHLILRAADGFLFVVGCDRGKILFVSESVFKILNYSQNDLIGQSLFDYLHPKDIAKVKEQLSSSDTAPRERLIDAKTGLPVKTDITPGPSRLCSGARRSFFCRMKCNRPSVKVEDKDFPSTCSKKKDRKSFCTIHSTGYLKSWPPTKMGLDEDNEPDNEGCNLSCLVAIGRLHSHVVPQPVNGEIRVKSMEYVSRHAIDGKFVFVDQRATAILAYLPQELLGTSCYEYFHQDDIGHLAECHRQVLQTREKITTNCYKFKIKDGSFITLRSRWFSFMNPWTKEVEYIVSTNTVVLANVLEGGDPTFPQLTASPHSMDSMLPSGEGGPKRTHPTVPGIPGGTRAGAGKIGRMIAEEIMEIHRIRGSSPSSCGSSPLNITSTPPPDASSPGGKKILNGGTPDIPSSGLLSGQAQENPGYPYSDSSSILGENPHIGIDMIDNDQGSSSPSNDEAAMAVIMSLLEADAGLGGPVDFSDLPWPL

SEQ ID NO: 12847 - protein, 521 aa, Homo sapiens
MFYTHVLMSKRGPLAKIWLAAHWEKKLTKAHVFECNLEITIEKILSPKVKIALRTSGHLLLGVVRIYNRKAKYLLADCSEAFLKMKMTFCPGLVDLPKENFEASYNAITLPEEFHDFDTQNMNAIDVSEHFTQNQSRPEEITLRENFDNDLIFQAESFGEESEILRRHSFFDDNILLNSSGPLIEHSSGSLTGERSLFYDSGDGFGDEGAAGEMIDNLLQDDQNILLEDMHLNREISLPSEPPNSLAVEPDNSECICVPENEKMNETILLSTEEEGFTLDPIDISDIAEKRKGKKRRLLIDPIKELSSKVIHKQLTSFADTLMVLELAPPTQRLMMWKKRGGVHTLLSTAAQDLIHAELKMLFTKCFLSSGFKLGRKMIQKESVREEVGNQNIVETSMMQEPNYQQELSKPQTWKDVIGGSQHSSHEDTNKNINSEESLSNEENIETERWNGRILQMLNRLRVADQGQAAAAATAEALRQAGPEWCEPAGLRRASGLSPRDTAHPTPYSDPQPHGHVPARK

SEQ ID NO: 12848 - protein, 890 aa, Homo sapiens
MWPVLPSGQLNEEFDWPIQGLLVPSSPPMKKPICKTTEPYAPVRLRVLQNGEKNKNRSVTILGPDISPGRKTQCTEILNLPSAARRLYNEKGKEIFALKDLQRDELVYVSCGELWINPDLSIAQQKKQIFLRNLESDIAKIQIFCSTHKIEALVLEVQSDIVSGSKLAVHKPVAIFGEEKQVTEPEEKQMQEDPLTTENASSEILDSHVRAHLRMKACHTLPRYAWQETSHDFDEDDSLPKKTEKGLFENVEPQKKHSCSPKHSKLHKHCHQQFEYRDGQIISHAAPQLVLGVQGPNLRSGMEVVLVEKKSDGSHQRWIHQEDSRTFHLVSNPDLVLAVSMTKTRNEVCGYPVIVQKYKPYNNGAANQKWHYMKNIKALVAFHSTALDKEITSANYAGVCTSSVIKEENIDQPGYCYLSPDGKRKTMLCLACGQSMRTEKGLKQLLPGVPFLCISGTKTQKPFLQGPFKVISVAEVDLSCDKAEKTLSYYQARLLSLRMKTCTQAASHSGMAATHQKAVKIIAYKNGDGYRNGKLIVAGTFPMLLTECTEQLGLARAASKVYTKDGTPIFTLRDLVLWALDESFLQRDSEKQKQDAAPVGKEQIIVEKNPRMKVKNRLFAKSVTSDSLDGIDKSLLTLILRNPIAIWVSCGEPFLPPNALQKAEKLEKQNWLKKDRILADLDTMRHKMRQLKGRRVAACQPATMVPTKSPVQPVVVEGGWTEQTQQEIKLMELIRHTEAHLSEIQEMESKINFPIATKRIAVKPSNLYKQPNTKRVWIYLNGGRPEDGTYAWGKTISELLQDCSSRLKMTHPARALYTPSGEPIQSWDDIERDMVICVSMGHGFKTPKELKQLMEIRANYARIRRQQGPQATDIVVSPSTKLLSLAHLHN

SEQ ID NO: 12849 - protein, 697 aa, Homo sapiens
MNKSLGPVSFKDVAVDFTQEEWQQLDPEQKITYRDVMLENYSNLVSVGYHIIKPDVISKLEQGEEPWIVEGEFLLQSYPDEVWQTDDLIERIQEEENKPSRQTVFIETLIEERGNVPGKTFDVETNPVPSRKIAYKNSLCDSCEKCLTSVSEYISSDGSYARMKADECSGCGKSLLHIKLEKTHPGDQAYEFNQNGEPYTLNEESLYQKIRILEKPFEYIECQKAFQKDTVFVNHMEEKPYKWNGSEIAFLQMSDLTVHQTSHMEMKPYECSECGKSFCKKSKFIIHQRTHTGEKPYECNQCGKSFCQKGTLTVHQRTHTGEKPYECNECGKNFYQKLHLIQHQRTHSGEKPYECSYCGKSFCQKTHLTQHQRTHSGERPYVCHDCGKTFSQKSALNDHQKIHTGVKLYKCSECGKCFCRKSTLTTHLRTHTGEKPYECNECGKFFSRLSYLTVHYRTHSGEKPYECNECGKTFYLNSALMRHQRVHTGEKPYECNECGKLFSQLSYLTIHHRTHSGVKPYECSECGKTFYQNSALCRHRRIHKGEKPYECYICGKFFSQMSYLTIHHRIHSGEKPYECSECGKTFCQNSALNRHQRTHTGEKAYECYECGKCFSQMSYLTIHHRIHSGEKPFECNECGKAFSRMSYLTVHYRTHSGEKPYECTECGKKFYHKSAFNSHQRIHRRGNMNVIDVGRLL

SEQ ID NO: 12850 - protein, 350 aa, Homo sapiens
MSKEPLILWLMIEFWWLYLTPVTSETVVTEVLGHRVTLPCLYSSWSHNSNSMCWGKDQCPYSGCKEALIRTDGMRVTSRKSAKYRLQGTIPRGDVSLTILNPSESDSGVYCCRIEVPGWFNDVKINVRLNLQRASTTTHRTATTTTRRTTTTSPTTTRQMTTTPAALPTTVVTTPDLTTGTPLQMTTIAVFTTANTCLSLTPSTLPEEATGLLTPEPSKEGPILTAESETVLPSDSWSSVESTSADTVLLTSKASDTAVPEQNKTTKTGQMDGIPMSMKNEMPISQLLMIIAPSLGFVLFALFVAFLLRGKLMETYCSQKHTRLDYIGDSKNVLNDVQHGREDEDGLFTL

SEQ ID NO: 12851 - protein, 644 aa, Homo sapiens
MFSMRIVCLVLSVVGTAWTADSGEGDFLAEGGGVRGPRVVERHQSACKDSDWPFCSDEDWNYKCPSGCRMKGLIDEVNQDFTNRINKLKNSLFEYQKNNKDSHSLTTNIMEILRGDFSSANNRDNTYNRVSEDLRSRIEVLKRKVIEKVQHIQLLQKNVRAQLVDMKRLEVDIDIKIRSCRGSCSRALAREVDLKDYEDQQKQLEQVIAKDLLPSRDRQHLPLIKMKPVPDLVPGNFKSQLQKVPPEWKALTDMPQMRMELERPGGNEITRGGSTSYGTGSETESPRNPSSAGSWNSGSSGPGSTGNRNPGSSGTGGTATWKPGSSGPGSTGSWNSGSSGTGSTGNQNPGSPRPGSTGTWNPGSSERGSAGHWTSESSVSGSTGQWHSESGSFRPDSPGSGNARPNNPDWGTFEEVSGNVSPGTRREYHTEKLVTSKGDKELRTGKEKVTSGSTTTTRRSCSKTVTKTVIGPDGHKEVTKEVVTSEDGSDCPEAMDLGTLSGIGTLDGFRHRHPDEAAFFDTASTGKTFPGFFSPMLGEFVSETESRGSESGIFTNTKESSSHHPGIAEFPSRGKSSSYSKQFTSSTSYNRGDSTFESKSYKMADEAGSEADHEGTHSTKRGHAKSRPVRGIHTSPLGKPSLSP

SEQ ID NO: 12852 - protein, 1953 aa, Homo sapiens
MGVKKKKEMQVAALTICHQDLETLKSFADVEGKNLASLLLHCVQLTDGVSQIHYIKQIVPLLEKADKNGMCDPTIQSCLDILAGIYLSLSLKNPLKKVLASSLNSLPDFFLPEAMHRFTSRLQEELNTTDLYSYRKVTDNISSCMENFNLGRASVNNLLKNVLHFLQKSLIEILEENRKCAGNHIIQTQLMNDLLVGIRVSMMLVQKVQDFQGNLWKTSDSPIWQNMCGLLSIFTKVLSDDDLLQTVQSTSGLAIILFIKTMFHPSEKIPHLISSVLLRSVDCTSVPEWFMSSCRSLCCGDISQSAVLFLCQGTLAMLDWQNGSMGRSGEALLLDTAHVLFTLSSQIKEPTLEMFLSRILASWTNSAIQVLESSSPSLTDSLNGNSSIVGRLLEYVYTHWEHPLDALRHQTKIMFKNLLQMHRLTVEGADFVPDPFFVELTESLLRLEWHIKGKYTCLGCLVECIGVEHILAIDKTIPSQILEVMGDQSLVPYASDLLETMFRNHKSHLKSQTAESSWIDQWHETWVSPLLFILCEGNLDQKSYVIDYYLPKLLSYSPESLQYMVKILQTSIDAKTGQEQSFPSLGSCNSRGALGALMACLRIARAHGHLQSATDTWENLVSDARIKQGLIHQHCQVRIDTLGLLCESNRSTEIVSMEEMQWIQFFITYNLNSQSPGVRQQICSLLKKLFCRIQESSQVLYKLEQSKSKREPENELTKQHPSVSLQQYKNFMSSICNSLFEALFPGSSYSTRFSALTILGSIAEVFHVPEGRIYTVYQLSHDIDVGRFQTLMECFTSTFEDVKILAFDLLMKLSKTAVHFQDSGKLQGLFQAALELSTSTKPYDCVTASYLLNFLIWQDALPSSLSAYLTQQVACDNGDRPAAVVERNTLMVIKCLMENLEEEVSQAENSLLQAAAAFPMYGRVHCITGALQKLSLNSLQLVSEWRPVVEKLLLMSYRLSTVVSPVIQSSSPEGLIPMDTDSESASRLQMILNEIQPRDTNDYFNQAKILKEHDSFDMKDLNASVVNIDTSTEIKGKEVKTCDVTAQMVLVCCWRSMKEVALLLGMLCQLLPMQPVPESSDGLLTVEQVKEIGDYFKQHLLQSRHRGAFELAYTGFVKLTEVLNRCPNVSLQKLPEQWLWSVLEEIKCSDPSSKLCATRRSAGIPFYIQALLASEPKKGRMDLLKITMKELISLAGPTDDIQSTVPQVHALNILRALFRDTRLGENIIPYVADGAKAAILGFTSPVWAVRNSSTLLFSALITRIFGVKRAKDEHSKTNRMTGREFFSRFPELYPFLLKQLETVANTVDSDMGEPNRHPSMFLLLLVLERLYASPMDGTSSALSMGPFVPFIMRCGHSPVYHSREMAARALVPFVMIDHIPNTIRTLLSTLPSCTDQCFRQNHIHGTLLQVFHLLQAYSDSKHGTNSDFQHELTDITVCTKAKLWLAKRQNPCLVTRAVYIDILFLLTCCLNRSAKDNQPVLESLGFWEEVRGIISGSELITGFPWAFKVPGLPQYLQSLTRLAIAAVWAAAAKSGERETNVPISFSQLLESAFPEVRSLTLEALLEKFLAAASGLGEKGVPPLLCNMGEKFLLLAMKENHPECFCKILKILHCMDPGEWLPQTEHCVHLTPKEFLIWTMDIASNERSEIQSVALRLASKVISHHMQTCVENRELIAAELKQWVQLVILSCEDHLPTESRLAVVEVLTSTTPLFLTNPHPILELQDTLALWKCVLTLLQSEEQAVRDAATETVTTAMSQENTCQSTEFAFCQVDASIALALALAVLCDLLQQWDQLAPGLPILLGWLLGESDDLVACVESMHQVEEDYLFEKAEVNFWAETLIFVKYLCKHLFCLLSKSGWRPPSPEMLCHLQRMVSEQCHLLSQFFRELPPAAEFVKTVEFTRLRIQEERTLACLRLLAFLEGKEGEDTLVLSVWDSYAESRQLTLPRTEAAC

SEQ ID NO: 12853 - protein, 1352 aa, Homo sapiens
MRHGVAWALLVAAALGLGARGVRGAVALADFYPFGAERGDAVTPKQDDGGSGLRPLSVPFPFFGAEHSGLYVNNNGIISFLKEVSQFTPVAFPIAKDRCVVAAFWADVDNRRAGDVYYREATDPAMLRRATEDVRHYFPELLDFNATWVFVATWYRVTFFGGSSSSPVNTFQTVLITDGKLSFTIFNYESIVWTTGTHASSGGNATGLGGIAAQAGFNAGDGQRYFSIPGSRTADMAEVETTTNVGVPGRWAFRIDDAQVRVGGCGHTTSVCLALRPCLNGGKCIDDCVTGNPSYTCSCLSGFTGRRCHLDVNECASQPCQNGGTCTHGINSFRCQCPAGFGGPTCETAQSPCDTKECQHGGQCQVENGSAVCVCQAGYTGAACEMDVDDCSPDPCLNGGSCVDLVGNYTCLCAEPFKGLRCETGDHPVPDACLSAPCHNGGTCVDADQGYVCECPEGFMGLDCRERVPDDCECRNGGRCLGANTTLCQCPLGFFGLLCEFEITAMPCNMNTQCPDGGYCMEHGGSYLCVCHTDHNASHSLPSPCDSDPCFNGGSCDAHDDSYTCECPRGFHGKHCEKARPHLCSSGPCRNGGTCKEAGGEYHCSCPYRFTGRHCEIGKPDSCASGPCHNGGTCFHYIGKYKCDCPPGFSGRHCEIAPSPCFRSPCVNGGTCEDRDTDFFCHCQAGYMGRRCQAEVDCGPPEEVKHATLRFNGTRLGAVALYACDRGYSLSAPSRIRVCQPHGVWSEPPQCLEIDECRSQPCLHGGSCQDRVAGYLCLCSTGYEGAHCELERDECRAHPCRNGGSCRNLPGAYVCRCPAGFVGVHCETEVDACDSSPCQHGGRCESGGGAYLCVCPESFFGYHCETVSDPCFSSPCGGRGYCLASNGSHSCTCKVGYTGEDCAKELFPPTALKMERVEESGVSISWNPPNGPAARQMLDGYAVTYVSSDGSYRRTDFVDRTRSSHQLQALAAGRAYNISVFSVKRNSNNKNDISRPAVLLARTRPRPVEGFEVTNVTASTISVQWALHRIRHATVSGVRVSIRHPEALRDQATDVDRSVDRFTFRALLPGKRYTIQLTTLSGLRGEEHPTESLATAPTHVWTRPLPPANLTAARVTATSAHVVWDAPTPGSLLEAYVINVTTSQSTKSRYVPNGKLASYTVRDLLPGRRYQLSVIAVQSTELGPQHSEPAHLYIITSPRDGADRRWHQGGHHPRVLKNRPPPARLPELRLLNDHSAPETPTQPPRFSELVDGRGRVSARFGGSPSKAATVRSHVPGNCSENPCQNGGTCVPGADAHSCDCGPGFKGRRCELACIKVSRPCTRLFSETKAFPVWEGGVCHHVKQSKSQTLEKS

SEQ ID NO: 12854 - protein, 780 aa, Homo sapiens
MSARTPLPTVNERDTENHTSVDGYTEPHIQPTKSSSRQNIPRCRNSITSATDEQPHIGNYRLQKTIGKGNFAKVKLARHVLTGREVAVKIIDKTQLNPTSLQKLFREVRIMKILNHPNIVKLFEVIETEKTLYLVMEYASGGEVFDYLVAHGRMKEKEARAKFRQIVSAVQYCHQKYIVHRDLKAENLLLDGDMNIKIADFGFSNEFTVGNKLDTFCGSPPYAAPELFQGKKYDGPEVDVWSLGVILYTLVSGSLPFDGQNLKELRERVLRGKYRIPFYMSTDCENLLKKLLVLNPIKRGSLEQIMKDRWMNVGHEEEELKPYTEPDPDFNDTKRIDIMVTMGFARDEINDALINQKYDEVMATYILLGRKPPEFEGGESLSSGNLCQRSRPSSDLNNSTLQSPAHLKVQRSISANQKQRRFSDHAGPSIPPAVSYTKRPQANSVESEQKEEWDKDVARKLGSTTVGSKSEMTASPLVGPERKKSSTIPSNNVYSGGSMARRNTYVCERTTDRYVALQNGKDSSLTEMSVSSISSAGSSVASAVPSARPRHQKSMSTSGHPIKVTLPTIKDGSEAYRPGTTQRVPAASPSAHSISTATPDRTRFPRGSSSRSTFHGEQLRERRSVAYNGPPASPSHETGAFAHARRGTSTGIISKITSKFVRRSTSGEPKERDKEEGKDSKPRSLRFTWSMKTTSSMDPNDMMREIRKVLDANNCDYEQKERFLLFCVHGDARQDSLVQWEMEVCKLPRLSLNGVRFKRISGTSIAFKNIASKIANELKL

SEQ ID NO: 12855 - protein, 652 aa, Homo sapiens
MGGWKGPGQRRGKEGPEARRRAAERGGGGGGGGVPAPRSPAREPRPRSCLLLPPPWGAAMTPDLLNFKKGWMSILDEPGEPPSPSLTTTSTSQWKKHWFVLTDSSLKYYRDSTAEEADELDGEIDLRSCTDVTEYAVQRNYGFQIHTKDAVYTLSAMTSGIRRNWIEALRKTVRPTSAPDVTKLSDSNKENALHSYSTQKGPLKAGEQRAGSEVISRGGPRKADGQRQALDYVELSPLTQASPQRARTPARTPDRLAKQEELERDLAQRSEERRKWFEATDSRTPEVPAGEGPRRGLGAPLTEDQQNRLSEEIEKKWQELEKLPLRENKRVPLTALLNQSRGERRGPPSDGHEALEKEVQALRAQLEAWRLQGEAPQSALRSQEDGHIPPGYISQEACERSLAEMESSHQQVMEELQRHHERELQRLQQEKEWLLAEETAATASAIEAMKKAYQEELSRELSKTRSLQQGPDGLRKQHQSDVEALKRELQVLSEQYSQKCLEIGALMRQAEEREHTLRRCQQEGQELLRHNQELHGRLSEEIDQLRGFIASQGMGNGCGRSNERSSCELEVLLRVKENELQYLKKEVQCLRDELQMMQKDKRFTSGKYQDVYVELSHIKTRSEREIEQLKEHLRLAMAALQEKESMRNSLAE

SEQ ID NO: 12856 - protein, 672 aa, Homo sapiens
MKQRFSALQLLKLLLLLQPPLPRALREALCPEPCNCVPDGALRCPGPTAGLTRLSLAYLPVKVIPSQAFRGLNEVIKIEISQIDSLERIEANAFDNLLNLSEILIQNTKNLRYIEPGAFINLPRLKYLSICNTGIRKFPDVTKVFSSESNFILEICDNLHITTIPGNAFQGMNNESVTLKLYGNGFEEVQSHAFNGTTLTSLELKENVHLEKMHNGAFRGATGPKTLDISSTKLQALPSYGLESIQRLIATSSYSLKKLPSRETFVNLLEATLTYPSHCCAFRNLPTKDYSSMLAESELSGWDYEYGFCLPKTPRCAPEPDAFNPCEDIMGYDFLRVLIWLINILAIMGNMTVLFVLLTSRYKLTVPRFLMCNLSFADFCMGLYLLLIASVDSQTKGQYYNHAIDWQTGSGCSTAGFFTVFASELSVYTLTVITLERWHTITYAIHLDQKLRLRHAILIMLGGWLFSSLIAMLPLVGVSNYMKVSICFPMDVETTLSQVYILTILILNVVAFFIICACYIKIYFAVRNPELMATNKDTKIAKKMAILIFTDFTCMAPISFFAISAAFKVPLITVTNSKVLLVLFYPINSCANPFLYAIFTKTFQRDFFLLLSKFGCCKRRAELYRRKDFSAYTSNCKNGFTGSNKPSQSTLKLSTLHCQGTALLDKTRYTEC

SEQ ID NO: 12857 - protein, 1939 aa, Homo sapiens
MTDAQMADFGAAAQYLRKSEKERLEAQTRPFDIRTECFVPDDKEEFVKAKILSREGGKVIAETENGKTVTVKEDQVLQQNPPKFDKIEDMAMLTFLHEPAVLFNLKERYAAWMIYTYSGLFCVTVNPYKWLPVYNAEVVAAYRGKKRSEAPPHIFSISDNAYQYMLTDRENQSILITGESGAGKTVNTKRVIQYFASIAAIGDRGKKDNANANKGTLEDQIIQANPALEAFGNAKTVRNDNSSRFGKFIRIHFGATGKLASADIETYLLEKSRVIFQLKAERNYHIFYQILSNKKPELLDMLLVTNNPYDYAFVSQGEVSVASIDDSEELMATDSAFDVLGFTSEEKAGVYKLTGAIMHYGNMKFKQKQREEQAEPDGTEDADKSAYLMGLNSADLLKGLCHPRVKVGNEYVTKGQSVQQVYYSIGALAKAVYEKMFNWMVTRINATLETKQPRQYFIGVLDIAGFEIFDFNSFEQLCINFTNEKLQQFFNHHMFVLEQEEYKKEGIEWTFIDFGMDLQACIDLIEKPMGIMSILEEECMFPKATDMTFKAKLYDNHLGKSNNFQKPRNIKGKQEAHFSLIHYAGTVDYNILGWLEKNKDPLNETVVALYQKSSLKLMATLFSSYATADTGDSGKSKGGKKKGSSFQTVSALHRENLNKLMTNLRTTHPHFVRCIIPNERKAPGVMDNPLVMHQLRCNGVLEGIRICRKGFPNRILYGDFRQRYRILNPVAIPEGQFIDSRKGTEKLLSSLDIDHNQYKFGHTKVFFKAGLLGLLEEMRDERLSRIITRMQAQARGQLMRIEFKKIVERRDALLVIQWNIRAFMGVKNWPWMKLYFKIKPLLKSAETEKEMATMKEEFGRIKETLEKSEARRKELEEKMVSLLQEKNDLQLQVQAEQDNLNDAEERCDQLIKNKIQLEAKVKEMNERLEDEEEMNAELTAKKRKLEDECSELKKDIDDLELTLAKVEKEKHATENKVKNLTEEMAGLDEIIAKLTKEKKALQEAHQQALDDLQVEEDKVNSLSKSKVKLEQQVDDLEGSLEQEKKVRMDLERAKRKLEGDLKLTQESIMDLENDKLQLEEKLKKKEFDINQQNSKIEDEQVLALQLQKKLKENQARIEELEEELEAERTARAKVEKLRSDLSRELEEISERLEEAGGATSVQIEMNKKREAEFQKMRRDLEEATLQHEATAAALRKKHADSVAELGEQIDNLQRVKQKLEKEKSEFKLELDDVTSNMEQIIKAKANLEKVSRTLEDQANEYRVKLEEAQRSLNDFTTQRAKLQTENGELARQLEEKEALISQLTRGKLSYTQQMEDLKRQLEEEGKAKNALAHALQSARHDCDLLREQYEEETEAKAELQRVLSKANSEVAQWRTKYETDAIQRTEELEEAKKKLAQRLQDAEEAVEAVNAKCSSLEKTKHRLQNEIEDLMVDVERSNAAAAALDKKQRNFDKILAEWKQKYEESQSELESSQKEARSLSTELFKLKNAYEESLEHLETFKRENKNLQEEISDLTEQLGEGGKNVHELEKVRKQLEVEKLELQSALEEAEASLEHEEGKILRAQLEFNQIKAEIERKLAEKDEEMEQAKRNHQRVVDSLQTSLDAETRSRNEVLRVKKKMEGDLNEMEIQLSHANRMAAEAQKQVKSLQSLLKDTQIQLDDAVRANDDLKENIAIVERRNNLLQAELEELRAVVEQTERSRKLAEQELIETSERVQLLHSQNTSLINQKKKMESDLTQLQSEVEEAVQECRNAEEKAKKAITDAAMMAEELKKEQDTSAHLERMKKNMEQTIKDLQHRLDEAEQIALKGGKKQLQKLEARVRELEGELEAEQKRNAESVKGMRKSERRIKELTYQTEEDKKNLLRLQDLVDKLQLKVKAYKRQAEEAEEQANTNLSKFRKVQHELDEAEERADIAESQVNKLRAKSRDIGAKQKMHDEE

SEQ ID NO: 12858 - protein, 1721 aa, Homo sapiens
MAGAWLRWGLLLWAGLLASSAHGRLRRITYVVHPGPGLAAGALPLSGPPRSRTFNVALNARYSRSSAAAGAPSRASPGVPSERTRRTSKPGGAALQGLRPPPPPPPEPARPAVPGGQLHPNPGGHPAAAPFTKQGRQVVRSKVPQETQSGGGSRLQVHQKQQLQGVNVCGGRCCHGWSKAPGSQRCTKPSCVPPCQNGGMCLRPQLCVCKPGTKGKACETIAAQDTSSPVFGGQSPGAASSWGPPEQAAKHTSSKKADTLPRVSPVAQMTLTLKPKPSVGLPQQIHSQVTPLSSQSVVIHHGQTQEYVLKPKYFPAQKGISGEQSTEGSFPLRYVQDQVAAPFQLSNHTGRIKVVFTPSICKVTCTKGSCQNSCEKGNTTTLISENGHAADTLTATNFRVVICHLPCMNGGQCSSRDKCQCPPNFTGKLCQIPVHGASVPKLYQHSQQPGKALGTHVIHSTHTLPLTVTSQQGVKVKFPPNIVNIHVKHPPEASVQIHQVSRIDGPTGQKTKEAQPGQSQVSYQGLPVQKTQTIHSTYSHQQVIPHVYPVAAKTQLGRCFQETIGSQCGKALPGLSKQEDCCGTVGTSWGFNKCQKCPKKPSYHGYNQMMECLPGYKRVNNTFCQDINECQLQGVCPNGECLNTMGSYRCTCKIGFGPDPTFSSCVPDPPVISEEKGPCYRLVSSGRQCMHPLSVHLTKQLCCCSVGKAWGPHCEKCPLPGTAAFKEICPGGMGYTVSGVHRRRPIHHHVGKGPVFVKPKNTQPVAKSTHPPPLPAKEEPVEALTFSREHGPGVAEPEVATAPPEKEIPSLDQEKTKLEPGQPQLSPGISTIHLHPQFPVVIEKTSPPVPVEVAPEASTSSASQVIAPTQVTEINECTVNPDICGAGHCINLPVRYTCICYEGYRFSEQQRKCVDIDECTQVQHLCSQGRCENTEGSFLCICPAGFMASEEGTNCIDVDECLRPDVCGEGHCVNTVGAFRCEYCDSGYRMTQRGRCEDIDECLNPSTCPDEQCVNSPGSYQCVPCTEGFRGWNGQCLDVDECLEPNVCANGDCSNLEGSYMCSCHKGYTRTPDHKHCRDIDECQQGNLCVNGQCKNTEGSFRCTCGQGYQLSAAKDQCEDIDECQHRHLCAHGQCRNTEGSFQCVCDQGYRASGLGDHCEDINECLEDKSVCQRGDCINTAGSYDCTCPDGFQLDDNKTCQDINECEHPGLCGPQGECLNTEGSFHCVCQQGFSISADGRTCEDIDECVNNTVCDSHGFCDNTAGSFRCLCYQGFQAPQDGQGCVDVNECELLSGVCGEAFCENVEGSFLCVCADENQEYSPMTGQCRSRTSTDLDVDVDQPKEEKKECYYNLNDASLCDNVLAPNVTKQECCCTSGVGWGDNCEIFPCPVLGTAEFTEMCPKGKGFVPAGESSSEAGGENYKDADECLLFGQEICKNGFCLNTRPGYECYCKQGTYYDPVKLQCFDMDECQDPSSCIDGQCVNTEGSYNCFCTHPMVLDASEKRCIRPAESNEQIEETDVYQDLCWEHLSDEYVCSRPLVGKQTTYTECCCLYGEAWGMQCALCPLKDSDDYAQLCNIPVTGRRQPYGRDALVDFSEQYTPEADPYFIQDRFLNSFEELQAEECGILNGCENGRCVRVQEGYTCDCFDGYHLDTAKMTCVDVNECDELNNRMSLCKNAKCINTDGSYKCLCLPGYVPSDKPNYCTPLNTALNLEKDSDLE

SEQ ID NO: 12859 - protein, 1494 aa, Homo sapiens
MNGGKECDGGDKEGGLPAIQVPVGWQRRVDQNGVLYVSPSGSLLSCLEQVKTYLLTDGTCKCGLECPLILPKVFNFDPGAAVKQRTAEDVKADEDVTKLCIHKRKIIAVATLHKSMEAPHPSLVLTSPGGGTNATPVVPSRAATPRSVRNKSHEGITNSVMPECKNPFKLMIGSSNAMGRLYVQELPGSQQQELHPVYPRQRLGSSEHGQKSPFRGSHGGLPSPASSGSQIYGDGSISPRTDPLGSPDVFTRSNPGFHGAPNSSPIHLNRTPLSPPSVMLHGSPVQSSCAMAGRTNIPLSPTLTTKSPVMKKPMCNFSTNMEIPRAMFHHKPPQGPPPPPPPSCALQKKPLTSEKDPLGILDPIPSKPVNQNPVIINPTSFHSNVHSQVPMMNVSMPPAVVPLPSNLPLPTVKPGHMNHGSHVQRVQHSASTSLSPSPVTSPVHMMGTGIGRIEASPQRSRSSSTSSDHGNFMMPPVGPQATSSGIKVPPRSPRSTIGSPRPSMPSSPSTKSDGHHQYKDIPNPLIAGISNVLNTPSSAAFPTASAGSSSVKSQPGLLGMPLNQILNQHNAASFPASSLLSAAAKAQLANQNKLAGNNSSSSSNSGAVAGSGNTEGHSTLNTMFPPTANMLLPTGEGQSGRAALRDKLMSQQKDALRKRKQPPTTVLSLLRQSQMDSSAVPKPGPDLLRKQGQGSFPISSMSQLLQSMSCQSSHLSSNSTPGCGASNTALPCSANQLHFTDPSMNSSVLQNIPLRGEAVHCHNANTNFVHSNSPVPNHHLAGLINQIQASGNCGMLSQSGMALGNSLHPNPPQSRISTSSTPVIPNSIVSSYNQTSSEAGGSGPSSSIAIAGTNHPAITKTTSVLQDGVIVTTAAGNPLQSQLPIGSDFPFVGQEHALHFPSNSTSNNHLPHPLNPSLLSSLPISLPVNQQHLLNQNLLNILQPSAGEGDMSSINNTLSNHQLTHLQSLLNNNQMFPPNQQQQQLLQGYQNLQAFQGQSTIPCPANNNPMACLFQNFQVRMQEDAALLNKRISTQPGLTALPENPNTTLPPFQDTPCELQPRIDPSLGQQVKDGLVVGGPGDASVDAIYKAVVDAASKGMQVVITTAVNSTTQISPIPALSAMSAFTASIGDPLNLSSAVSAVIHGRNMGGVDHDGRLRNSRGARLPKNLDHGKNVNEGDGFEYFKSASCHTSKKQWDGEQSPRGERNRWKYEEFLDHPGHIHSSPCHERPNNVSTLPFLPGEQHPILLPPRNCPGDKILEENFRYNNYKRTMMSFKERLENTVERCAHINGNRPRQSRGFGELLSTAKQDLVLEEQSPSSSNSLENSLVKDYIHYNGDFNAKSVNGCVPSPSDAKSISSEDDLRNPDSPSSNELIHYRPRTFNVGDLVWGQIKGLTSWPGKLVREDDVHNSCQQSPEEGKVEPEKLKTLTEGLEAYSRVRKRNRKSGKLNNHLEAAIHEAMSELDKMSGTVHQIPQGDRQMRPPKPKRRKISR

SEQ ID NO: 12860 - protein, 773 aa, Homo sapiens
MTNQEKWAHLSPSEFSQLQKYAEYSTKKLKDVLEEFHGNGVLAKYNPEGKQDILNQTIDFEGFKLFMKTFLEAELPDDFTAHLFMSFSNKFPHSSPMVKSKPALLSGGLRMNKGAITPPRTTSPANTCSPEVIHLKDIVCYLSLLERGRPEDKLEFMFRLYDTDGNGFLDSSELENIISQMMHVAEYLEWDVTELNPILHEMMEEIDYDHDGTVSLEEWIQGGMTTIPLLVLLGLENNVKDDGQHVWRLKHFNKPAYCNLCLNMLIGVGKQGLCCSFCKYTVHERCVARAPPSCIKTYVKSKRNTDVMHHYWVEGNCPTKCDKCHKTVKCYQGLTGLHCVWCQITLHNKCASHLKPECDCGPLKDHILPPTTICPVVLQTLPTSGVSVPEERQSTVKKEKSGSQQPNKVIDKNKMQRANSVTVDGQGLQVTPVPGTHPLLVFVNPKSGGKQGERIYRKFQYLLNPRQVYSLSGNGPMPGLNFFRDVPDFRVLACGGDGTVGWVLDCIEKANVGKHPPVAILPLGTGNDLARCLRWGGGYEGENLMKILKDIENSTEIMLDRWKFEVIPNDKDEKGDPVPYSIINNYFSIGVDASIAHRFHIMREKHPEKFNSRMKNKFWYFEFGTSETFSATCKKLHESVEIECDGVQIDLINISLEGIAILNIPSMHGGSNLWGESKKRRSHRRIEKKGSDKRTTVTDAKELKFASQDLSDQLLEVVGLEGAMEMGQIYTGLKSAGRRLAQCSCVVIRTSKSLPMQIDGEPWMQTPCTVSTE

SEQ ID NO: 12861 - protein, 939 aa, Homo sapiens
MTDSKYFTTTKKGEIFELKAELNSDKKEKKKEAVKKVIASMTVGKDVSALFPDVVNCMQTDNLELKKLVYLYLMNYAKSQPDMAIMAVNTFVKDCEDPNPLIRALAVRTMGCIRVDKITEYLCEPLRKCLKDEDPYVRKTAAVCVAKLHDINAQLVEDQGFLDTLKDLISDSNPMVVANAVAALSEIAESHPSSNLLDLNPQSINKLLTALNECTEWGQIFILDCLANYMPKDDREAQSICERVTPRLSHANSAVVLSAVKVLMKFMEMLSKDLDYYGTLLKKLAPPLVTLLSAEPELQYVALRNINLIVQKRPEILKHEMKVFFVKYNDPIYVKLEKLDIMIRLASQANIAQVLAELKEYATEVDVDFVRKAVRAIGRCAIKVEQSAERCVSTLLDLIQTKVNYVVQEAIVVIKDIFRKYPNKYESVIATLCENLDSLDEPEARAAMIWIVGEYAERIDNADELLESFLEGFHDESTQVQLQLLTAIVKLFLKKPTETQELVQQVLSLATQDSDNPDLRDRGYIYWRLLSTDPVAAKEVVLAEKPLISEETDLIEPTLLDELICYIGTLASVYHKPPSAFVEGGRGVVHKSLPPRTASSESAESPETAPTGAPPGEQPDVIPAQGDLLGDLLNLDLGPPVSGPPLATSSVQMGAVDLLGGGLDSLIGGTNFVAPPTAAVPANLGAPIGSGLSDLFDLTSGVGTLSGSYVAPKAVWLPAMKAKGLEISGTFTRQVGSISMDLQLTNKALQVMTDFAIQFNRNSFGLAPAAPLQVHAPLSPNQTVEISLPLSTVGSVMKMEPLNNLQVAVKNNIDVFYFSTLYPLHILFVEDGKMDRQMFLATWKDIPNENEAQFQIRDCPLNAEAASSKLQSSNIFTVAKRNVEGQDMLYQSLKLTNGIWVLAELRIQPGNPSCTLSLKCRAPEVSQHVYQAYETILKN

SEQ ID NO: 12862 - protein, 728 aa, Homo sapiens
MYGVCGCCGALRPRYKRLVDNIFPEDPEDGLVKTNMEKLTFYALSAPEKLDRIGAYLSERLIRDVGRHRYGYVCIAMEALDQLLMACHCQSINLFVESFLKMVAKLLESEKPNLQILGTNSFVKFANIEEDTPSYHRSYDFFVSRFSEMCHSSHDDLEIKTKIRMSGIKGLQGVVRKTVNDELQANIWDPQHMDKIVPSLLFNLQHVEEAESRSPSPLQAPEKEKESPAELAERCLRELLGRAAFGNIKNAIKPVLIHLDNHSLWEPKVFAIRCFKIIMYSIQPQHSHLVIQQLLGHLDANSRSAATVRAGIVEVLSEAAVIAATGSVGPTVLEMFNTLLRQLRLSIDYALTGSYDGAVSLGTKIIKEHEERMFQEAVIKTVGSFASTLPTYQRSEVILFIMSKVPRPSLHQAVDTGRTGENRNRLTQIMLLKSLLQVSTGFQCNNMMSALPSNFLDRLLSTALMEDAEIRLFVLEILISFIDRHGNRHKFSTISTLSDISVLKLKVDKCSRQDTVFMKKHSQQLYRHIYLSCKEETNVQKHYEALYGLLALISIELANEEVVVDLIRLVLAVQDVAQVNEENLPVYNRCALYALGAAYLNLISQLTTVPAFCQHIHEVIETRKKEAPYMLPEDVFVERPRLSQNLDGVVIELLFRQSKISEVLGGSGYNSDRLCLPYIPQLTDEDRLSKRRSIGETISLQVEVESRNSPEKEEVSVRATVLGQPHLL

SEQ ID NO: 12863 - protein, 366 aa, Homo sapiens
MAQQANVGELLAMLDSPMLGVRDDVTAVFKENLNSDRGPMLVNTLVDYYLETSSQPALHILTTLQEPHDKHLLDRINEYVGKAATRLSILSLLGHVIRLQPSWKHKLSQAPLLPSLLKCLKMDTDVVVLTTGVLVLITMLPMIPQSGKQHLLDFFDIFGRLSSWCLKKPGHVAEVYLVHLHASVYALFHRLYGMYPCNFVSFLRSHYSMKENLETFEEVVKPMMEHVRIHPELVTGSKDHELDPRRWKRLETHDVVIECAKISLDPTEASYEDGYSVSHQISARFPHRSADVTTSPYADTQNSYGCATSTPYSTSRLMLLNMPGQLPQTLSSPSTRLITEPPQVWCQLVCLLSPLLSGEADPLGQI

SEQ ID NO: 12864 - protein, 359 aa, Homo sapiens
MPSSVSWGILLLAGLCCLVPVSLAEDPQGDAAQKTDTSHHDQDHPTFNKITPNLAEFAFSLYRQLAHQSNSTNIFFSPVSIATAFAMLSLGTKADTHDEILEGLNFNLTEIPEAQIHEGFQELLRTLNQPDSQLQLTTGNGLFLSEGLKLVDKFLEDVKKLYHSEAFTVNFGDTEEAKKQINDYVEKGTQGKIVDLVKELDRDTVFALVNYIFFKGKWERPFEVKDTEEEDFHVDQVTTVKVPMMKRLGMFNIQHCKKLSSWVLLMKYLGNATAIFFLPDEGKLQHLENELTHDIITKFLENEDRRSASLHLPKLSITGTYDLKSVLGQLGITKVFSNGADLSGVTEEAPLKLSKVRSP

SEQ ID NO: 12865 - protein, 2568 aa, Homo sapiens
MAISSRLALWEQKIREEDKSPPPSSPPPLFSVIPGGFIKQLVRGTEKEAKEARQRKQLAVASPEREIPEISISQPNSKSSSGTRSGSQQISQDDQSSSPGSSDILGKESEGSRSPDPEQMTSINGEKAQELGSSATPTKKTVPFKRGVRRGDVLLMVAKLDPDSAKPEKTHPHDAPPCKTSPPATDTGKEKKGETSRTPCGSQASTEILAPKAEKTRTGGLGDPGQGTVALKKGEEGQSIVGKGLGTPKTTELKEAEPQGKDRQGTRPQAQGPGEGVRPGKAEKEGAEPTNTVEKGNVSKDVGSEGKHVRPQIPGRKWGGFLGRRSKWDGPQNKKDKEGVLLSKAEKTGEPQTQMEKTSQVQGELGDDLRMGEKAGELRSTTGKAGESWDKKEKMGQPQGKSGNAGEARSQTEKGCEAPKEVSTMVESPAAPGKGGWPGSRGQEAEEPCSRAGDGAGALETELEGPSQPALEKDAERPRIRKENQDGPAPQEEGKGGQSRDSDQAPEDRWYEAEKVWLAQKDGFTLATVLKPDEGTADLPAGRVRLWIDADKTITEVDEEHVHRANPPELDQVEDLASLISVNESSVLNTLLQRYKAQLLHTCTGPDLIVLQPRGPSVPSAGKVPKGRRDGLPAHIGSMAQRAYWALLNQRRDQSIVALGWSGAGKTTCCEQVLEHLVGMAGSVDGRVSVEKIRATFTVLRAFGSVSMAHSRSATRFSMVMSLDFNATGRITAAQLQTMLLEKSRVARQPEGESNFLVFSQMLAGLDLDLRTELNLHQMADSSSFGMGVWSKPEDKQKAAAAFAQLQGAMEMLGISESEQRAVWRVLAAIYHLGAAGACKVGRKQFMRFEWANYAAEALGCEYEELNTATFKHHLRQIIQQMTFGPSRWGLEDEETSSGLKMTGVDCVEGMASGLYQELFAAVVSLINRSFSSHHLSMASIMVVDSPGFQNPRHQGKDRAATFEELCHNYAHERLQLLFYQRTFVSTLQRYQEEGVPVQFDLPDPSPGTTVAVVDQNPSQQVRLPAGGGAQDARGLFWVLDEEVHVEGSSDSVVLERLCAAFEKKGAGTEGSSALRTCEQPLQCEIFHQLGWDPVRYDLTGWLHRAKPNLSALDAPQVLHQSKREELRSLFQARAKLPPVCRAVAGLEGTSQQALQRSRMVRRTFASSLAAVRRKAPCSQIKLQMDALTSMIKRSRLHFIHCLVPNPVVESRSGQESPPPPQPGRDKPGAGGPLALDIPALRVQLAGFHILEALRLHRTGYADHMGLTRFRRQFQVLDAPLLKKLMSTSEGIDERKAVEELLETLDLEKKAVAVGHSQVFLKAGVISRLEKQREKLVSQSIVLFQAACKGFLSRQEFKKLKIRRLAAQCIQKNVAVFLAVKDWPWWQLLGSLQPLLSATIGTEQLRAKEEELTTLRRKLEKSEKLRNELRQNTDLLESKIADLTSDLADERFKGDVACQVLESERAERLQAFREVQELKSKHEQVQKKLGDVNKQLEEAQQKIQLNDLERNPTGGADEWQMRFDCAQMENEFLRKRLQQCEERLDSELTARKELEQKLGELQSAYDGAKKMAHQLKRKCHHLTCDLEDTCVLLENQQSRNHELEKKQKKFDLQLAQALGESVFEKGLREKVTQENTSVRWELGQLQQQLKQKEQEASQLKQQVEMLQDHKRELLGSPSLGENCVAGLKERLWKLESSALEQQKIQSQQENTIKQLEQLRQRFELEIERMKQMHQKDREDQEEELEDVRQSCQKRLHQLEMQLEQEYEEKQMVLHEKQDLEGLIGTLCDQIGHRDFDVEKRLRRDLRRTHALLSDVQLLLGTMEDGKTSVSKEELEKVHSQLEQSEAKCEEALKTQKVLTADLESMHSELENMTRNKSLVDEQLYRLQFEKADLLKRIDEDQDDLNELMQKHKDLIAQSAADIGQIQELQLQLEEAKKEKHKLQEQLQVAQMRIEYLEQSTVDRAIVSRQEAVICDLENKTEFQKVQIKRFEVLVIRLRDSLIKMGEELSQAATSESQQRESSQYYQRRLEELKADMEELVQREAEASRRCMELEKYVEELAAVRQTLQTDLETSIRRIADLQAALEEVASSDSDTESVQTAVDCGSSGRKEMDNVSILSSQPEGSLQSWLSCTLSLATDTMRTPSRQSATSSRILSPRINEEAGDTERTQSALALSRARSTNVHSKTSGDKPVSPHFVRRQKYCHFGDGEVLAVQRKSTERLEPASSPLASRSTNTSPLSREKLPSPSAALSEFVEGLRRKRAQRGQGSTLGLEDWPTLPIYQTTGASTLRRGRAGSDEGNLSLRVGAKSPLEIEGAAGGLLRSTSLKCISSDGVGGTTLLPEKSKTQFSSCESLLESRPSMGRKLSSPTTPRDMLLSPTLRPRRRCLESSVDDAGCPDLGKEPLVFQNRQFAHLMEEPLGSDPFSWKLPSLDYERKTKVDFDDFLPAIRKPQTPTSLAGSAKGGQDGSQRSSIHFETEEANRSFLSGIKTILKKSPEPKEDPAHLSDSSSSSGSIVSFKSADSIKSRPGIPRLAGDGGERTSPERREPGTGRKDDDVASIMKKYLQK

SEQ ID NO: 12866 - protein, 347 aa, Homo sapiens
MAVTEASLLRQCPLLLPQNRSKTVYEGFISAQGRDFHLRIVLPEDLQLKNARLLCSWQLRTILSGYHRIVQQRMQHSPDLMSFMMELKMLLEVALKNRQELYALPPPPQFYSSLIEEIGTLGWDKLVYADTCFSTIKLKAEDASGREHLITLKLKAKYPAESPDYFVDFPVPFCASWTPQSSLISIYSQFLAAIESLKAFWDVMDEIDEKTWVLEPEKPPRSATARRIALVVKPLGIKLSRNIHLWDPENSVLQNLKDVLEIDFPARAILEKSDFTMDCGICYAYQLDGTIPDQVCDNSQCGQPFHQICLYEWLRGLLTSRQSFNIIFGECPYCSKPITLKMSGRKH

SEQ ID NO: 12867 - protein, 351 aa, Homo sapiens
MTHIVREVDRPGSKVNKKEVVEAVTIVETPPMVVVGIVGYVETPRGLRTFKTVFAEHISDECKRRFYKNWHKSKKKAFTKYCKKWQDEDGKKQLEKDFSSMKKYCQVIRVIAHTQMRLLPLRQKKAHLMEIQVNGGTVAEKLDWARERLEQQVPVNQVFGQDEMIDVIGVTKGKGYKGVTSRWHTKKLPRKTHRGLRKVACIGAWHPARVAFSVARAGQKGYHHRTEINKKIYKIGQGYLIKDGKLIKNNASTDYDLSDKSINPLGGFVHYGEVTNDFVMLKGCVVGTKKRVLTLRKSLLVQTKRRALEKIDLKFIDTTSKFGHGRFQTMEEKKAFMGPLKKDRIAKEEGA

SEQ ID NO: 12868 - protein, 429 aa, Homo sapiens
MPNVLLPPKESNLFKRILKCYEQKQYKNGLKFCKMILSNPKFAEHGETLAMKGLTLNCLGKKEEAYEFVRKGLRNDVKSHVCWHVYGLLQRSDKKYDEAIKCYRNALKLDKDNLQILRDLSLLQIQMRDLEGYRETRYQLLQLRPTQRASWIGYAIAYHLLKDYDMALKLLEEFRQTQQVPPNKIDYEYSELILYQNQVMREADLLQESLEHIEMYEKQICDKLLVEEIKGEILLKLGRLKEASEVFKNLIDRNAENWCYYEGLEKALQISTLEERLQIYEEISKQHPKAITPRRLPLTLVPGERFRELMDKFLRVNFSKGCPPLFTTLKSLYYNTEKVSIIQELVTNYEASLKTCDFFSPYENGEKEPPTTLLWVQYFLAQHFDKLGQYSLALDYINAAIASTPTLIELFYMKAKIYKVKSESCFLSS

SEQ ID NO: 12869 - protein, 1192 aa, Homo sapiens
KLFCRIQESSQVLYKLEQSKSKREPENELTKQHPSVSLQQYKNFMSSICNSLFEALFPGSSYSTRFSALTILGSIAEVFHVPEGRIYTVYQLSHDIDVGRFQTLMECFTSTFEDVKILAFDLLMKLSKTAVHFQDSGKLQGLFQAALELSTSTKPYDCVTASYLLNFLIWQDALPSSLSAYLTQQVACDNGDRPAAVVERNTLMVIKCLMENLEEEVSQAENSLLQAAAAFPMYGRVHCITGALQKLSLNSLQLVSEWRPVVEKLLLMSYRLSTVVSPVIQSSSPEGLIPMDTDSESASRLQMILNEIQPRDTNDYFNQAKILKEHDSFDMKDLNASVVNIDTSTEIKGKEVKTCDVTAQMVLVCCWRSMKEVALLLGMLCQLLPMQPVPESSDGLLTVEQVKEIGDYFKQHLLQSRHRGAFELAYTGFVKLTEVLNRCPNVSLQKLPEQWLWSVLEEIKCSDPSSKLCATRRSAGIPFYIQALLASEPKKGRMDLLKITMKELISLAGPTDDIQSTVPQVHALNILRALFRDTRLGENIIPYVADGAKAAILGFTSPVWAVRNSSTLLFSALITRIFGVKRAKDEHSKTNRCGHSPVYHSREMAARALVPFVMIDHIPNTIRTLLSTLPSCTDQCFRQNHIHGTLLQVFHLLQAYSDSKHGTNSDFQHELTDITVCTKAKLWLAKRQNPCLVTRAVYIDILFLLTCCLNRSAKDNQPVLESLGFWEEVRGIISGSELITGFPWAFKVPGLPQYLQSLTRLAIAAVWAAAAKSGERETNVPISFSQLLESAFPEVRSLTLEALLEKFLAAASGLGEKGVPPLLCNMGEKFLLLAMKENHPECFCKILKILHCMDPGEWLPQTEHCVHLTPKEFLIWTMDIASNERSEIQSVALRLASKVISHHMQTCVENRELIAAELKQWVQLVILSCEDHLPTESRLAVVEVLTSTTPLFLTNPHPILELQDTLALWKCVLTLLQSEEQAVRDAATETVTTAMSQENTCQSTEFAFCQVDASIALALALAVLCDLLQQWDQLAPGLPILLGWLLGESDDLVACVESMHQVEEDYLFEKAEVNFWAETLIFVKYLCKHLFCLLSKSGWRPPSPEMLCHLQRMVSEQCHLLSQFFRELPPAAEFVKTVEFTRLRIQEERTLACLRLLAFLEGKEGEDTLVLSVWDSYAESRQLTLPRTEAAC

SEQ ID NO: 12870 - protein, 664 aa, Homo sapiens
MRRLSLSPTFSMGFHLLVTVSLLFSHVDHVIAETEMEGEGNETGECTGSYYCKKGVILPIWEPQDPSFGDKIARATVYFVAMVYMFLGVSIIADRFMSSIEVITSQEKEITIKKPNGETTKTTVRIWNETVSNLTLMALGSSAPEILLSVIEVCGHNFTAGDLGPSTIVGSAAFNMFIIIALCVYVVPDGETRKIKHLRVFFVTAAWSIFAYTWLYIILSVISPGVVEVWEGLLTFFFFPICVVFAWVADRRLLFYKYVYKRYRAGKQRGMIIEHEGDRPSSKTEIEMDGKVVNSHVENFLDGALVLEVDERDQDDEEARREMARILKELKQKHPDKEIEQLIELANYQVLSQQQKSRAFYRIQATRLMTGAGNILKRHAADQARKAVSMHEVNTEVTENDPVSKIFFEQGTYQCLENCGTVALTIIRRGGDLTNTVFVDFRTEDGTANAGSDYEFTEGTVVFKPGDTQKEIRVGIIDDDIFEEDENFLVHLSNVKVSSEASEDGILEANHVSTLACLGSPSTATVTIFDDDHAGIFTFEEPVTHVSESIGIMEVKVLRTSGARGNVIVPYKTIEGTARGGGEDFEDTCGELEFQNDEIVKTISVKVIDDEEYEKNKTFFLEIGEPRLVEMSEKKGRSLPLEYLTVRNMRKSAVSPLCLRNQNG

SEQ ID NO: 12871 - protein, 1030 aa, Homo sapiens
MVTLGAGVRLFTGVYPVVLNQIRATSEASAITRTTMPAPELTSTSRAEDTRDTGVQLRKRKIPQARHSRKRQRTFSFRSLGSAARSGAESEARAKMAAAKPTLTDSLSFCLAQLAAAAGEALGGEKDPATNETPLSRALLALRTRHIKAAGGIERFRARGGLRPLLALLRRAAAAGSAPSQAGPGSAPSSAASGASSPAPASGPAPSAVSSSSPTPPVRLRKTLDLALSILADCCTEGACRTEVRRLGGILPLVTILQCMKTDSIQNRTARALGNLAMEPESCGDIHCAGAVPLLVESLTACQDSQCLQSVVRALRNLADSPQHRLALAQQGAVRPLAELLATAPDAALTLALVRALLELSRGCSRACAEQLSLGGGLGPLVSLASHPKRAVREGTILILANLCAQGLIRPALGNAGGVEVLVDELRQRRDPNGASPTSQQPLVRAVCLLCREAINRARLRDAGGLDLLMGLLRDPRASAWHPRIVAALVGFLYDTGALGRLQALGLVPLLAGQLCGEAGEEEEEGREAASWDFPEERTPERAQGGSFRSLRSWLISEGYATGPDDISPDWSPEQCPPEPMEPASPAPTPTSLRAPRTQRTPGRSPAAAIEEPWGREGPALLLLSRFSQAPDPSGALVTGPALYGLLTYVTGAPGPPSPRALRILSRLTCNPACLEAFVRSYGAALLRAWLVLGVAPDDWPAPRARPTLHSRHRELGERLLQNLTVQAESPFGVGALTHLLLSGSPEDRVACALTLPFICRKPSLWRRLLLEQGGLRLLLAALTRPAPHPLFLFFAADSLSCLQDLVSPTVSPAVPQAVPMDLDSPSPCLYEPLLGPAPVPAPDLHFLLDSGLQLPAQRAASATASPFFRALLSGSFAEAQMDLVPLRGLSPGAAWPVLHHLHGCRGCGAALGPVPPPGQPLLGSEAEEALEAAGRFLLPGLEEELEEAVGRIHLGPQGGPESVGEVFRLGRPRLAAHCARWTLGSEQCPRKRGLALVGLVEAAGEEAGPLTEALLAVVMGIELGARVPA

SEQ ID NO: 12872 - protein, 1446 aa, Homo sapiens
MLRTSGLALLALVSAVGPSQASGFTEKGLSLLGYQLCSHRVTHTVQKVEAVQTSYTSYVSCGGWIPWRRCPKMVYRTQYLVVEVPESRNVTDCCEGYEQLGLYCVLPLNQSGQFTSRPGACPAEGPEPSTSPCSLDIDCPGLEKCCPWSGGRYCMAPAPQAPERDPVGSWYNVTILVKMDFKELQQVDPRLLNHMRLLHSLVTSALQPMASTVHHLHSAPGNASTTVSRLLLGLPRPLPVADVSTLLGDIAKRVYEVISVQVQDVNECFYEELNACSGRELCANLEGSYWCVCHQEAPATSPRKLNLEWEDCPPVSDYVVLNVTSDSFQVSWRLNSTQNHTFHVRVYRGMELLRSARTQSQALAVAGLEAGVLYRVKTSYQGCGADVSTTLTIKTNAQVFEVTIKIVNHNLTEKLLNRSSVEYQDFSRQLLHEVESSFPPVVSDLYRSGKLRMQIVSLQAGSVVVRLKLTVQDPGFPMGISTLAPILQPLLASTVFQIDRQGTRVQDWDECVDSAEHDCSPAAWCINLEGSYTCQCRTTRDATPSRAGRACEGDLVSPMGGGLSAATGVTVPGLGTGTAALGLENFTLSPSPGYPQGTPAAGQAWTPEPSPRRGGSNVVGYDRNNTGKGVEQEVPSTAPGLGMDQGSPSQVNPSQGSPSQGSLRQESTSQASPSQRSTSQGSPSQVNPSQRSTSHANSSQGSPSQGSPSQESPSQGSTSQASPSHRNTIGVIGTTSSPKATGSTHSFPPGATDGPLALPGQLQGNSIMEPPSWPSPTEDPTGHFLWHATRSTRETLLNPTWLRNEDSGPSGSVDLPLTSTLTALKTPACVPVSIGRIMVSNVTSTGFHLAWEADLAMDSTFQLTLTSMWSPAVVLETWNTSVTLSGLEPGVLHLVEIMAKACGKEGARAHLKVRTAARKLIGKVRIKNVRYSESFRNASSQEYRDFLELFFRMVRGSLPATMCQHMDAGGVRMEVVSVTNGSIVVEFHLLIIADVDVQEVSAAFLTAFQTVPLLEVIRGDTFIQDYDECERKEDDCVPGTSCRNTLGSFTCSCEGGAPDFPVEYSERPCEGDSPGNETWATSPERPLTTAGTKAAFVQGTSPTPQGLPQRLNLTGAVRVLCEIEKVVVAIQKRFLQQESIPESSLYLSHPSCNVSHSNGTHVLLEAGWSECGTLMQSNMTNTVVRTTLRNDLSQEGIIHHLKILSPIYCAFQNDLLTSSGFTLEWGVYTIIEDLHGAGNFVTEMQLFIGDSPIPQNYSVSASDDVRIEVGLYRQKSNLKVVLTECWATPSSNARDPITFSFINNSCPVPNTYTNVIENGNSNKAQFKLRIFSFINDSIVYLHCKLRVCMESPGATCKINCNNFRLLQNSETSATHQMSWGPLIRSEGEPPHAEAGLGAGYVVLIVVAIFVLVAGTATLLIVRYQRMNGRYNFKIQSNNFSYQVFYE

SEQ ID NO: 12873 - protein, 296 aa, Homo sapiens
MGAAAPAESADLGNFWKAGEPLLQGPDALAAPMSRSPSTPQTTPSPQGRQSPWPLRSLTQSHIQYFQWGRPVPSTHLIEVRPTQDPAKPQRVVSEGWRRPALPGETALGRDLSCAWEGCMKGGLCRAWNPGRTWSPVTIGIAPPERQESPWRSPGQRARPAGRPAAQELLDPCTRETLLGALSQCPKGSARFDGPLWFEVSDSKGGRRNLQPRPSAFKPLSKNGAVASFVPRPGPLKPSLGPWSLSFCDDAWPSVLVQPAPSAIWDFWEATTPSCGSCSRVSFALEVTQSAGPFGS

SEQ ID NO: 12874 - protein, 310 aa, Homo sapiens
MEGNKTWITDITLPRFQVGPALEILLCGLFSAFYTLTLLGNGVIFGIICLDCKLHTPMYFFLSHLAIVDISYASNYVPKMLTNLMNQESTISFFPCIMQTFLYLAFAHVECLILVVMSYDRYADICHPLRYNSLMSWRVCTVLAVASWVFSFLLALVPLVLILSLPFCGPHEINHFFCEILSVLKLACADTWLNQVVIFAACVFILVGPLCLVLVSYLRILAAILRIQSGEGRRKAFSTCSSHLCVVGLFFGSAIVTYMAPKSRHPEEQQKVLSLFYSLFNPMLNPLIYSLRNAEVKGALRRALRKERLT

SEQ ID NO: 12875 - protein, 314 aa, Homo sapiens
MEKRNLTVVREFVLLGLPSSAEQQHLLSVLFLCMYLATTLGNMLIIATIGFDSHLHSPMYFFLSNLAFVDICFTSTTVPQMVVNILTGTKTISFAGCLTQLFFFVSFVNMDSLLLCVMAYDRYVAICHPLHYTARMNLCLCVQLVAGLWLVTYLHALLHTVLIAQLSFCASNIIHHFFCDLNPLLQLSCSDVSFNVMIIFAVGGLLALTPLVCILVSYGLIFSTVLKITSTQGKQRAVSTCSCHLSVVVLFYGTAIAVYFSPSSPHMPESDTLSTIMYSMVAPMLNPFIYTLRNRDMKRGLQKMLLKCTVFQQQ

SEQ ID NO: 12876 - protein, 1318 aa, Homo sapiens
MLRTSGLALLALVSAVGPSQASGFTEKGLSLLGYQLCSHRVTHTVQKVEAVQTSYTSYVSCGGWIPWRRCPKMVYRTQYLVVEVPESRNVTDCCEGYEQLGLYCVLPLNQSGQFTSRPGACPAEGPEPSTSPCSLDIDCPGLEKCCPWSGGRYCMAPAPQAPERDPVGSWYNVTILVKMDFKELQQVDPRLLNHMRLLHSLVTSALQPMASTVHHLHSAPGNASTTVSRLLLGLPRPLPVADVSTLLGDIAKRVYEVISVQVQDVNECFYEELNACSGRELCANLEGSYWCVCHQEAPATSPRKLNLEWEDCPPVSDYVVLNVTSDSFQVSWRLNSTQNHTFHVRVYRGMELLRSARTQSQALAVAGLEAGVLYRVKTSYQGCGADVSTTLTIKTNAQVFEVTIKIVNHNLTEKLLNRSSVEYQDFSRQLLHEVESSFPPVVSDLYRSGKLRMQIVSLQAGSVVVRLKLTVQDPGFPMGISTLAPILQPLLASTVFQIDRQGTRVQDWDECVDSAEHDCSPAAWCINLEGSYTCQCRTTRDATPSRAGRACEGDLVSPMGGGLSAATGVTVPGLGTGTAALGLENFTLSPSPGYPQGTPAAGQAWTPEPSPRRGGSNVVGYDRNNTGKGVEQELQGNSIMEPPSWPSPTEDPTGHFLWHATRSTRETLLNPTWLRNEDSGPSGSVDLPLTSTLTALKTPACVPVSIGRIMVSNVTSTGFHLAWEADLAMDSTFQLTLTSMWSPAVVLETWNTSVTLSGLEPGVLHLVEIMAKACGKEGARAHLKVRTAARKLIGKVRIKNVRYSESFRNASSQEYRDFLELFFRMVRGSLPATMCQHMDAGGVRMEVVSVTNGSIVVEFHLLIIADVDVQEVSAAFLTAFQTVPLLEVIRGDTFIQDYDECERKEDDCVPGTSCRNTLGSFTCSCEGGAPDFPVEYSERPCEGDSPGNETWATSPERPLTTAGTKAAFVQGTSPTPQGLPQRLNLTGAVRVLCEIEKVVVAIQKRFLQQESIPESSLYLSHPSCNVSHSNGTHVLLEAGWSECGTLMQSNMTNTVVRTTLRNDLSQEGIIHHLKILSPIYCAFQNDLLTSSGFTLEWGVYTIIEDLHGAGNFVTEMQLFIGDSPIPQNYSVSASDDVRIEVGLYRQKSNLKVVLTECWATPSSNARDPITFSFINNSCPVPNTYTNVIENGNSNKAQFKLRIFSFINDSIVYLHCKLRVCMESPGATCKINCNNFRLLQNSETSATHQMSWGPLIRSEGEPPHAEAGLGAGYVVLIVVAIFVLVAGTATLLIVRYQRMNGRYNFKIQSNNFSYQVFYE

SEQ ID NO: 12877 - protein, 311 aa, Homo sapiens
MELENQTRVTKFILVGFPGSLSMRAAMFLIFLVAYILTVAENVIIILLVLQNRPLHKPMYFFLANLSFLETWYISVTVPKLLFSFWSVNNSISFTLCMIQLYFFIALMCTECVLLAAMAYDRYVAICRPLHYPTIMSHGLCFRLALGSWAIGFGISLAKIYFISCLSFCGPNVINHFFCDISPVLNLSCTDMSITELVDFILALVIFLFPLFITVLSYGCILATILCMPTGKQKAFSTCASHLVVVTIFYSAIIFMYARPRVIHAFNMNKIISIFYAIVTPSLNPFIYCLRNREVKEALKKLAYCQASRSD

SEQ ID NO: 12878 - protein, 363 aa, Homo sapiens
MAALRYAGLDDTDSEDELPPGWEERTTKDGWVYYANHTEEKTQWEHPKTGKRKRVAGDLPYGWEQETDENGQVFFVDHINKRTTYLDPRLAFTVDDNPTKPTTRQRYDGSTTAMEILQGRDFTGKVVVVTGANSGIGFETAKSFALHGAHVILACRNMARASEAVSRILEEWHKAKVEAMTLDLALLRSVQHFAEAFKAKNVPLHVLVCNAATFALPWSLTKDGLETTFQVNHLGHFYLVQLLQDVLCRSAPARVIVVSSESHRFTDINDSLGKLDFSRLSPTKNDYWAMLAYNRSKLCNILFSNELHRRLSPRGVTSNAVHPGNMMYSNIHRSWWVYTLLFTLARPFTKSMVSDCLVEGGHF

SEQ ID NO: 12879 - protein, 310 aa, Homo sapiens
MGGNQTSITEFLLLGFPIGPRIQMLLFGLFSLFYIFILLGNGTILGLISLDSRLHTPMYFFLSHLAVVDIACACSTVPQMLVNLLHPAKPISFAGCMTQMFLFLSFAHTECLLLVVMSYDRYVAICHPLRYSTIMTWKVCITLALTSWILGVLLALVHLVLLLPLSFCGPQKLNHFFCEIMAVLKLACADTHINEVMVLAGAVSVLVGAFFSTVISYVHILCAILKIQSGEGCQKAFSICSSHLCVVGLFYGTAIIMYVEPQYESPKEQKKYLLLFHSLFNPMLNPLIYSLRNKEVQGTLKRMLEKKRTS

SEQ ID NO: 12880 - protein, 458 aa, Homo sapiens
MDSVELCLPESFSLHYEEELLCRMSNKDRHIDSSCSSFIKTEPSSPASLTDSVNHHSPGGSSDASGSYSSTMNGHQNGLDSPPLYPSAPILGGSGPVRKLYDDCSSTIVEDPQTKCEYMLNSMPKRLCLVCGDIASGYHYGVASCEACKAFFKRTIQGNIEYSCPATNECEITKRRRKSCQACRFMKCLKVGMLKEGVRLDRVRGGRQKYKRRIDAENSPYLNPQLVQPAKKPYNKIVSHLLVAEPEKIYAMPDPTVPDSDIKALTTLCDLADRELVVIIGWAKHIPGFSTLSLADQMSLLQSAWMEILILGVVYRSLSFEDELVYADDYIMDEDQSKLAGLLDLNNAILQLVKKYKSMKLEKEEFVTLKAIALANSDSMHIEDVEAVQKLQDVLHEALQDYEAGQHMEDPRRAGKMLMTLPLLRQTSTKAVQHFYNIKLEGKVPMHKLFLEMLEAKV

SEQ ID NO: 12881 - protein, 935 aa, Homo sapiens
MNEAMATDSPRRPSRCTGGVVVRPQAVTEQSYMESVVTFLQDVVPQAYSGTPLTEEKEKIVWVRFENADLNDTSRNLEFHEIHSTGNEPPLLIMIGYSDGMQVWSIPISGEAQELFSVRHGPIRAARILPAPQFGAQKCDNFAEKRPLLGVCKSIGSSGTSPPYCCVDLYSLRTGEMVKSIQFKTPIYDLHCNKRILVVVLQEKIAAFDSCTFTKKFFVTSCYPCPGPNMNPIALGSRWLAYAENKLIRCHQSRGGACGDNIQSYTATVISAAKTLKSGLTMVGKVVTQLTGTLPSGVTEDDVAIHSNSRRSPLVPGIITVIDTETVGEGQVLVSEDSDSDGIVAHFPAHEKPVCCMAFNTSGMLLVTTDTLGHDFHVFQILTHPWSSSQCAVHHLYTLHRGETEAKVQDICFSHDCRWVVVSTLRGTSHVFPINPYGGQPCVRTHMSPRVVNRMSRFQKSAGLEEIEQELTSKQGGRCSPVPGLSSSPSGSPLHGKLNSQDSYNNFTNNNPGNPRLSPLPSLMVVMPLAQIKQPMTLGTITKRTGKVKPPPQISPSKSMGGEFCVAAIFGTSRSWFANNAGLKREKDQSKQVVVESLYIISCYGTLVEHMMEPRPLSTAPKISDDTPLEMMTSPRASWTLVRTPQWNELQPPFNANHPLLLAADAVQYYQFLLAGLVPPGSPGPITRHGSYDSLASDHSGQEDEEWLSQVEIVTHTGPHRRLWMGPQFQFKTIHPSGQTTVISSSSSVLQSHGPSDTPQPLLDFDTDDLDLNSLRIQPVRSDPVSMPGSSRPVSDRRGVSTVIDAASGTFDRSVTLLEVCGSWPEGFGLRHMSSMEHTEEGLRERLADAMAESPSRDVVGSGTDTALDVAVKTFPPERHVAVKCFELQREGSIETLSNSSGSTSGSIPRNFDGYRSPLPTNESQPLSLFPTGFP

SEQ ID NO: 12882 - protein, 310 aa, Homo sapiens
MESNQTWITEVILLGFQVDPALELFLFGFFLLFYSLTLMGNGIILGLIYLDSRLHTPMYVFLSHLAIVDMSYASSTVPKMLANLVMHKKVISFAPCILQTFLYLAFAITECLILVMMCYDRYVAICHPLQYTLIMNWRVCTVLASTCWIFSFLLALVHITLILRLPFCGPQKINHFFCQIMSVFKLACADTRLNQVVLFAGSAFILVGPLCLVLVSYLHILVAILRIQSGEGRRKAFSTCSSHLCVVGLFFGSAIVMYMAPKSSHSQERRKILSLFYSLFNPILNPLIYSLRNAEVKGALKRVLWKQRSM

SEQ ID NO: 12883 - protein, 427 aa, Homo sapiens
MCRVLLTHEVMCSRCCEKKSCGNRNETPSDPVIIDRFFLKFFLKCNQNCLKTAGNPRDMRRFQVVLSTTVNVDGHVLAVSDNMFVHNNSKHGRRARRLDPSEATPCIKAISPSEGWTTGGAMVIIIGDNFFDGLQVVFGTMLVWSELITPHAIRVQTPPRHIPGVVEVTLSYKSKQFCKGAPGRFIYTALNEPTIDYGFQRLQKVIPRHPGDPERLAKEMLLKRAADLVEALYGTPHNNQDIILKRAADIAEALYSVPRNPSQLPALSSSPAHSGMMGINSYGSQLGVSISESTQGNNQGYIRNTSSISPRGYSSSSTPQQSNYSTSSNSMNGYSNVPMANLGVPGSPGFLNGSPTGSPYGIMSSSPTVGSSSTSSILPFSSSVFPAVKQKSAFAPVIRPQGSPSPACSSGNGNGFRAMTGLVVPPM

SEQ ID NO: 12884 - protein, 665 aa, Homo sapiens
MAGLSGAQIPDGEFTAVVYRLIRNARYAEAVQLLGGELQRSPRSRAGLSLLGYCYYRLQEFALAAECYEQLGQLHPELEQYRLYQAQALYKACLYAEATRVAFLLLDNPAYHSRVLRLQAAIKYSEGDLPGSRSLVEQLPSREGGEESGGENETDGQINLGCLLYKEGQYEAACSKFFAALQASGYQPDLSYNLALAYYSSRQYASALKHIAEIIERGIRQHPELGVGMTTEGIDVRSVGNTLVLHQTALVEAFNLKAAIEYQLRNYEAAQEALTDMPPRAEEELDPVTLHNQALMNMDARPTEGFEKLQFLLQQNPFPPETFGNLLLLYCKYEYFDLAADVLAENAHLIYKFLTPYLYDFLDAVITCQTAPEEAFIKLDGLAGMLTEVLRKLTIQVQEARHNRDDEAIKKAVNEYDETMEKYIPVLMAQAKIYWNLENYPMVEKIFRKSVEFCNDHDVWKLNVAHVLFMQENKYKEAIGFYEPIVKKHYDNILNVSAIVLANLCVSYIMTSQNEEAEELMRKIEKEEEQLSYDDPDKKMYHLCIVNLVIGTLYCAKGNYDFGISRVIKSLEPYNKKLGTDTWYYAKRCFLSLLENMSKHTIMLRDSVIQECVQFLEHCELHGRNIPAVIEQPLEEERMHVGKNTVTYESRQLKALIYEIIGWNI

SEQ ID NO: 12885 - protein, 1189 aa, Homo sapiens
MSAGGSARKSTGRSSYYYRLLRRPRLQRQRSRSRSRTRPARESPQERPGSRRSLPGSLSEKSPSMEPSAATPFRVTGFLSRRLKGSIKRTKSQPKLDRNHSFRHILPGFRSAAAAAADNERSHLMPRLKESRSHESLLSPSSAVEALDLSMEEEVVIKPVHSSILGQDYCFEVTTSSGSKCFSCRSAAERDKWMENLRRAVHPNKDNSRRVEHILKLWVIEAKDLPAKKKYLCELCLDDVLYARTTGKLKTDNVFWGEHFEFHNLPPLRTVTVHLYRETDKKKKKERNSYLGLVSLPAASVAGRQFVEKWYPVVTPNPKGGKGPGPMIRIKARYQTITILPMEMYKEFAEHITNHYLGLCAALEPILSAKTKEEMASALVHILQSTGKVKDFLTDLMMSEVDRCGDNEHLIFRENTLATKAIEEYLKLVGQKYLQDALGEFIKALYESDENCEVDPSKCSAADLPEHQGNLKMCCELAFCKIINSYCVFPRELKEVFASWRQECSSRGRPDISERLISASLFLRFLCPAIMSPSLFNLLQEYPDDRTARTLTLIAKVTQNLANFAKFGSKEEYMSFMNQFLEHEWTNMQRFLLEISNPETLSNTAGFEGYIDLGRELSSLHSLLWEAVSQLEQSIVSKLGPLPRILRDVHTALSTPGSGQLPGTNDLASTPGSGSSSISAGLQKMVIENDLSGLIDFTRLPSPTPENKDLFFVTRSSGVQPSPARSSSYSEANEPDLQMANGGKSLSMVDLQDARTLDGEAGSPAGPDVLPTDGQAAAAQLVAGWPARATPVNLAGLATVRRAGQTPTTPGTSEGAPGRPQLLAPLSFQNPVYQMAAGLPLSPRGLGDSGSEGHSSLSSHSNSEELAAAAKLGSFSTAAEELARRPGELARRQMSLTEKGGQPTVPRQNSAGPQRRIDQPPPPPPPPPPAPRGRTPPNLLSTLQYPRPSSGTLASASPDWVGPSTRLRQQSSSSKGDSPELKPRAVHKQGPSPVSPNALDRTAAWLLTMNAQLLEDEGLGPDPPHRDRLRSKDELSQAEKDLAVLQDKLRISTKKLEEYETLFKCQEETTQKLVLEYQARLEEGEERLRRQQEDKDIQMKGIISRLMSVEEELKKDHAEMQAAVDSKQKIIDAQEKRIASLDAANARLMSALTQLKERYSMQARNGISPTNPTKLQITENGEFRNSSNC

SEQ ID NO: 12886 - protein, 591 aa, Homo sapiens
MASKCSSERKSRTSLTLNQKLEMIKLSEEGMSKAEIGRRLGLLRQTVSQVVNAKEKFLKEVKSATPMNTRMIRKRNSLIADMEKVLVVWIEDQTSRNIPLSQSLIQNKALTLFNSMKAERGVEAAEEKFEASRGWFMRFKERSHFHNIKAQGEAASADVEAAASYPEALAKIIDEGGYTKQQIFNVDETAFYWKKMPSRTFIAREEKSVPGFKASKDRLTLLLGANAAGDFKLKPMLIYHSENPRALKNYTKSTLPVLYKWNSKARMTAHLFTAWFTEYFKPTVETYCSEKKIPFKILLLIDNAPSHPRALMEIYEEINVIFMPANTTSILQPMDQGVISTFKSYYLRNTFHKALAAMDSDVSDGSGQSKLKTFWKGFTILDAIKNIRDSWEEVKLSTLTGVWKKLIPTLIDDYEGFKTSVEEVSADVVEIAKELELEVEPEDVTELLQSHDKTLTDEELFLMDAQRKWFLEMESTPGEDAVNIVEMTTKDLEYYINLVDKAAAGFERIDSNFERSSTVGKMLSNSIACYREIFHERKSQLMRKASPMSYFRKLPQPPQPSAATTLTSQQPSTSRQDPPPAKRVRLTEGSD

SEQ ID NO: 12887 - protein, 1984 aa, Homo sapiens
MELTPGAQQQGINYQELTSGWQDVKSMMLVPEPTRKFPSGPLLTSVRFSNLSPESQQQDVKSLEFTVEPKLQSVKHVKLSSVSLQQTIKSVELAPGSLPQRVKYGEQTPRTNYQIMESSELIPRPGHQFAKYAEMIPQPKYQIPKSANLISIPIYHATESSEMAQGLAYKGIDTVEKSVGLTPKLTGRAKESLGMLLQPDLQVPKFVDLTPMVRDQGSKFLGLTPEKSYQILETMELLSQSRPRVKDVGELYMKPLQQTVEYEGITPELKHYFTEAMGLTAEARIQANEFFGMTPKPTSQATGFAERSPRLCPQNLECVEVISEKRLQGEESVVLIPKSLHHVPDSASGMTPGLGHRVPESVELTSKSGVQVEKTLQLTPKPQHHVGSPGIISGLGHQVPESVNLTCKQWLQMEESLEVPLKQTSQVIGHEESVELTSEARQHREVSMGLTKSKNQSMKSPGTTPGPLGRIVEFMRISPEPLDQVTESARTQLQVAQSEEVILIDVPKVVQSVKVTPGPPFQIVKSVTIPRPTPQMVEYIELTPKLQYVRPSEHHTGPCLQDVKSTKLITKPKHQILETVELTGFQIVKTMLIPGPSLQIVKSEELAPGPIPQVVEPIGVALESGIEAINCVDLLPRPHLQELIVPAELTPSPCTQVKSAELTSPQTSPFEEHTILTHKQGLQAVKSTVIKTEPPKVMETEDLNLGHVCQNRDCQKLTSEELQVGTDFSRFLQSSSTTLISSSVRTASELGGLWDSGIQEVSRALDIKNPGTDILQPEETYIDPTMIQSLTFPLALHNQSSDKTANIVENPCPEILGVDVISKETTKRKQMEELENSLQRHLPQSWRSRSRTFQAESGVQKGLIKSFPGRQHNVWESHAWRQRLPRKYLSTMLMLGNILGTTMERKLCSQTSLAERATADTCQSIQNLFGIPAELMEPSQSLPEKGPVTISQPSVVKNYIQRHTFYHGHKKRMALRIWTRGSTSSIIQQYSGTRVRIKKTNSTFNGISQEVIQHMPVSCAGGQLPVLVKSESSLSIFYDREDLVPMEESEDSQSDSQTRISESQHSLKPNYLSQAKTDFSEQFQLLEDLQLKIAAKLLRSQIPPDVPPPLASGLVLKYPICLQCGRCSGLNCHHKLQTTSGPYLLIYPQLHLVRTPEGHGEVRLHLGFRLRIGKRSQISKYRERDRPVIRRSPISPSQRKAKIYTQASKSPTSTIDLQSGPSQSPAPVQVYIRRGQRSRPDLVEKTKTRAPGHYEFTQVHNLPESDSESTQNEKRAKVRTKKTSDSKYPMKRITKRLRKHRKFYTNSRTTIESPSRELAAHLRRKRIGATQTSTASLKRQPKKPSQPKFMQLLFQSLKRAFQTAHRVIASVGRKPVDGTRPDNLWASKNYYPKQNARDYCLPSSIKRDKRSADKLTPAGSTIKQEDILWGGTVQCRSAQQPRRAYSFQPRPLRLPKPTDSQSGIAFQTASVGQPLRTVQKDSSSRSKKNFYRNETSSQESKNLSTPGTRVQARGRILPGSPVKRTWHRHLKDKLTHKEHNHPSFYRERTPRGPSERTRHNPSWRNHRSPSERSQRSSLERRHHSPSQRSHCSPSRKNHSSPSERSWRSPSQRNHCSPPERSCHSLSERGLHSPSQRSHRGPSQRRHHSPSERSHRSPSERSHRSSSERRHRSPSQRSHRGPSERSHCSPSERRHRSPSQRSHRGPSERRHHSPSKRSHRSPARRSHRSPSERSHHSPSERSHHSPSERRHHSPSERSHCSPSERSHCSPSERRHRSPSERRHHSPSEKSHHSPSERSHHSPSERRRHSPLERSRHSLLERSHRSPSERRSHRSFERSHRRISERSHSPSEKSHLSPLERSRCSPSERRGHSSSGKTCHSPSERSHRSPSGMRQGRTSERSHRSSCERTRHSPSEMRPGRPSGRNHCSPSERSRRSPLKEGLKYSFPGERPSHSLSRDFKNQTTLLGTTHKNPKAGQVWRPEATR

SEQ ID NO: 12888 - protein, 535 aa, Homo sapiens
MTPESRDTTDLSPGGTQEMEGIVIVKVEEEDEEDHFQKERNKVESSPQVLSRSTTMNERALLSSYLVAYRVAKEKMAHTAAEKIILPACMDMVRTIFDDKSADKLRTIPLSDNTISRRICTIAKHLEAMLITRLQSGIDFAIQLDESTDIASCPTLLVYVRYVWQDDFVEDLLCCLNLNSHITGLDLFTELENCLLGQYKLNWKHCKGISSDGTANMTGKHSRLTEKLLEATHNNAVWNHCFIHREALVSKEISPSLMDVLKNAVKTVNFIKGSSLNSRLLEIFCSEIGVNHTHLLFHTEVRWLSQGKVLSRVYELRNEIYIFLVEKQSHLANIFEDDIWVTKLAYLSDIFGILNELSLKMQGKNNDIFQYLEHILGFQKTLLLWQARLKSNRPSYYMFPTLLQHIEENIINEDCLKEIKLEILLHLTSLSQTFNYYFPEEKFESLKENIWMKDPFAFQNPESIIELNLEPEEENELLQLSSSFTLKNYYKILSLSAFWIKIKDDFPLLSRKSILLLLPFTTTYLCELGFSILTR

SEQ ID NO: 12889 - protein, 866 aa, Homo sapiens
MGNRGMEELIPLVNKLQDAFSSIGQSCHLDLPQIAVVGGQSAGKSSVLENFVGRDFLPRGSGIVTRRPLILQLIFSKTEHAEFLHCKSKKFTDFDEVRQEIEAETDRVTGTNKGISPVPINLRVYSPHVLNLTLIDLPGITKVPVGDQPPDIEYQIKDMILQFISRESSLILAVTPANMDLANSDALKLAKEVDPQGLRTIGVITKLDLMDEGTDARDVLENKLLPLRRGYIGVVNRSQKDIEGKKDIRAALAAERKFFLSHPAYRHMADRMGTPHLQKTLNQQLTNHIRESLPALRSKLQSQLLSLEKEVEEYKNFRPDDPTRKTKALLQMVQQFGVDFEKRIEGSGDQVDTLELSGGARINRIFHERFPFELVKMEFDEKDLRREISYAIKNIHGVRTGLFTPDMAFEAIVKKQIVKLKEPSLKCVDLVVSELATVIKKCAEKLSSYPRLREETERIVTTYIREREGRTKDQILLLIDIEQSYINTNHEDFIGFANAQQRSTQLNKKRAIPNQVIRRGWLTINNISLMKGGSKEYWFVLTAESLSWYKDEEEKEKKYMLPLDNLKIRDVEKGFMSNKHVFAIFNTEQRNVYKDLRQIELACDSQEDVDSWKASFLRAGVYPEKDQAENEDGAQENTFSMDPQLERQVETIRNLVDSYVAIINKSIRDLMPKTIMHLMINNTKAFIHHELLAYLYSSADQSSLMEESADQAQRRDDMLRMYHALKEALNIIGDISTSTVSTPVPPPVDDTWLQSASSHSPTPQRRPVSSIHPPGRPPAVRGPTPGPPLIPVPVGAAASFSAPPIPSRPGPQSVFANSDLFPAPPQIPSRPVRIPPGIPPGVPSRRPPAAPSRPTIIRPAEPSLLD

SEQ ID NO: 12890 - protein, 313 aa, Homo sapiens
MDSLNQTRVTEFVFLGLTDNRVLEMLFFMAFSAIYMLTLSGNILIIIATVFTPSLHTPMYFFLSNLSFIDICHSSVTVPKMLEGLLLERKTISFDNCITQLFFLHLFACAEIFLLIIMAYDRYVAICTPLHYPNVMNMRVCIQLVFALWLGGTVHSLGQTFLTIRLPYCGPNIIDSYFCDVPLVIKLACTDTYLTGILIVTNSGTISLSCFLAVVTSYMVILVSLRKHSAEGRRKALSTCSAHFMVVALFFGPCIFIYTRPDTSFSIDKVVSVFYTVVTPLLNPFIYTLRNEEVKSAMKQLRQRQVFFTKSYT

SEQ ID NO: 12891 - protein, 544 aa, Homo sapiens
MVGEGSIQSSRYKKESKSGLVKPGSEADFSSSSSTGSISAPEVHMSTAGSKRSSSSRNRGPHGRSNGASSHKPGSSPSSPREKDLLSMLCRNQLSPVNIHPSYAPSSPSSSNSGSYKGSDCSPIMRRSGRYMSCGENHGVRPPNPEQYLTPLQQKEVTVRHLKTKLKESERRLHERESEIVELKSQLARMREDWIEEECHRVEAQLALKEARKEIKQLKQVIETMRSSLADKDKGIQKYFVDINIQNKKLESLLQSMEMAHSGSLRDELCLDFPCDSPEKSLTLNPPLDTMADGLSLEEQVTGEGADRELLVGDSIANSTDLFDEIVTATTTESGDLELVHSTPGANVLELLPIVMGQEEGSVVVERAVQTDVVPYSPAISELIQSVLQKLQDPCPSSLASPDESEPDSMESFPESLSALVVDLTPRNPNSAILLSPVETPYANVDAEVHANRLMRELDFAACVEERLDGVIPLARGGVVRQYWSSSFLVDLLAVAAPVVPTVLWAFSTQRGGTDPVYNIGALLRGCCVVALHSLRRTAFRIKT

SEQ ID NO: 12892 - protein, 740 aa, Homo sapiens
MMQESATETISNSSMNQNGMSTLSSQLDAGSRDGRSSGDTSSEVSTVELLHLQQQQALQAARQLLLQQQTSGLKSPKSSDKQRPLQELLPETKLCICGHSSGDGHPHNTFAVPVSVAMMTPQVITPQQMQQILQQQVLSPQQLQALLQQQQAVMLQQQQLQEFYKKQQEQLHLQLLQQQQQQQQQQQQQQQQQQQQQQQQQQQQQQQQQQQQQQQQHPGKQAKEQQQQQQQQQQLAAQQLVFQQQLLQMQQLQQQQHLLSLQRQGLISIPPGQAALPVQSLPQAGLSPAEIQQLWKEVTGVHSMEDNGIKHGGLDLTTNNSSSTTSSNTSKASPPITHHSIVNGQSSVLSARRDSSSHEETGASHTLYGHGVCKWPGCESICEDFGQFLKHLNNEHALDDRSTAQCRVQMQVVQQLEIQLSKERERLQAMMTHLHMRPSEPKPSPKPLNLVSSVTMSKNMLETSPQSLPQTPTTPTAPVTPITQGPSVITPASVPNVGAIRRRHSDKYNIPMSSEIAPNYEFYKNADVRPPFTYATLIRQAIMESSDRQLTLNEIYSWFTRTFAYFRRNAATWKNAVRHNLSLHKCFVRVENVKGAVWTVDEVEYQKRRSQKITGSPTLVKNIPTSLGYGAALNASLQAALAESSLPLLSNPGLINNASSGLLQAVHEDLNGSLDHIDSNGNSSPGCSPQPHIHSIHVKEEPVIAEDEDCPMSLVTTANHSPELEDDREIEEEPLSEDLE

SEQ ID NO: 12893 - protein, 307 aa, Homo sapiens
MQAALTAFFVLLFSLLSLLGIAANGFIVLVLGREWLRYGRLLPLDMILISLGASRFCLQLVGTVHNFYYSAQKVEYSGGLGRQFFHLHWHFLNSATFWFCSWLSVLFCVKIANITHSTFLWLKWRFPGWVPWLLLGSVLISFIITLLFFWVNYPVYQEFLIRKFSGNMTYKWNTRIETYYFPSLKLVIWSIPFSVFLVSIMLLINSLRRHTQRMQHNGHSLQDPSTQAHTRALKSLISFLILYALSFLSLIIDAAKFISMQNDFYWPWQIAVYLCISVHPFILIFSNLKLRSVFSQLLLLARGFWVA

SEQ ID NO: 12894 - protein, 311 aa, Homo sapiens
MTKNQTWVTEFILLGFPLSLRIQMLLSGLFSLLYVFTLLGNGAILGLIWLDSRLHTPMYFFLSHLAIIDISYASNNVPKMLTNLGLNKRKTISFVPCTMQTFLYMAFAHTECLILVMMSYDRYMAICHPLQYSVIMRWGVCTVLAVTSWACGSLLALVHVVLILRLPFCGPHEINHFFCEILSVLKLACADTWLNQVVIFAASVFILVGPLCLVLVSYSRILAAILRIQSGEGRRKAFSTCSSHLCMVGLFFGSAIVMYMAPKSRHPEEQQKVLSLFYSLFNPMLNPLIYSLRNAEVKGALKRVLWKQRSK

SEQ ID NO: 12895 - protein, 1341 aa, Homo sapiens
MKHLYGLFHYNPMMLGLESLPDPTDTWEIIETIGKGTYGKVYKVTNKRDGSLAAVKILDPVSDMDEEIEAEYNILQFLPNHPNVVKFYGMFYKADHCVGGQLWLVLELCNGGSVTELVKGLLRCGQRLDEAMISYILYGALLGLQHLHNNRIIHRDVKGNNILLTTEGGVKLVDFGVSAQLTSTRLRRNTSVGTPFWMAPEVIACEQQYDSSYDARCDVWSLGITAIELGDGDPPLFDMHPVKTLFKIPRNPPPTLLHPEKWCEEFNHFISQCLIKDFERRPSVTHLLDHPFIKGVHGKVLFLQKQLAKVLQDQKHQNPVAKTRHERMHTRRPYHVEDAEKYCLEDDLVNLEVLDEDTIIHQLQKRYADLLIYTYVGDILIALNPFQNLSIYSPQFSRLYHGVKRASNPPHIFASADAAYQCMVTLSKDQCIVISGESGSGKTESAHLIVQHLTFLGKANNQTLREKILQVNSLVEAFGNSCTAINDNSSRFGKYLEMMFTPTGVVMGARISEYLLEKSRVIKQAAREKNFHIFYYIYAGLHHQKKLSDFRLPEEKPPRYIADETGRVMHDITSKESYRRQFEAIQHCFRIIGFTDKEVHSVYRILAGILNIGNIEFAAISSQHQTDKSEVPNAEALQNAASVLCISPEELQEALTSHCVVTRGETIIRANTVDRAADVRDAMSKALYGRLFSWIVNRINTLLQPDENICSAGGGMNVGILDIFGFENFQRNSFEQLCINIANEQIQYYFNQHVFALEQMEYQNEGIDAVPVEYEDNRPLLDMFLQKPLGLLALLDEESRFPQATDQTLVDKFEDNLRCKYFWRPKGVELCFGIQHYAGKVLYDASGVLEKNRDTLPADVVVVLRTSENKLLQQLFSIPLTKTGNLAQTRARITVASSSLPPHFSAGKAKVDTLEVIRHPEETTNMKRQTVASYFRYSLMDLLSKMVVGQPHFVRCIKPNDDREALQFSRERVLAQLRSTGILETVSIRRQGYSHRILFEEFVKRYYYLAFTAHQTPLASKESCVAILEKSRLDHWVLGKTKVFLKYYHVEQLNLLLREVIGRVVVLQAYTKGWLGARRYKRVREKREKGAIAIQSAWRGYDARRKFKKISNRRNESAAHNQAGDTSNQSSGPHSPVAAGTRGSAEVQDCSEPGDHKVLRGSVHRRSHSQAESNNGRTQTSSNSPAVTEKNGHSQAQSSPKGCDIFAGHANKHSVSGTDLLSSRICHPAPDQQGLSLWGAPQKPGSENGLAQKHRTPRRRCQQPKMLSSPEDTMYYNQLNGTLEYQGSKRKPRKLGQIKVLDGEDEYYKSLSPVDCIPEENNSAHPSFFSSSSKGDSFAQH

SEQ ID NO: 12896 - protein, 317 aa, Homo sapiens
MEIDNQTWVREFILLGLSSDWCTQISLFSLFLVTYLMTVLGNCLIVLLIRLDSRLHTPMYFFLTNLSLVDVSYATSVVPQLLAHFLAEHKAIPFQSCAAQLFFSLALGGIEFVLLAVMAYDRHVAVSDRLRYSAIMHGGLCARLAITSWVSGSINSLVQTAITFQLPMCTNKFIDHISCELLAVVRLACVDTSSNEAAIMVSSIVLLMTPFCLVLLSYIRIISTILKIQSREGRKKAFHTCASHLTVVALCYGTTIFTYIQPHSGPSVLQEKLISVFYAIVMPLLNPVIYSLRNKEVKGAWHKLLEKFSGLTSKLGT

SEQ ID NO: 12897 - protein, 1019 aa, Homo sapiens
MMAAAAAAAAGSSSSGGGGGGSGSSSSSSDTSSTGEEERMRRLFQTCDGDGDGYISRNDLLMVCRQLNMEESVAEIMNQLGADENGKISFQDFTRCRMQLVREIRKEEVDLSAKSDNSCTKKLRDRIASWPTSSDNSLGALSAARESWEYDSGARDLQSPDVQSQSALQKLLEYGGSSLHQQAALHKLLTQSPHIGNSVGGSYLELANTLHSAALASLKGDIVELNKRLQQTERERDLLEKKLAKAQCEQSHLMREHEDVQERTTLRYEERITELHSVIAELNKKIDRLQGTTIREEDEYSELRSELSQSQHEVNEDSRSMDQDQTSVSIPENQSTMVTADMDNCSDLNSELQRVLTGLENVVCGRKKSSCSLSVAEVDKHIEQLTTASEHCDLAIKTVEEIEGVLGRDLYPNLAEERSRWEKELAGLREENESLTAMLCSKEEELNRTKATMNAIREERDRLRRRVRELQTRLQSVQATGPSSPGRLTSTNRPINPSTGELSTSSSSNDIPIAKIAERVKLSKTRSESSSSDRPVLGSEISSIGVSSSVAEHLAHSLQDCSNIQEIFQTLYSHGSAISESKIREFEVETERLNSRIEHLKSQNDLLTITLEECKSNAERMSMLVGKYESNATALRLALQYSEQCIEAYELLLALAESEQSLILGQFRAAGVGSSPGDQSGDENITQMLKRAHDCRKTAENAAKALLMKLDGSCGGAFAVAGCSVQPWESLSSNSHTSTTSSTASSCDTEFTKEDEQRLKDYIQQLKNDRAAVKLTMLELESIHIDPLSYDVKPRGDSQRLDLENAVLMQELMAMKEEMAELKAQLYLLEKEKKALELKLSTREAQEQAYLVHIEHLKSEVEEQKEQRMRSLSSTSSGSKDKPGKECADAASPALSLAELRTTCSENELAAEFTNAIRREKKLKARVQELVSALERLTKSSEIRHQQSAEFVNDLKRANSNLVAAYEKAKKKHQNKLKKLESQMMAMVERHETQVRMLKQRIALLEEENSRPHTNETSL

SEQ ID NO: 12898 - protein, 1253 aa, Homo sapiens
MQFETLRQVCNSVLSHFHGVFSSPPNILQNELFGQTLNNARKRSPSVSRDQNRRYDQREEREEYSQYATSDTAMPRSPSDYADRRSQHEPQFYEDSDHLSYRDSNRRSHRHSKEYIVDDEDVESRDEYERQRREEEYQSRYRSDPNLARYPVKPQPYEEQMRIHAEVSRARHERRHSDVSLANADLEDSRISMLRMDRPSRQRSISERRAAMENQRSYSMERTREAQGPSSYAQRTTNHSPPTPRRSPLPIDRPDLRRTDSLRKQHHLDPSSAVRKTKREKMETMLRNDSLSSDQSESVRPPPPKPHKSKKGGKMRQISLSSSEEELASTPEYTSCDDVEIESESVSEKGDMDYNWLDHTSWHSSEASPMSLHPVTWQPSKDGDRLIGRILLNKRLKDGSVPRDSGAMLGLKVVGGKMTESGRLCAFITKVKKGSLADTVGHLRPGDEVLEWNGRLLQGATFEEVYNIILESKPEPQVELVVSRPIGDIPRIPDSTHAQLESSSSSFESQKMDRPSISVTSPMSPGMLRDVPQFLSGQLSIKLWFDKVGHQLIVTILGAKDLPSREDGRPRNPYVKIYFLPDRSDKNKRRTKTVKKTLEPKWNQTFIYSPVHRREFRERMLEITLWDQARVREEESEFLGEILIELETALLDDEPHWYKLQTHDVSSLPLPHPSPYMPRRQLHGESPTRRLQRSKRISDSEVSDYDCDDGIGVVSDYRHDGRDLQSSTLSVPEQVMSSNHCSPSGSPHRVDVIGRTRSWSPSVPPPQSRNVEQGLRGTRTMTGHYNTISRMDRHRVMDDHYSPDRDSHFLTLPRSRYSQTIDHHHRDGRDCEAADRQPYHRSRSTEQRPLLERTTTRSRSTERPDTNLMRSMPSLMTGRSAPPSPALSRSHPRTGSVQTSPSSTPVAGRRGRQLPQLPPKGTLDRNNGVKEIEPYEELDSTRRRYAGTMDIEERNRQMKINKYKQVAGSDPRLEQDYHSKYRSGWDPHRGADNVSTKSSDSDVSDISAVSRTSSASRFSSTSYMSVQSERPGGNKKISVFTSKMQSRQMGISGKNMTKSTSISGDMCSLEKNDGSQSDTAVGTLGTSGKKRRSSLGAKMVAIVGLSRKSRSASQLSQTEAGGKKLRSTVQRSTETGLAVEMRNWMTRQASRESTDGSMNSYSSEGNLIFPGVRLASDSQFSDFLDGLGPAQLVGRQTLATPAMGDIQVGMMDKKGQLEVEIIRARGLVVKPGSKTLPAPYVKVYLLDNGVCIA

SEQ ID NO: 12899 - protein, 194 aa, Homo sapiens
MASVTRAVFGELPSGGGTVEKFQLQSDLLRVDIISWGCTITALEVKDRQGRASDVVLGFAELEGEVAPVQGTAFDLRKPVELGKHLQDFHLNGFDHNFCLKGSKEKHFCARVHHAASGRVLEVYTTQPGVQFYTGNFLDGTLKGKNGAVYPKHSGFCLETQNWPDAVNQPRFPPVLLRPGEEYDHTTWFKFSVA

SEQ ID NO: 12900 - protein, 518 aa, Homo sapiens
MGFHLITQLKGMSVVLVLLPTLLLVMLTGAQRACPKNCRCDGKIVYCESHAFADIPENISGGSQGLSLRFNSIQKLKSNQFAGLNQLIWLYLDHNYISSVDEDAFQGIRRLKELILSSNKITYLHNKTFHPVPNLRNLDLSYNKLQTLQSEQFKGLRKLIILHLRSNSLKTVPIRVFQDCRNLDFLDLGYNRLRSLSRNAFAGLLKLKELHLEHNQFSKINFAHFPRLFNLRSIYLQWNRIRSISQGLTWTWSSLHNLDLSGNDIQGIEPGTFKCLPNLQKLNLDSNKLTNISQETVNAWISLISITLSGNMWECSRSICPLFYWLKNFKGNKESTMICAGPKHIQGEKVSDAVETYNICSEVQVVNTERSHLVPQTPQKPLIIPRPTIFKPDVTQSTFETPSPSPGFQIPGAEQEYEHVSFHKIIAGSVALFLSVAMILLVIYVSWKRYPASMKQLQQHSLMKRRRKKARESERQMNSPLQEYYVDYKPTNSETMDISVNGSGPCTYTISGSRECEV

SEQ ID NO: 12901 - protein, 1378 aa, Homo sapiens
MSLERELRQLSKAKAKAQRAGQRREEAALCHQLGELLAGHGRYAEALEQHWQELQLRERADDPLGCAVAHRKIGERLAEMEDYPAALQHQHQYLELAHSLRNHTELQRAWATIGRTHLDIYDHCQSRDALLQAQAAFEKSLAIVDEELEGTLAQGELNEMRTRLYLNLGLTFESLQQTALCNDYFRKSIFLAEQNHLYEDLFRARYNLGTIHWRAGQHSQAMRCLEGARECAHTMRKRFMESECCVVIAQVLQDLGDFLAAKRALKKAYRLGSQKPVQRAAICQNLQHVLAVVRLQQQLEEAEGRDPQGAMVICEQLGDLFSKAGDFPRAAEAYQKQLRFAELLDRPGAERAIIHVSLATTLGDMKDHHGAVRHYEEELRLRSGNVLEEAKTWLNIALSREEAGDAYELLAPCFQKALSCAQQAQRPQLQRQVLQHLHTVQLRLQPQEAPETETRLRELSVAEDEDEEEEAEEAAATAESEALEAGEVELSEGEDDTDGLTPQLEEDEELQGHLGRRKGSKWNRRNDMGETLLHRACIEGQLRRVQDLVRQGHPLNPRDYCGWTPLHEACNYGHLEIVRFLLDHGAAVDDPGGQGCEGITPLHDALNCGHFEVAELLLERGASVTLRTRKGLSPLETLQQWVKLYRRDLDLETRQKARAMEMLLQAAASGQDPHSSQAFHTPSSLLFDPETSPPLSPCPEPPSNSTRLPEASQAHVRVSPGQAAPAMARPRRSRHGPASSSSSSEGEDSAGPARPSQKRPRCSATAQRVAAWTPGPASNREAATASTSRAAYQAAIRGVGSAQSRLGPGPPRGHSKALAPQAALIPEEECLAGDWLELDMPLTRSRRPRPRGTGDNRRPSSTSGSDSEESRPRARAKQVRLTCMQSCSAPVNAGPSSLASEPPGSPSTPRVSEPSGDSSAAGQPLGPAPPPPIRVRVQVQDHLFLIPVPHSSDTHSVAWLAEQAAQRYYQTCGLLPRLTLRKEGALLAPQDLIPDVLQSNDEVLAEVTSWDLPPLTDRYRRACQSLGQGEHQQVLQAVELQGLGLSFSACSLALDQAQLTPLLRALKLHTALRELRLAGNRLGDKCVAELVAALGTMPSLALLDLSSNHLGPEGLRQLAMGLPGQATLQSLEELDLSMNPLGDGCGQSLASLLHACPLLSTLRLQACGFGPSFFLSHQTALGSAFQDAEHLKTLSLSYNALGAPALARTLQSLPAGTLLHLELSSVAAGKGDSDLMEPVFRYLAKEGCALAHLTLSANHLGDKAVRDLCRCLSLCPSLISLDLSANPEISCASLEELLSTLQKRPQGLSFLGLSGCAVQGPLGLGLWDKIAAQLRELQLCSRRLCAEDRDALRQLQPSRPGPGECTLDHGSKLFFRRL

SEQ ID NO: 12902 - protein, 639 aa, Homo sapiens
MSLGQSACLFLSIARSRSVMTGEQMAAFHPSSTPNPLERPIKMGWLKKQRSIVKNWQQRYFVLRAQQLYYYKDEEDTKPQGCMYLPGCTIKEIATNPEEAGKFVFEIIPASWDQNRMGQDSYVLMASSQAEMEEWVKFLRRVAGTPCGAVFGQRLDETVAYEQKFGPHLVPILVEKCAEFILEHGRNEEGIFRLPGQDNLVKQLRDAFDAGERPSFDRDTDVHTVASLLKLYLRDLPEPVVPWSQYEGFLLCGQLTNADEAKAQQELMKQLSILPRDNYSLLSYICRFLHEIQLNCAVNKMSVDNLATVIGVNLIRSKVEDPAVIMRGTPQIQRVMTMMIRDHEVLFPKSKDIPLSPPAQKNDPKKAPVARSSVGWDATEDLRISRTDSFSSMTSDSDTTSPTGQQPSDAFPEDSSKVPREKPGDWKMQSRKRTQTLPNRKCFLTSAFQGANSSKMEIFKNEFWSPSSEAKAGEGHRRTMSQDLRQLSDSQRTSTYDNVPSLPGSPGEEASALSSQACDSKGDTLASPNSETGPGKKNSGEEEIDSLQRMVQELRKEIETQKQMYEEQIKNLEKENYDVWAKVVRLNEELEKEKKKSAALEISLRNMERSREDVEKRNKALEEEVKEFVKSMKEPKTEA

SEQ ID NO: 12903 - protein, 739 aa, Homo sapiens
MGIKVQRPRCFFDIAINNQPAGRVVFELFSDVCPKTCENFRCLCTGEKGTGKSTQKPLHYKSCLFHRVVKDFMVQGGDFSEDESFAVKHNKEFLLSMANRGKDTNGSQFFITTKPTPHLDGHHVVFGQVISGQEVVREIENQKTDAASKPFAEVRILSCGELIPKSKVKKEEKKRHKSSSSSSSSSSDSDSSSDSQSSSDSSDSESATEEKSKKRKKKHRKNSRKHKKEKKKRKKSKKSASSESEAENLEAQPQSTVRPEEIPPIPENRFLMRKSPPKADEKERKNRERERERECNPPNSQPASYQRRLLVTRSGRKIKGRGPRRYRTPSRSRSRDRFRRSETPPHWRQEMQRAQRMRVSSGERWIKGDKSELNEIKENQRSPVRVKERKITDHRNVSESPNRKNEKEKKVKDHKSNSKERDIRRNSEKDDKYKNKVKKRAKSKSRSKSKEKSKSKERDSKHNRNEEKRMRSRSKGRDHENVKEKEKQSDSKGKDQERSRSKEKSKQLESKSNEHDHSKSKEKDRRAQSRSRECDITKGKHSYNSRTRERSRSRDRSRRVRSRTHDRDRSRSKEYHRYREQEYRRRGRSRSRERRTPPGRSRSKDRRRRRRDSRSSEREESQSRNKDKYRNQESKSSHRKENSESEKRMYSKSRDHNSSNNSREKKADRDQSPFSKIKQSSQDNELKSSMLKNKEDEKIRSSVEKENQKSKGQENDHVHEKNKKFDHESSPGTDEDKSG

SEQ ID NO: 12904 - protein, 177 aa, Homo sapiens
MAASAFAGAVRAASGILRPLNILASSTYRNCVKNASLISALSTGRFSHIQTPVVSSTPRLTTSERNLTCGHTSVILNRMAPVLPSVLKLPVRSLTYFSARKGKRKTVKAVIDRFLRLHCGLWVRRKAGYKKKLWKKTPARKKRLREFVFCNKTQSKLLDKMTTSFWKRRNWHSPICR

SEQ ID NO: 12905 - protein, 730 aa, Homo sapiens
MMLTQAPSSVVRSRNSRNHTVNSGGSCLSASTVAIPAINDSSAAMSACSTISAQPASSMDTQMHSPKKQERVNKRVIWGIEVAEELHWKGWELGKETTRNLVLKNRSLKLQKMKYRPPKTKFFFTVIPQPIFLSPGITLTLPIVFRPLEAKEYMDQLWFEKAEGMFCVGLRATLPCHRLICRPPSLQLPMCAVGDTTEAFFCLDNVGDLPTFFTWEFSSPFQMLPATGLLEPGQASQIKVTFQPLTAVIYEVQATCWYGAGSRQRSSIQLQAVAKCAQLLVSIKHKCPEDQDAEGFQKLLYFGSVAVGCTSERQIRLHNPSAVNAPFRIEISPDELAEDQAFSCPTAHGIVLPGEKKCVSVFFHPKTLDTRTVDYCSIMPSGCASKTLLKVVGFCRGPAVSLQHYCVNFSWVNLGERSEQPLWIENQSDCTAHFQFAIDCLESVFTIRPAFGTLVGKARMTLHCAFQPTHPIICFRRVACLIHHQDPLFLDLMGTCHSDSTKPAILKPQHLTWYRTHLARGLTLYPPDILDAMLKEKKLAQDQNGALMIPIQDLEDMPAPQYPYIPPMTEFFFDGTSDITIFPPPISVEPVEVDFGACPGPEAPNPVPLCLMNHTKGKIMVVWTRRSDCPFWVTPESCDVPPLKSMAMRLHFQPPHPNCLYTVELEAFAIYKVCARNEREECGVSARSLSGLVGWQEVTEGSFRLHPLRARLSLGWTVTPMSLSPPKLLA

SEQ ID NO: 12906 - protein, 6669 aa, Homo sapiens
MADDEDYEEVVEYYTEEVVYEEVPGETITKIYETTTTRTSDYEQSETSKPALAQPALAQPASAKPVERRKVIRKKVDPSKFMTPYIAHSQKMQDLFSPNKYKEKFEKTKGQPYASTTDTPELRRIKKVQDQLSEVKYRMDGDVAKTICHVDEKAKDIEHAKKVSQQVSKVLYKQNWEDTKDKYLLPPDAPELVQAVKNTAMFSKKLYTEDWEADKSLFYPYNDSPELRRVAQAQKALSDVAYKKGLAEQQAQFTPLADPPDIEFAKKVTNQVSKQKYKEDYENKIKGKWSETPCFEVANARMNADNISTRKYQEDFENMKDQIYFMQTETPEYKMNKKAGVAASKVKYKEDYEKNKGKADYNVLPASENPQLRQLKAAGDALSDKLYKENYEKTKAKSINYCETPKFKLDTVLQNFSSDKKYKDSYLKDILGHYVGSFEDPYHSHCMKVTAQNSDKNYKAEYEEDRGKGFFPQTITQEYEAIKKLDQCKDHTYKVHPDKTKFTQVTDSPVLLQAQVNSKQLSDLNYKAKHESEKFKCHIPPDTPAFIQHKVNAYNLSDNLYKQDWEKSKAKKFDIKVDAIPLLAAKANTKNTSDVMYKKDYEKNKGKMIGVLSINDDPKMLHSLKVAKNQSDRLYKENYEKTKAKSMNYCETPKYQLDTQLKNFSEARYKDLYVKDVLGHYVGSMEDPYHTHCMKVAAQNSDKSYKAEYEEDKGKCYFPQTITQEYEAIKKLDQCKDHTYKVHPDKTKFTAVTDSPVLLQAQLNTKQLSDLNYKAKHEGEKFKCHIPADAPQFIQHRVNAYNLSDNVYKQDWEKSKAKKFDIKVDAIPLLAAKANTKNTSDVMYKKDYEKSKGKMIGALSINDDPKMLHSLKTAKNQSDREYRKDYEKSKTIYTAPLDMLQVTQAKKSQAIASDVDYKHILHSYSYPPDSINVDLAKKAYALQSDVEYKADYNSWMKGCGWVPFGSLEMEKAKRASDILNEKKYRQHPDTLKFTSIEDAPITVQSKINQAQRSDIAYKAKGEEIIHKYNLPPDLPQFIQAKVNAYNISENMYKADLKDLSKKGYDLRTDAIPIRAAKAARQAASDVQYKKDYEKAKGKMVGFQSLQDDPKLVHYMNVAKIQSDREYKKDYEKTKSKYNTPHDMFNVVAAKKAQDVVSNVNYKHSLHHYTYLPDAMDLELSKNMMQIQSDNVYKEDYNNWMKGIGWIPIGSLDVEKVKKAGDALNEKKYRQHPDTLKFTSIVDSPVMVQAKQNTKQVSDILYKAKGEDVKHKYTMSPDLPQFLQAKCNAYNISDVCYKRDWYDLIAKGNNVLGDAIPITAAKASRNIASDYKYKEAYEKSKGKHVGFRSLQDDPKLVHYMNVAKLQSDREYKKNYENTKTSYHTPGDMVSITAAKMAQDVATNVNYKQPLHHYTYLPDAMSLEHTRNVNQIQSDNVYKDEYNSFLKGIGWIPIGSLEVEKVKKAGDALNERKYRQHPDTVKFTSVPDSMGMVLAQHNTKQLSDLNYKVEGEKLKHKYTIDPELPQFIQAKVNALNMSDAHYKADWKKTIAKGYDLRPDAIPIVAAKSSRNIASDCKYKEAYEKAKGKQVGFLSLQDDPKLVHYMNVAKIQSDREYKKGYEASKTKYHTPLDMVSVTAAKKSQEVATNANYRQSYHHYTLLPDALNVEHSRNAMQIQSDNLYKSDFTNWMKGIGWVPIESLEVEKAKKAGEILSEKKYRQHPEKLKFTYAMDTMEQALNKSNKLNMDKRLYTEKWNKDKTTIHVMPDTPDILLSRVNQITMSDKLYKAGWEEEKKKGYDLRPDAIAIKAARASRDIASDYKYKKAYEQAKGKHIGFRSLEDDPKLVHFMQVAKMQSDREYKKGYEKSKTSFHTPVDMLSVVAAKKSQEVATNANYRNVIHTYNMLPDAMSFELAKNMMQIQSDNQYKADYADFMKGIGWLPLGSLEAEKNKKAMEIISEKKYRQHPDTLKYSTLMDSMNMVLAQNNAKIMNEHLYKQAWEADKTKVHIMPDIPQIILAKANAINMSDKLYKLSLEESKKKGYDLRPDAIPIKAAKASRDIASDYKYKYNYEKGKGKMVGFRSLEDDPKLVHSMQVAKMQSDREYKKNYENTKTSYHTPADMLSVTAAKDAQANITNTNYKHLIHKYILLPDAMNIELTRNMNRIQSDNEYKQDYNEWYKGLGWSPAGSLEVEKAKKATEYASDQKYRQHPSNFQFKKLTDSMDMVLAKQNAHTMNKHLYTIDWNKDKTKIHVMPDTPDILQAKQNQTLYSQKLYKLGWEEALKKGYDLPVDAISVQLAKASRDIASDYKYKQGYRKQLGHHVGFRSLQDDPKLVLSMNVAKMQSEREYKKDFEKWKTKFSSPVDMLGVVLAKKCQELVSDVDYKNYLHQWTCLPDQNDVVQAKKVYELQSENLYKSDLEWLRGIGWSPLGSLEAEKNKRASEIISEKKYRQPPDRNKFTSIPDAMDIVLAKTNAKNRSDRLYREAWDKDKTQIHIMPDTPDIVLAKANLINTSDKLYRMGYEELKRKGYDLPVDAIPIKAAKASREIASEYKYKEGFRKQLGHHIGARNIEDDPKMMWSMHVAKIQSDREYKKDFEKWKTKFSSPVDMLGVVLAKKCQTLVSDVDYKNYLHQWTCLPDQSDVIHARQAYDLQSDNLYKSDLQWLKGIGWMTSGSLEDEKNKRATQILSDHVYRQHPDQFKFSSLMDSIPMVLAKNNAITMNHRLYTEAWDKDKTTVHIMPDTPEVLLAKQNKVNYSEKLYKLGLEEAKRKGYDMRVDAIPIKAAKASRDIASEFKYKEGYRKQLGHHIGARAIRDDPKMMWSMHVAKIQSDREYKKDFEKWKTKFSSPVDMLGVVLAKKCQTLVSDVDYKNYLHQWTCLPDQSDVIHARQAYDLQSDNMYKSDLQWMRGIGWVSIGSLDVEKCKRATEILSDKIYRQPPDRFKFTSVTDSLEQVLAKNNALNMNKRLYTEAWDKDKTQIHIMPDTPEIMLARQNKINYSETLYKLANEEAKKKGYDLRSDAIPIVAAKASRDVISDYKYKDGYRKQLGHHIGARNIEDDPKMMWSMHVAKIQSDREYKKDFEKWKTKFSSPVDMLGVVLAKKCQTLVSDVDYKNYLHEWTCLPDQNDVIHARQAYDLQSDNIYKSDLQWLRGIGWVPIGSMDVVKCKRAAEILSDNIYRQPPDKLKFTSVTDSLEQVLAKNNALNMNKRLYTEAWDKDKTQVHIMPDTPEIMLARQNKINYSESLYRQAMEEAKKEGYDLRSDAIPIVAAKASRDIASDYKYKEAYRKQLGHHIGARAVHDDPKIMWSLHIAKVQSDREYKKDFEKYKTRYSSPVDMLGIVLAKKCQTLVSDVDYKHPLHEWICLPDQNDIIHARKAYDLQSDNLYKSDLEWMKGIGWVPIDSLEVVRAKRAGELLSDTIYRQRPETLKFTSITDTPEQVLAKNNALNMNKRLYTEAWDNDKKTIHVMPDTPEIMLAKLNRINYSDKLYKLALEESKKEGYDLRLDAIPIQAAKASRDIASDYKYKEGYRKQLGHHIGARNIKDDPKMMWSIHVAKIQSDREYKKEFEKWKTKFSSPVDMLGVVLAKKCQILVSDIDYKHPLHEWTCLPDQNDVIQARKAYDLQSDAIYKSDLEWLRGIGWVPIGSVEVEKVKRAGEILSDRKYRQPADQLKFTCITDTPEIVLAKNNALTMSKHLYTEAWDADKTSIHVMPDTPDILLAKSNSANISQKLYTKGWDESKMKDYDLRADAISIKSAKASRDIASDYKYKEAYEKQKGHHIGAQSIEDDPKIMCAIHAGKIQSEREYKKEFQKWKTKFSSPVDMLSILLAKKCQTLVTDIDYRNYLHEWTCMPDQNDIIQAKKAYDLQSDALYKADLEWLRGIGWMPQGSPEVLRVKNAQNIFCDSVYRTPVVNLKYTSIVDTPEVVLAKSNAENISIPKYREVWDKDKTSIHIMPDTPEINLARANALNVSNKLYREGWDEMKAGCDVRLDAIPIQAAKASREIASDYKYKLDHEKQKGHYVGTLTARDDNKIRWALIADKLQNEREYRLDWAKWKAKIQSPVDMLSILHSKNSQALVSDMDYRNYLHQWTCMPDQNDVIQAKKAYELQSDNVYKADLEWLRGIGWMPNDSVSVNHAKHAADIFSEKKYRTKIETLNFTPVDDRVDYVTAKQSGEILDDIKYRKDWNATKSKYTLTETPLLHTAQEAARILDQYLYKEGWERQKATGYILPPDAVPFVHAHHCNDVQSELKYKAEHVKQKGHYVGVPTMRDDPKLVWFEHAGQIQNERLYKEDYHKTKAKINIPADMVSVLAAKQGQTLVSDIDYRNYLHQWMCHPDQNDVIQARKAYDLQSDNVYRADLEWLRGIGWIPLDSVDHVRVTKNQEMMSQIKYKKNALENYPNFRSVVDPPEIVLAKINSVNQSDVKYKETFNKAKGKYTFSPDTPHISHSKDMGKLYSTILYKGAWEGTKAYGYTLDERYIPIVGAKHADLVNSELKYKETYEKQKGHYLAGKVIGEFPGVVHCLDFQKMRSALNYRKHYEDTKANVHIPNDMMNHVLAKRCQYILSDLEYRHYFHQWTSLLEEPNVIRVRNAQEILSDNVYKDDLNWLKGIGCYVWDTPQILHAKKSYDLQSQLQYTAAGKENLQNYNLVTDTPLYVTAVQSGINASEVKYKENYHQIKDKYTTVLETVDYDRTRNLKNLYSSNLYKEAWDRVKATSYILPSSTLSLTHAKNQKHLASHIKYREEYEKFKALYTLPRSVDDDPNTARCLRVGKLNIDRLYRSVYEKNKMKIHIVPDMVEMVTAKDSQKKVSEIDYRLRLHEWICHPDLQVNDHVRKVTDQISDIVYKDDLNWLKGIGCYVWDTPEILHAKHAYDLRDDIKYKAHMLKTRNDYKLVTDTPVYVQAVKSGKQLSDAVYHYDYVHSVRGKVAPTTKTVDLDRALHAYKLQSSNLYKTSLRTLPTGYRLPGDTPHFKHIKDTRYMSSYFKYKEAYEHTKAYGYTLGPKDVPFVHVRRVNNVTSERLYRELYHKLKDKIHTTPDTPEIRQVKKTQEAVSELIYKSDFFKMQGHMISLPYTPQVIHCRYVGDITSDIKYKEDLQVLKGFGCFLYDTPDMVRSRHLRKLWSNYLYTDKARKMRDKYKVVLDTPEYRKVQELKTHLSELVYRAAGKKQKSIFTSVPDTPDLLRAKRGQKLQSQYLYVELATKERPHHHAGNQTTALKHAKDVKDMVSEKKYKIQYEKMKDKYTPVPDTPILIRAKRAYWNASDLRYKETFQKTKGKYHTVKDALDIVYHRKVTDDISKIKYKENYMSQLGIWRSIPDRPEHFHHRAVTDTVSDVKYKEDLTWLKGIGCYAYDTPDFTLAEKNKTLYSKYKYKEVFERTKSDFKYVADSPINRHFKYATQLMNEKKYRADYEQRKDKYHLVVDEPRHLLAKTAGDQISQIKYRKNYEKSKDKFTSIVDTPEHLRTTKVNKQISDILYKLEYNKAKPRGYTTIHDTPMLLHVRKVKDEVSDLKYKEVYQRNKSNCTIEPDAVHIKAAKDAYKVNTNLDYKKQYEANKAHWKWTPDRPDFLQAAKSSLQQSDFEYKLDREFLKGCKLSVTDDKNTVLALRNTLIESDLKYKEKHVKERGTCHAVPDTPQILLAKTVSNLVSENKYKDHVKKHLAQGSYTTLPETRDTVHVKEVTKHVSDTNYKKKFVKEKGKSNYSIMLEPPEVKHAMEVAKKQSDVAYRKDAKENLHYTTVADRPDIKKATQAAKQASEVEYRAKHRKEGSHGLSMLGRPDIEMAKKAAKLSSQVKYRENFDKEKGKTPKYNPKDSQLYKVMKDANNLASEVKYKADLKKLHKPVTDMKESLIMNHVLNTSQLASSYQYKKKYEKSKGHYHTIPDNLEQLHLKEATELQSIVKYKEKYEKERGKPMLDFETPTYITAKESQQMQSGKEYRKDYEESIKGRNLTGLEVTPALLHVKYATKIASEKEYRKDLEESIRGKGLTEMEDTPDMLRAKNATQILNEKEYKRDLELEVKGRGLNAMANETPDFMRARNATDIASQIKYKQSAEMEKANFTSVVDTPEIIHAQQVKNLSSQKKYKEDAEKSMSYYETVLDTPEIQRVRENQKNFSLLQYQCDLKNSKGKITVVQDTPEILRVKENQKNFSSVLYKEDVSPGTAIGKTPEMMRVKQTQDHISSVKYKEAIGQGTPIPDLPEVKRVKETQKHISSVMYKENLGTGIPTTVTPEIERVKRNQENFSSVLYKENLGKGIPTPITPEMERVKRNQENFSSVLYKENMGKGTPLAVTPEMERVKHNQENISSVLYKENVGKATATPVTPEMQRVKRNQENISSVLYKENLGKATPTPFTPEMERVKRNQENFSSVLYKENMRKATPTPVTPEMERAKRNQENISSVLYSDSFRKQIQGKAAYVLDTPEMRRVRETQRHISTVKYHEDFEKHKGCFTPVVTDPITERVKKNMQDFSDINYRGIQRKVVEMEQKRNDQDQETITGLRVWRTNPGSVFDYDPAEDNIQSRSLHMINVQAQRRSREQSRSASALSISGGEEKSEHSEAPDHHLSTYSDGGVFAVSTAYKHAKTTELPQQRSSSVATQQTTVSSIPSHPSTAGKIFRAMYDYMAADADEVSFKDGDAIINVQAIDEGWMYGTVQRTGRTGMLPANYVEAI

SEQ ID NO: 12907 - protein, 501 aa, Homo sapiens
MSSEQDKSASKEKSKKPVRFLPQLSMEKLASKEKFKAPARALPQLSMVSTKPHWQQAAPSFHLSVKQDDESPEPFSVKNEQSHAEYMERFGKKGKLPHQVDDSYVGPSTSKSKGKSPHKERENFRSTLVNVIMQQDADLDSAVPDGSTIPKPTASAIEKDILRYYYYIHHGIDTDHVAPMEDSWLEHVLDLVPQHLKVFTDSIVTLSDEMREDYLLSVRKSIVDFVLKDPREKGDDKKTDELPAHRAEMEILPKPWRKSFLAASSYIRDHLNAMNPTMLAVLDLWHTNFKKLRLVDIKEFHNCQDALELSSFQNIIMRHMDSAKETLLKMWFPEVQNIYYQGNKKKQLPTGDSSAKLESFFNCAAALMTLQLQDLTLVSMQDFTDLIAQPPDSVRAFEHPGFIMRLILDNDTIKFEPELSDYIDIFLNVYDVMIKAVSFVPRVETKLYSKWRNKAKPGHFYFSHIQRSVTFQHSEVSSPQNSHFKIVSPFSVLGFTWRCQL

SEQ ID NO: 12908 - protein, 538 aa, Homo sapiens
MVQERKIPAHRVVLAAASHFFNLMFTTNMLESKSFEVELKDAEPDIIEQLVEFAYTARISVNSNNVQSLLDAANQYQIEPVKKMCVDFLKEQVDASNCLGISVLAECLDCPELKATADDFIHQHFTEVYKTDEFLQLDVKRVTHLLNQDTLTVRAEDQVYDAAVRWLKYDEPNRQPFMVDILAKVRFPLISKNFLSKTVQAEPLIQDNPECLKMVISGMRYHLLSPEDREELVDGTRPRRKKHDYRIALFGGSQPQSCRYFNPKDYSWTDIRCPFEKRRDAACVFWDNVVYILGGSQLFPIKRMDCYNVVKDSWYSKLGPPTPRDSLAACAAEGKIYTSGGSEVGNSALYLFECYDTRTESWHTKPSMLTQRCSHGMVEANGLIYVCGGSLGNNVSGRVLNSCEVYDPATETWTELCPMIEARKNHGLVFVKDKIFAVGGQNGLGGLDNVEYYDIKLNEWKMVSPMPWKGVTVKCAAVGSIVYVLAGFQGVGRLGHILEYNTETDKWVANSKVRAFPVTSCLICVVDTCGANEETLET

SEQ ID NO: 12909 - protein, 357 aa, Homo sapiens
MMGRRRAFAVDGRDGAGEGLARGCIVPGVTSTYRRIPDAAHGCSSWERGDKFRGVGREALFLKLASRDSGVEMAVGDSPLAALPGLSQDSLDFESSGSSEPPAQVGRLLASQKLGEVLERSRRLPTAPTSLSGQHRSLRLASKPEREVPLGAGQQESMEADTDLEAGLEEEAVGGLGPGAWACLPGQGLRYLEHLCLVLEQMARLQQLYLQLRIQRPPGDPGEEESTRAPLPSPLHTPGNRGQGPWELLSQTEHTGAKAASPPKVEVPSANPPRLPETPVEPTYHLPSSQGHKVKVLLNRICRRSHHHPEPPAPPDGSDPRIESRDLPERPQCRPHRKTFMPSLVVKKQRAKNLSVG

SEQ ID NO: 12910 - protein, 949 aa, Homo sapiens
MAGIFYFALFSCLFGICDAVTGSRVYPANEVTLLDSRSVQGELGWIASPLEGGWEEVSIMDEKNTPIRTYQVCNVMEPSQNNWLRTDWITREGAQRVYIEIKFTLRDCNSLPGVMGTCKETFNLYYYESDNDKERFIRENQFVKIDTIAADESFTQVDIGDRIMKLNTEIRDVGPLSKKGFYLAFQDVGACIALVSVRVFYKKCPLTVRNLAQFPDTITGADTSSLVEVRGSCVNNSEEKDVPKMYCGADGEWLVPIGNCLCNAGHEERSGECQACKIGYYKALSTDATCAKCPPHSYSVWEGATSCTCDRGFFRADNDAASMPCTRPPSAPLNLISNVNETSVNLEWSSPQNTGGRQDISYNVVCKKCGAGDPSKCRPCGSGVHYTPQQNGLKTTKVSITDLLAHTNYTFEIWAVNGVSKYNPNPDQSVSVTVTTNQAAPSSIALVQAKEVTRYSVALAWLEPDRPNGVILEYEVKYYEKDQNERSYRIVRTAARNTDIKGLNPLTSYVFHVRARTAAGYGDFSEPLEVTTNTVPSRIIGDGANSTVLLVSVSGSVVLVVILIAAFVISRRRSKYSKAKQEADEEKHLNQGVRTYVDPFTYEDPNQAVREFAKEIDASCIKIEKVIGVGEFGEVCSGRLKVPGKREICVAIKTLKAGYTDKQRRDFLSEASIMGQFDHPNIIHLEGVVTKCKPVMIITEYMENGSLDAFLRKNDGRFTVIQLVGMLRGIGSGMKYLSDMSYVHRDLAARNILVNSNLVCKVSDFGMSRVLEDDPEAAYTTRGGKIPIRWTAPEAIAYRKFTSASDVWSYGIVMWEVMSYGERPYWDMSNQDVIKAIEEGYRLPPPMDCPIALHQLMLDCWQKERSDRPKFGQIVNMLDKLIRNPNSLKRTGTESSRPNTALLDPSSPEFSAVVSVGDWLQAIKMDRYKDNFTAAGYTTLEAVVHVNQE

SEQ ID NO: 12911 - protein, 296 aa, Homo sapiens
MRHEELLTKTFQGPAVVCGTPTSHVYMFKNGSGDSGDSSEEESHRVVLRPRGKERHKSGVHQPPQAGAGDVVLLQRELAQEDSLNKLALQYGCKVADIKKVNNFIREQDLYALKSVKIPVRNHGILMETHKELKPLLSPSSETTVTVELPEADRAGAGTGAQAGQLMGFFKGIDQDIERAVQSEIFLHESYCMDTSHQPLLPAPPKTPMDGADCGIQWWNAVFIMLLIGIVLPVFYLVYFKIQASGETPNSLNTTVIPNGSMAMGTVPGQAPRLAVAVPAVTSADSQFSQTTQAGS

SEQ ID NO: 12912 - protein, 2088 aa, Homo sapiens
MLCCLLVRASNLPSAKKDRRSDPVASLTFRGVKKRTKVIKNSVNPVWNEGFEWDLKGIPLDQGSELHVVVKDHETMGRNRFLGEAKVPLREVLATPSLSASFNAPLLDTKKQPTGASLVLQVSYTPLPGAVPLFPPPTPLEPSPTLPDLDVVADTGGEEDTEDQGLTGDEAEPFLDQSGGPGAPTTPRKLPSRPPPHYPGIKRKRSAPTSRKLLSDKPQDFQIRVQVIEGRQLPGVNIKPVVKVTAAGQTKRTRIHKGNSPLFNETLFFNLFDSPGELFDEPIFITVVDSRSLRTDALLGEFRMDVGTIYREPRHAYLRKWLLLSDPDDFSAGARGYLKTSLCVLGPGDEAPLERKDPSEDKEDIESNLLRPTGVALRGAHFCLKVFRAEDLPQMDDAVMDNVKQIFGFESNKKNLVDPFVEVSFAGKMLCSKILEKTANPQWNQNITLPAMFPSMCEKMRIRIIDWDRLTHNDIVATTYLSMSKISAPGGEIEVDDYLGFLPTFGPCYINLYGSPREFTGFPDPYTELNTGKGEGVAYRGRLLLSLETKLVEHSEQKVEDLPADDILRVEKYLRRRKYSLFAAFYSATMLQDVDDAIQFEVSIGNYGNKFDMTCLPLASTTQYSRAVFDGCHYYYLPWGNVKPVVVLSSYWEDISHRIETQNQLLGIADRLEAGLEQVHLALKAQCSTEDVDSLVAQLTDELIAGCSQPLGDIHETPSATHLDQYLYQLRTHHLSQITEAALALKLGHSELPAALEQAEDWLLRLRALAEEPQNSLPDIVIWMLQGDKRVAYQRVPAHQVLFSRRGANYCGKNCGKLQTIFLKYPMEKVPGARMPVQIRVKLWFGLSVDEKEFNQFAEGKLSVFAETYENETKLALVGNWGTTGLTYPKFSDVTGKIKLPKDSFRPSAGWTWAGDWFVCPEKTLLHDMDAGHLSFVEEVFENQTRLPGGQWIYMSDNYTDVNGEKVLPKDDIECPLGWKWEDEEWSTDLNRAVDEQGWEYSITIPPERKPKHWVPAEKMYYTHRRRRWVRLRRRDLSQMEALKRHRQAEAEGEGWEYASLFGWKFHLEYRKTDAFRRRRWRRRMEPLEKTGPAAVFALEGALGGVMDDKSEDSMSVSTLSFGVNRPTISCIFDYGNRYHLRCYMYQARDLAAMDKDSFSDPYAIVSFLHQSQKTVVVKNTLNPTWDQTLIFYEIEIFGEPATVAEQPPSIVVELYDHDTYGADEFMGRCICQPSLERMPRLAWFPLTRGSQPSGELLASFELIQREKPAIHHIPGFEVQETSRILDESEDTDLPYPPPQREANIYMVPQNIKPALQRTAIEILAWGLRNMKSYQLANISSPSLVVECGGQTVQSCVIRNLRKNPNFDICTLFMEVMLPREELYCPPITVKVIDNRQFGRRPVVGQCTIRSLESFLCDPYSAESPSPQGGPDDVSLLSPGEDVLIDIDDKEPLIPIQLADGLSSLAPTNTASPPSSPHEEEFIDWWSKFFASIGEREKCGSYLEKDFDTLKVYDTQLENVEAFEGLSDFCNTFKLYRGKTQEETEDPSVIGEFKGLFKIYPLPEDPAIPMPPRQFHQLAAQGPQECLVRIYIVRAFGLQPKDPNGKCDPYIKISIGKKSVSDQDNYIPCTLEPVFGKMFELTCTLPLEKDLKITLYDYDLLSKDEKIGETVVDLENRLLSKFGARCGLPQTYCVSGPNQWRDQLRPSQLLHLFCQQHRVKAPVYRTDRVMFQDKEYSIEEIEAGRIPNPHLGPVEERLALHVLQQQGLVPEHVESRPLYSPLQPDIEQGKLQMWVDLFPKALGRPGPPFNITPRRARRFFLRCIIWNTRDVILDDLSLTGEKMSDIYVKGWMIGFEEHKQKTDVHYRSLGGEGNFNWRFIFPFDYLPAEQVCTIAKKDAFWRLDKTESKIPARVVFQIWDNDKFSFDDFLGSLQLDLNRMPKPAKTAKKCSLDQLDDAFHPEWFVSLFEQKTVKGWWPCVAEEGEKKILAGKLEMTLEIVAESEHEERPAGQGRDEPNMNPKLEDPRRPDTSFLWFTSPYKTMKFILWRRFRWAIILFIILFILLLFLAIFIYAFPNYAAMKLVKPFS

SEQ ID NO: 12913 - protein, 519 aa, Homo sapiens
MPGFHLITQLKGMSVVLVLLPTLLLVMLTGAQRACPKNCRCDGKIVYCESHAFADIPENISGGSQGLSLRFNSIQKLKSNQFAGLNQLIWLYLDHNYISSVDEDAFQGIRRLKELILSSNKITYLHNKTFHPVPNLRNLDLSYNKLQTLQSEQFKGLRKLIILHLRSNSLKTVPIRVFQDCRNLDFLDLGYNRLRSLSRNAFAGLLKLKELHLEHNQFSKINFAHFPRLFNLRSIYLQWNRIRSISQGLTWTWSSLHNLDLSGNDIQGIEPGTFKCLPNLQKLNLDSNKLTNISQETVNAWISLISITLSGNMWECSRSICPLFYWLKNFKGNKESTMICAGPKHIQGEKVSDAVETYNICSEVQVVNTERSHLVPQTPQKPLIIPRPTIFKPDVTQSTFETPSPSPGFQIPGAEQEYEHVSFHKIIAGSVALFLSVAMILLVIYVSWKRYPASMKQLQQHSLMKRRRKKARESERQMNSPLQEYYVDYKPTNSETMDISVNGSGPCTYTISGSRECEV

SEQ ID NO: 12914 - protein, 366 aa, Homo sapiens
MVPSSPRALFLLLLILACPEPRASQNCLSKQQLLSAIRQLQQLLKGQETRFAEGIRHMKSRLAALQNSVGRVGPDALPVSCPALNTPADGRKFGSKYLVDHEVHFTCNPGFRLVGPSSVVCLPNGTWTGEQPHCRGISECSSQPCQNGGTCVEGVNQYRCICPPGRTGNRCQHQAQTAAPEGSVAGDSAFSRAPRCAQVERAQHCSCEAGFHLSGAAGDSVCQDVNECELYGQEGRPRLCMHACVNTPGSYRCTCPGGYRTLADGKSCEDVDECVGLQPVCPQGTTCINTGGSFQCVSPECPEGSGNVSYVKTSPLTWRGLRRWRWTSTCRNTWTAPSRPTTCPRSPSLYPPMTSEGTQGHWGVES

SEQ ID NO: 12915 - protein, 1659 aa, Homo sapiens
MLISKNMPWRRLQGISFGMYSAEELKKLSVKSITNPRYLDSLGNPSANGLYDLALGPADSKEVCSTCVQDFSNCSGHLGHIELPLTVYNPLLFDKLYLLLRGSCLNCHMLTCPRAVIHLLLCQLRVLEVGALQAVYELERILNRFLEENPDPSASEIREELEQYTTEIVQNNLLGSQGAHVKNVCESKSKLIALFWKAHMNAKRCPHCKTGRSVVRKEHNSKLTITFPAMVHRTAGQKDSEPLGIEEAQIGKRGYLTPTSAREHLSALWKNEGFFLNYLFSGMDDDGMESRFNPSVFFLDFLVVPPSRYRPVSRLGDQMFTNGQTVNLQAVMKDVVLIRKLLALMAQEQKLPEEVATPTTDEEKDSLIAIDRSFLSTLPGQSLIDKLYNIWIRLQSHVNIVFDSEMDKLMMDKYPGIRQILEKKEGLFRKHMMGKRVDYAARSVICPDMYINTNEIGIPMVFATKLTYPQPVTPWNVQELRQAVINGPNVHPGASMVINEDGSRTALSAVDMTQREAVAKQLLTPATGAPKPQGTKIVCRHVKNGDILLLNRQPTLHRPSIQAHRARILPEEKVLRLHYANCKAYNADFDGDEMNAHFPQSELGRAEAYVLACTDQQYLVPKDGQPLAGLIQDHMVSGASMTTRGCFFTREHYMELVYRGLTDKVGRVKLLSPSILKPFPLWTGKQVVSTLLINIIPEDHIPLNLSGKAKITGKAWVKETPRSVPGFNPDSMCESQVIIREGELLCGVLDKAHYGSSAYGLVHCCYEIYGGETSGKVLTCLARLFTAYLQLYRGFTLGVEDILVKPKADVKRQRIIEESTHCGPQAVRAALNLPEAASYDEVRGKWQDAHLGKDQRDFNMIDLKFKEEVNHYSNEINKACMPFGLHRQFPENSLQMMVQSGAKGSTVNTMQISCLLGQIELEGRRPPLMASGKSLPCFEPYEFTPRAGGFVTGRFLTGIKPPEFFFHCMAGREGLVDTAVKTSRSGYLQRCIIKHLEGLVVQYDLTVRDSDGSVVQFLYGEDGLDIPKTQFLQPKQFPFLASNYEVIMKSQHLHEVLSRADPKKALHHFRAIKKWQSKHPNTLLRRGAFLSYSQKIQEAVKALKLESENRNGRSPGTQEMLRMWYELDEESRRKYQKKAAACPDPSLSVWRPDIYFASVSETFETKVDDYSQEWAAQTEKSYEKSELSLDRLRTLLQLKWQRSLCEPGEAVGLLAAQSIGEPSTQMTLNTFHFAGRGEMNVTLGIPRLREILMVASANIKTPMMSVPVLNTKKALKRVKSLKKQLTRVCLGEVLQKIDVQESFCMEEKQNKFQVYQLRFQFLPHAYYQQEKCLRPEDILRFMETRFFKLLMESIKKKNNKASAFRNVNTRRATQRDLDNAGELGRSRGEQEGDEEEEGHIVDAEAEEGDADASDAKRKEKQEEEVDYESEEEEEREGEENDDEDMQEERNPHREGARKTQEQDEEVTVKLPLMKINFDMSSLVVSLAHGAVIYATKGITRCLLNETTNNKNEKELVLNTEGINLPELFKYAEVLDLRRLYSNDIHAIANTYGIEAALRVIEKEIKDVFAVYGIAVDPRHLSLVADYMCFEGVYKPLNRFGIRSNSSPLQQMTFETSFQFLKQATMLGSHDELRSPSACLVVGKVVRGGTGLFELKQPLR

SEQ ID NO: 12916 - protein, 1977 aa, Homo sapiens
MAMLPPPGPQSFVHFTKQSLALIEQRIAERKSKEPKEEKKDDDEEAPKPSSDLEAGKQLPFIYGDIPPGMVSEPLEDLDPYYADKKTFIVLNKGKTIFRFNATPALYMLSPFSPLRRISIKILVHSLFSMLIMCTILTNCIFMTMNNPPDWTKNVEYTFTGIYTFESLVKILARGFCVGEFTFLRDPWNWLDFVVIVFAYLTEFVNLGNVSALRTFRVLRALKTISVIPGLKTIVGALIQSVKKLSDVMILTVFCLSVFALIGLQLFMGNLKHKCFRNSLENNETLESIMNTLESEEDFRKYFYYLEGSKDALLCGFSTDSGQCPEGYTCVKIGRNPDYGYTSFDTFSWAFLALFRLMTQDYWENLYQQTLRAAGKTYMIFFVVVIFLGSFYLINLILAVVAMAYEEQNQANIEEAKQKELEFQQMLDRLKKEQEEAEAIAAAAAEYTSIRRSRIMGLSESSSETSKLSSKSAKERRNRRKKKNQKKLSSGEEKGDAEKLSKSESEDSIRRKSFHLGVEGHRRAHEKRLSTPNQSPLSIRGSLFSARRSSRTSLFSFKGRGRDIGSETEFADDEHSIFGDNESRRGSLFVPHRPQERRSSNISQASRSPPMLPVNGKMHSAVDCNGVVSLVDGRSALMLPNGQLLPEGTTNQIHKKRRCSSYLLSEDMLNDPNLRQRAMSRASILTNTVEELEESRQKCPPWWYRFAHKFLIWNCSPYWIKFKKCIYFIVMDPFVDLAITICIVLNTLFMAMEHHPMTEEFKNVLAIGNLVFTGIFAAEMVLKLIAMDPYEYFQVGWNIFDSLIVTLSLVELFLADVEGLSVLRSFRLLRVFKLAKSWPTLNMLIKIIGNSVGALGNLTLVLAIIVFIFAVVGMQLFGKSYKECVCKINDDCTLPRWHMNDFFHSFLIVFRVLCGEWIETMWDCMEVAGQAMCLIVYMMVMVIGNLVVLNLFLALLLSSFSSDNLTAIEEDPDANNLQIAVTRIKKGINYVKQTLREFILKAFSKKPKISREIRQAEDLNTKKENYISNHTLAEMSKGHNFLKEKDKISGFGSSVDKHLMEDSDGQSFIHNPSLTVTVPIAPGESDLENMNAEELSSDSDSEYSKVRLNRSSSSECSTVDNPLPGEGEEAEAEPMNSDEPEACFTDGCVWRFSCCQVNIESGKGKIWWNIRKTCYKIVEHSWFESFIVLMILLSSGALAFEDIYIERKKTIKIILEYADKIFTYIFILEMLLKWIAYGYKTYFTNAWCWLDFLIVDVSLVTLVANTLGYSDLGPIKSLRTLRALRPLRALSRFEGMRVVVNALIGAIPSIMNVLLVCLIFWLIFSIMGVNLFAGKFYECINTTDGSRFPASQVPNRSECFALMNVSQNVRWKNLKVNFDNVGLGYLSLLQVATFKGWTIIMYAAVDSVNVDKQPKYEYSLYMYIYFVVFIIFGSFFTLNLFIGVIIDNFNQQKKKLGGQDIFMTEEQKKYYNAMKKLGSKKPQKPIPRPGNKIQGCIFDLVTNQAFDISIMVLICLNMVTMMVEKEGQSQHMTEVLYWINVVFIILFTGECVLKLISLRHYYFTVGWNIFDFVVVIISIVGMFLADLIETYFVSPTLFRVIRLARIGRILRLVKGAKGIRTLLFALMMSLPALFNIGLLLFLVMFIYAIFGMSNFAYVKKEDGINDMFNFETFGNSMICLFQITTSAGWDGLLAPILNSKPPDCDPKKVHPGSSVEGDCGNPSVGIFYFVSYIIISFLVVVNMYIAVILENFSVATEESTEPLSEDDFEMFYEVWEKFDPDATQFIEFSKLSDFAAALDPPLLIAKPNKVQLIAMDLPMVSGDRIHCLDILFAFTKRVLGESGEMDSLRSQMEERFMSANPSKVSYEPITTTLKRKQEDVSATVIQRAYRRYRLRQNVKNISSIYIKDGDRDDDLLNKKDMAFDNVNENSSPEKTDATSSTTSPPSYDSVTKPDKEKYEQDRTEKEDKGKDSKESKK

SEQ ID NO: 12917 - protein, 824 aa, Homo sapiens
MVPSSSRTPGFKQSSHHLRLPKCWDYRDDFGKLLLAEALLEQCLKENHAKIKDSMPLLEKNEPKMSEAKNYLSSILNHGRLSPQYMCEAMLILGKLHYVEGSYRDAISMYARAGIDDMSMENKPLYQMRLLSEAFVIKGLSLERLPNSIASRFRLTEREEEVITCFERASWIAQVFLQELEKTTNNSTSRHLKGCHPLDYELTYFLEAALQSAYVKNLKKGNIVKGMRELREVLRTVETKATQNFKVMAAKHLAGVLLHSLSEECYWSPLSHPLPEFMGKEESSFATQALRKPHLYEGDNLYCPKDNIEEALLLLLISESMATRDVVLSRVPEQEEDRTVSLQNAAAIYDLLSITLGRRGQYVMLSECLERAMKFAFGEFHLWYQVALSMVACGKSAYAVSLLRECVKLRPSDPTVPLMAAKVCIGSLRWLEEAEHFAMMVISLGEEAGEFLPKGYLALGLTYSLQATDATLKSKQDELHRKALQTLERAQQLAPSDPQVILYVSLQLALVRQISSAMEQLQEALKVRKDDAHALHLLALLFSAQKHHQHALDVVNMAITEHPENFNLMFTKVKLEQVLKGPEEALVTCRQVLRLWQTLYSFSQLGGLEKDGSFGEGLTMKKQSGMHLTLPDAHDADSGSRRASSIAASRLEEAMSELTMPSSVLKQGPMQLWTTLEQIWLQAAELFMEQQHLKEAGFCIQEAAGLFPTSHSVLYMRGRLAEVKGNLEEAKQLYKEALTVNPDGVRIMHSLGLMLSRLGHKSLAQKVLRDAVERQSTCHEAWQGLGEVLQAQGQNEAAVDCFLTALELEASSPVLPFSIIPREL

SEQ ID NO: 12918 - protein, 1981 aa, Homo sapiens
MEQTVLVPPGPDSFNFFTRESLAAIERRIAEEKAKNPKPDKKDDDENGPKPNSDLEAGKNLPFIYGDIPPEMVSEPLEDLDPYYINKKTFIVLNKGKAIFRFSATSALYILTPFNPLRKIAIKILVHSLFSMLIMCTILTNCVFMTMSNPPDWTKNVEYTFTGIYTFESLIKIIARGFCLEDFTFLRDPWNWLDFTVITFAYVTEFVDLGNVSALRTFRVLRALKTISVIPGLKTIVGALIQSVKKLSDVMILTVFCLSVFALIGLQLFMGNLRNKCIQWPPTNASLEEHSIEKNITVNYNGTLINETVFEFDWKSYIQDSRYHYFLEGFLDALLCGNSSDAGQCPEGYMCVKAGRNPNYGYTSFDTFSWAFLSLFRLMTQDFWENLYQLTLRAAGKTYMIFFVLVIFLGSFYLINLILAVVAMAYEEQNQATLEEAEQKEAEFQQMIEQLKKQQEAAQQAATATASEHSREPSAAGRLSDSSSEASKLSSKSAKERRNRRKKRKQKEQSGGEEKDEDEFQKSESEDSIRRKGFRFSIEGNRLTYEKRYSSPHQSLLSIRGSLFSPRRNSRTSLFSFRGRAKDVGSENDFADDEHSTFEDNESRRDSLFVPRRHGERRNSNLSQTSRSSRMLAVFPANGKMHSTVDCNGVVSLGTTTETEMRKRRSSSFHVSMDFLEDPSQRQRAMSIASILTNTVEELEESRQKCPPCWYKFSNIFLIWDCSPYWLKVKHVVNLVVMDPFVDLAITICIVLNTLFMAMEHYPMTDHFNNVLTVGNLVFTGIFTAEMFLKIIAMDPYYYFQEGWNIFDGFIVTLSLVELGLANVEGLSVLRSFRLLRVFKLAKSWPTLNMLIKIIGNSVGALGNLTLVLAIIVFIFAVVGMQLFGKSYKDCVCKIASDCQLPRWHMNDFFHSFLIVFRVLCGEWIETMWDCMEVAGQAMCLTVFMMVMVIGNLVVLNLFLALLLSSFSADNLAATDDDNEMNNLQIAVDRMHKGVAYVKRKIYEFIQQSFIRKQKILDEIKPLDDLNNKKDSCMSNHTAEIGKDLDYLKDVNGTTSGIGTGSSVEKYIIDESDYMSFINNPSLTVTVPIAVGESDFENLNTEDFSSESDLEESKEKLNESSSSSEGSTVDIGAPVEEQPVVEPEETLEPEACFTEGCVQRFKCCQINVEEGRGKQWWNLRRTCFRIVEHNWFETFIVFMILLSSGALAFEDIYIDQRKTIKTMLEYADKVFTYIFILEMLLKWVAYGYQTYFTNAWCWLDFLIVDVSLVSLTANALGYSELGAIKSLRTLRALRPLRALSRFEGMRVVVNALLGAIPSIMNVLLVCLIFWLIFSIMGVNLFAGKFYHCINTTTGDRFDIEDVNNHTDCLKLIERNETARWKNVKVNFDNVGFGYLSLLQVATFKGWMDIMYAAVDSRNVELQPKYEESLYMYLYFVIFIIFGSFFTLNLFIGVIIDNFNQQKKKFGGQDIFMTEEQKKYYNAMKKLGSKKPQKPIPRPGNKFQGMVFDFVTRQVFDISIMILICLNMVTMMVETDDQSEYVTTILSRINLVFIVLFTGECVLKLISLRHYYFTIGWNIFDFVVVILSIVGMFLAELIEKYFVSPTLFRVIRLARIGRILRLIKGAKGIRTLLFALMMSLPALFNIGLLLFLVMFIYAIFGMSNFAYVKREVGIDDMFNFETFGNSMICLFQITTSAGWDGLLAPILNSKPPDCDPNKVNPGSSVKGDCGNPSVGIFFFVSYIIISFLVVVNMYIAVILENFSVATEESAEPLSEDDFEMFYEVWEKFDPDATQFMEFEKLSQFAAALEPPLNLPQPNKLQLIAMDLPMVSGDRIHCLDILFAFTKRVLGESGEMDALRIQMEERFMASNPSKVSYQPITTTLKRKQEEVSAVIIQRAYRRHLLKRTVKQASFTYNKNKIKGGANLLIKEDMIIDRINENSITEKTDLTMSTAACPPSYDRVTKPIVEKHEQEGKDEKAKGK

SEQ ID NO: 12919 - protein, 130 aa, Homo sapiens
MGRPLHLVLLSASLAGLLLLGESLFIRREQANNILARVTRANSFLEEMKKGHLERECMEETCSYEEAREVFEDSDKTNEFWNKYKDGDQCETSPCQNQGKCKDGLGEYTCTCLEGFEGKNCELCMLIFAL

SEQ ID NO: 12920 - protein, 306 aa, Homo sapiens
MTAREHSPRHGARARAMQRASTIDVAADMLGLSLAGNIQDPDEPILEFSLACSELHTPSLDRKPNSFVAVSVTTPPQATSSASADMLPVITGNRDGFNVRVPLPGPLFDALPREIQSGMLLRVQPVLFNVGINEQQTLAERFGDTSLQEVINVESLVRLNSYFEQFKEVLPEDCLPRSRSQTCLPELLRFLGQNVHARKNKNVDILWQAAEICRRLNGVRFTSCKSAKDRTAMSVTLEQCLILQHEHGMAPQVFTQALECMRSEGCRRENTMKNVGSRKYAFNSLQLKAFPKHYRPPEGTYGKVET

SEQ ID NO: 12921 - protein, 1988 aa, Homo sapiens
MAMLPPPGPQSFVHFTKQSLALIEQRIAERKSKEPKEEKKDDDEEAPKPSSDLEAGKQLPFIYGDIPPGMVSEPLEDLDPYYADKKTFIVLNKGKTIFRFNATPALYMLSPFSPLRRISIKILVHSLFSMLIMCTILTNCIFMTMNNPPDWTKNVEYTFTGIYTFESLVKILARGFCVGEFTFLRDPWNWLDFVVIVFAYVTEFVDLGNVSALRTFRVLRALKTISVIPGLKTIVGALIQSVKKLSDVMILTVFCLSVFALIGLQLFMGNLKHKCFRNSLENNETLESIMNTLESEEDFRKYFYYLEGSKDALLCGFSTDSGQCPEGYTCVKIGRNPDYGYTSFDTFSWAFLALFRLMTQDYWENLYQQTLRAAGKTYMIFFVVVIFLGSFYLINLILAVVAMAYEEQNQANIEEAKQKELEFQQMLDRLKKEQEEAEAIAAAAAEYTSIRRSRIMGLSESSSETSKLSSKSAKERRNRRKKKNQKKLSSGEEKGDAEKLSKSESEDSIRRKSFHLGVEGHRRAHEKRLSTPNQSPLSIRGSLFSARRSSRTSLFSFKGRGRDIGSETEFADDEHSIFGDNESRRGSLFVPHRPQERRSSNISQASRSPPMLPVNGKMHSAVDCNGVVSLVDGRSALMLPNGQLLPEVIIDKATSDDSGTTNQIHKKRRCSSYLLSEDMLNDPNLRQRAMSRASILTNTVEELEESRQKCPPWWYRFAHKFLIWNCSPYWIKFKKCIYFIVMDPFVDLAITICIVLNTLFMAMEHHPMTEEFKNVLAIGNLVFTGIFAAEMVLKLIAMDPYEYFQVGWNIFDSLIVTLSLVELFLADVEGLSVLRSFRLLRVFKLAKSWPTLNMLIKIIGNSVGALGNLTLVLAIIVFIFAVVGMQLFGKSYKECVCKINDDCTLPRWHMNDFFHSFLIVFRVLCGEWIETMWDCMEVAGQAMCLIVYMMVMVIGNLVVLNLFLALLLSSFSSDNLTAIEEDPDANNLQIAVTRIKKGINYVKQTLREFILKAFSKKPKISREIRQAEDLNTKKENYISNHTLAEMSKGHNFLKEKDKISGFGSSVDKHLMEDSDGQSFIHNPSLTVTVPIAPGESDLENMNAEELSSDSDSEYSKVRLNRSSSSECSTVDNPLPGEGEEAEAEPMNSDEPEACFTDGCVWRFSCCQVNIESGKGKIWWNIRKTCYKIVEHSWFESFIVLMILLSSGALAFEDIYIERKKTIKIILEYADKIFTYIFILEMLLKWIAYGYKTYFTNAWCWLDFLIVDVSLVTLVANTLGYSDLGPIKSLRTLRALRPLRALSRFEGMRVVVNALIGAIPSIMNVLLVCLIFWLIFSIMGVNLFAGKFYECINTTDGSRFPASQVPNRSECFALMNVSQNVRWKNLKVNFDNVGLGYLSLLQVATFKGWTIIMYAAVDSVNVDKQPKYEYSLYMYIYFVVFIIFGSFFTLNLFIGVIIDNFNQQKKKLGGQDIFMTEEQKKYYNAMKKLGSKKPQKPIPRPGNKIQGCIFDLVTNQAFDISIMVLICLNMVTMMVEKEGQSQHMTEVLYWINVVFIILFTGECVLKLISLRHYYFTVGWNIFDFVVVIISIVGMFLADLIETYFVSPTLFRVIRLARIGRILRLVKGAKGIRTLLFALMMSLPALFNIGLLLFLVMFIYAIFGMSNFAYVKKEDGINDMFNFETFGNSMICLFQITTSAGWDGLLAPILNSKPPDCDPKKVHPGSSVEGDCGNPSVGIFYFVSYIIISFLVVVNMYIAVILENFSVATEESTEPLSEDDFEMFYEVWEKFDPDATQFIEFSKLSDFAAALDPPLLIAKPNKVQLIAMDLPMVSGDRIHCLDILFAFTKRVLGESGEMDSLRSQMEERFMSANPSKVSYEPITTTLKRKQEDVSATVIQRAYRRYRLRQNVKNISSIYIKDGDRDDDLLNKKDMAFDNVNENSSPEKTDATSSTTSPPSYDSVTKPDKEKYEQDRTEKEDKGKDSKESKK

SEQ ID NO: 12922 - protein, 2215 aa, Homo sapiens
MVILQQGDHVWMDLRLGQEFDVPIGAVVKLCDSGQVQVVDDEDNEHWISPQNATHIKPMHPTSVHGVEDMIRLGDLNEAGILRNLLIRYRDHLIYTYTGSILVAVNPYQLLSIYSPEHIRQYTNKKIGEMPPHIFAIADNCYFNMKRNSRDQCCIISGESGAGKTESTKLILQFLAAISGQHSWIEQQVLEATPILEAFGNAKTIRNDNSSRFGKYIDIHFNKRGAIEGAKIEQYLLEKSRVCRQALDERNYHVFYCMLEGMSEDQKKKLGLGQASDYNYLAMGNCITCEGRVDSQEYANIRSAMKVLMFTDTENWEISKLLAAILHLGNLQYEARTFENLDACEVLFSPSLATAASLLEVNPPDLMSCLTSRTLITRGETVSTPLSREQALDVRDAFVKGIYGRLFVWIVDKINAAIYKPPSQDVKNSRRSIGLLDIFGFENFAVNSFEQLCINFANEHLQQFFVRHVFKLEQEEYDLESIDWLHIEFTDNQDALDMIANKPMNIISLIDEESKFPKGTDTTMLHKLNSQHKLNANYIPPKNNHETQFGINHFAGIVYYETQGFLEKNRDTLHGDIIQLVHSSRNKFIKQIFQADVAMGAETRKRSPTLSSQFKRSLELLMRTLGACQPFFVRCIKPNEFKKPMLFDRHLCVRQLRYSGMMETIRIRRAGYPIRYSFVEFVERYRVLLPGVKPAYKQGDLRGTCQRMAEAVLGTHDDWQIGKTKIFLKDHHDMLLEVERDKAITDRVILLQKVIRGFKDRSNFLKLKNAATLIQRHWRGHNCRKNYGLMRLGFLRLQALHRSRKLHQQYRLARQRIIQFQARCRAYLVRKAFRHRLWAVLTVQAYARGMIARRLHQRLRAEYLWRLEAEKMRLAEEEKLRKEMSAKKAKEEAERKHQERLAQLAREDAERELKEKEAARRKKELLEQMERARHEPVNHSDMVDKMFGFLGTSGGLPGQEGQAPSGFEDLERGRREMVEEDLDAALPLPDEDEEDLSEYKFAKFAATYFQGTTTHSYTRRPLKQPLLYHDDEGDQLAALAVWITILRFMGDLPEPKYHTAMSDGSEKIPVMTKIYETLGKKTYKRELQALQGEGEAQLPEGQKKSSVRHKLVHLTLKKKSKLTEEVTKRLHDGESTVQGNSMLEDRPTSNLEKLHFIIGNGILRPALRDEIYCQISKQLTHNPSKSSYARGWILVSLCVGCFAPSEKFVKYLRNFIHGGPPGYAPYCEERLRRTFVNGTRTQPPSWLELQATKSKKPIMLPVTFMDGTTKTLLTDSATTAKELCNALADKISLKDRFGFSLYIALFDKVSSLGSGSDHVMDAISQCEQYAKEQGAQERNAPWRLFFRKEVFTPWHSPSEDNVATNLIYQQVVRGVKFGEYRCEKEDDLAELASQQYFVDYGSEMILERLLNLVPTYIPDREITPLKTLEKWAQLAIAAHKKGIYAQRRTDAQKVKEDVVSYARFKWPLLFSRFYEAYKFSGPSLPKNDVIVAVNWTGVYFVDEQEQVLLELSFPEIMAVSSSRECRVWLSLGCSDLGCAAPHSGWAGLTPAGPCSPCWSCRGAKTTAPSFTLATIKGDEYTFTSSNAEDIRDLVVTFLEGLRKRSKYVVALQDNPNPAGEESGFLSFAKGDLIILDHDTGEQVMNSGWANGINERTKQRGDFPTDSVYVMPTVTMPPREIVALVTMTPDQRQDVVRLLQLRTAEPEVRAKPYTLEEFSYDYFRPPPKHTLSRVMVSKARGKDRLWSHTREPLKQALLKKLLGSEELSQEACLAFIAVLKYMGDYPSKRTRSVNELTDQIFEGPLKAEPLKDEAYVQILKQLTDNHIRYSEERGWELLWLCTGLFPPSNILLPHVQRFLQSRKHCPLAIDCLQRLQKALRNGSRKYPPHLVEVEAIQHKTTQIFHKVYFPDDTDEAFEVESSTKAKDFCQNIATRLLLKSSEGFSLFVKIADKVLSVPENDFFFDFVRHLTDWIKKARPIKDGIVPSLTYQVFFMKKLWTTTVPGKDPMADSIFHYYQELPKYLRGYHKCTREEVLQLGALIYRVKFEEDKSYFPSIPKLLRELVPQDLIRQVSPDDWKRSIVAYFNKHAGKSKEEAKLAFLKLIFKWPTFGSAFFEVKQTTEPNFPEILLIAINKYGVSLIDPKTKDILTTHPFTKISNWSSGNTYFHITIGNLVRGSKLLCETSLGYKMDDLLTSYISQMLTAMSKQRGSRSGK

SEQ ID NO: 12923 - protein, 818 aa, Homo sapiens
MVGCGVAVLCLWVSCGAAAGQLEYSVPEETERGVAVGNLSADLRLPAAAMSSRNFRFLSSHRELYFGVDLPSGNLVVREPADREQLCRAKAACVLTYDLVLEDPLELHKIRIHVLDTNDNSPLFPAGDVQLHIPEFLTPGARFTLPNAQDDDEGSNGILSYSLSPSQHFRLDMGSRVDGSEYPELVLEKALDREQRATHLLVLTARDGGLPARSGDAQVTIIVVDTNDNAPVFERSVYRTKVPETAPNGTVLFRVQALDPDEGSNGEVQYSLSNSTQAELRHRFHVHPKSGEVQVAASLGPPETLLEAYIEARDEGVFGLASTAKLLVEVTDVNDHAPELDFLTLSNPVPEDAAPGTVIALFSVKDEDLDSNGRVICGMSSAGPFQLTASFDNYYSLLIDGPLDREQISEYQVLITASDSGSPPLSTRRTITVSVADVNDNTPNFPQPQQELFVAENNGPGASLGRVFAQDPDLGKNGLVSYELLDVISEGPSASSLLAVESSSGAITAKTSFDFEQLRGFHFQVEGRDGGIPPRSATVTINLFVVDRNDNYPVILFPLPRNGSVPVEIVPRSARTGHLVTKVVAEDADSGSNAWLSYHISRASDSSLFRISANIGELRTARLVLPTDAVKQRVVVVVRDHGDPPLSSSVTLGVLLSNSVPQLLPDFEDVWEPGGQLSAQNLYLVIALACISFLFLGCLLFFVCTKLHQSPGCCAQSCCRSTEDLRYGSKMVSNPCMTSATIDVTTVERLSQTYLYRASLGLGSDNNSLLLRGEYNAADLRNLATGVGLNLPISCIQIRNRKGDHANVNAMVSKFYGI

SEQ ID NO: 12924 - protein, 590 aa, Homo sapiens
MGFHLITQLKGMSVVLVLLPTLLLVMLTGAQRACPKNCRCDGKIVYCESHAFADIPENISGGSQGLSLRFNSIQKLKSNQFAGLNQLIWLYLDHNYISSVDEDAFQGIRRLKELILSSNKITYLHNKTFHPVPNLRNLDLSYNKLQTLQSEQFKGLRKLIILHLRSNSLKTVPIRVFQDCRNLDFLDLGYNRLRSLSRNAFAGLLKLKELHLEHNQFSKINFAHFPRLFNLRSIYLQWNRIRSISQGLTWTWSSLHNLDLSGNDIQGIEPGTFKCLPNLQKLNLDSNKLTNISQETVNAWISLISITLSGNMWECSRSICPLFYWLKNFKGNKESTMICAGPKHIQGEKVSDAVETYNICSEVQVVNTERSHLVPQTPQKPLIIPRPTIFKPDVTQSTFETPSPSPGFQIPGAEQEYEHVSFHKIIAGSVALFLSVAMILLVIYVSWKRYPASMKQLQQHSLMKRRRKKARESERQMNSPLQEYYVDYKPTNSETMDISVNGSGPCTYTISGSRECEMPHHMKPLPYYSYDQPVIGYCQAHQPLHVTKGYETVSPEQDESPGLELGRDHSFIATIARSAAPAIYLERIAN

SEQ ID NO: 12925 - protein, 307 aa, Homo sapiens
MHLSNRGGRHVAVKIVKNVDRYCEAARSEIQVLEHLNTTDPNSTFRCVQMLEWFEHHGHICIVFELLGLSTYDFIKENGFLPFRLDHIRKMAYQICKSVNFLHSNKLTHTDLKPENILFVQSDYTEAYNPKIKRDERTLINPDIKVVDFGSATYDDEHHSTLVSTRHYRAPEVILALGWSQPCDVWSIGCILIEYYLGFTVFPTHDSKEHLAMMERILGPLPKHMIQKTRKRKYFHHDRLDWDEHSSAGRYVSRRCKPLKEFMLSQDVEHERLFDLIQKMLEYDPAKRITLREALKHPFFDLLKKSI

SEQ ID NO: 12926 - protein, 375 aa, Homo sapiens
MGRKKIQISRILDQRNRQVTFTKRKFGLMKKAYELSVLCDCEIALIIFNSANRLFQYASTDMDRVLLKYTEYSEPHESRTNTDILETLKRRGIGLDGPELEPDEGPEEPGEKFRRLAGEGGDPALPRPRLYPAAPAMPSPDVVYGALPPPGCDPSGLGEALPAQSRPSPFRPAAPKAGPPGLVHPLFSPSHLTSKTPPPLYLPTEGRRSDLPGGLAGPRGGLNTSRSLYSGLQNPCSTATPGPPLGSFPFLPGGPPAPNSCPPEYGLGDPPPPPGLLQPPTLAPWQPSRGDGPPAVSSQPSGGRSLGEEGPPTRGASPPTPPVSIKSERLSPAPGGPGDFPKTFPYPLLLARSLAEPLRPGPALRRLPLADGWPR

SEQ ID NO: 12927 - protein, 328 aa, Homo sapiens
MTVEKEAPDAHFTVDKQNISLWPREPPPKSGPSLVPGKTPTVRAALICLTLVLVASVLLQAVLYPRFMGTISDVKTNVQLLKGRVDNISTLDSEIKKNSDGMEAAGVQIQMVNESLGYVRSQFLKLKTSVEKANAQIQILTRSWEEVSTLNAQIPELKSDLEKASALNTKIRALQGSLENMSKLLKRQNDILQVVSQGWKYFKGNFYYFSLIPKTWYSAEQFCVSRNSHLTSVTSESEQEFLYKTAGGLIYWIGLTKAGMEGDWSWVDDTPFNKVQSVRFWIPGEPNNAGNNEHCGNIKAPSLQAWNDAPCDKTFLFICKRPYVPSEP

SEQ ID NO: 12928 - protein, 569 aa, Homo sapiens
MKVLLRLICFIALLISSLEADKCKEREEKIILVSSANEIDVRPCPLNPNEHKGTITWYKDDSKTPVSTEQASRIHQHKEKLWFVPAKVEDSGHYYCVVRNSSYCLRIKISAKFVENEPNLCYNAQAIFKQKLPVAGDGGLVCPYMEFFKNENNELPKLQWYKDCKPLLLDNIHFSGVKDRLIVMNVAEKHRGNYTCHASYTYLGKQYPITRVIEFITLEENKPTRPVIVSPANETMEVDLGSQIQLICNVTGQLSDIAYWKWNGSVIDEDDPVLGEDYYSVENPANKRRSTLITVLNISEIESRFYKHPFTCFAKNTHGIDAAYIQLIYPVTNFQKHMIGICVTLTVIIVCSVFIYKIFKIDIVLWYRDSCYDFLPIKASDGKTYDAYILYPKTVGEGSTSDCDIFVFKVLPEVLEKQCGYKLFIYGRDDYVGEDIVEVINENVKKSRRLIIILVRETSGFSWLGGSSEEQIAMYNALVQDGIKVVLLELEKIQDYEKMPESIKFIKQKHGAIRWSGDFTQGPQSAKTRFWKNVRYHMPVQRRSPSSKHQLLSPATKEKLQREAHVPLG

SEQ ID NO: 12929 - protein, 336 aa, Homo sapiens
MSDALANAVCQRCQARFSPAERIVNSNGELYHEHCFVCAQCFRPFPEGLFYEFEGRKYCEHDFQMLFAPCCGSCGEFIIGRVIKAMNNNWHPGCFRCELCDVELADLGFVKNAGRHLCRPCHNREKAKGLGKYICQRCHLVIDEQPLMFRSDAYHPDHFNCTHCGKELTAEARELKGELYCLPCHDKMGVPICGACRRPIEGRVVNALGKQWHVEHFVCAKCEKPFLGHRHYEKKGLAYCETHYNQLFGDVCYNCSHVIEGDVVSALNKAWCVSCFSCSTCNSKLTLKNKFVEFDMKPVCKRCYEKFPLELKKRLKKLSELTSRKAQPKATDLNSA

SEQ ID NO: 12930 - protein, 578 aa, Homo sapiens
MVRNVDDLDFHLPSHAQDMLDGLQRLRSQPKLADVTLLVGGRELPCHRGLLALSSPYFHAMFAGDFAESFSARVELRDVEPAVVGQLVDFVYTGRLTITQGNVEALTRTAARLHFPSVQKVCGRYLQQQLDAANCLGICEFGEQQGLLGVAAKAWAFLRENFEAVAREDEFLQLPRERLVTCLAGDLLQVQPEQSRLEALMRWVRHDPQARAAHLPELLSLVHLDAVPRPCVQQLLASEPLIQESEACRAALSQGHDGAPLALQQKLEEVLVVVGGQALEEEEAGEEPTPGLGNFAFYNSKAKRWMALPDFPDYHKWGFSLAALNNNIYVTGGSRGTKTDTWSTTQAWCFPLKEASWKPVAPMLKPRTNHASAALNGEIYVIGGTTLDVVEVESYDPYTDSWTPVSPALKYVSNFSAAGCRGRLYLVGSSACKYNALALQCYNPVTDAWSVIASPFLPKYLSSPRCAALHGELYLIGDNTKKVYVYDPGANLWQKVQSQHSLHENGALVPLGDALYVTGGRWQGMEGDYHVEMEAYDTVRDTWTRHGALPRLWLYHGASTVFLDVSKWTQPSGPTQEH

SEQ ID NO: 12931 - protein, 377 aa, Homo sapiens
MLSSCVRPVPTTVRFVDSLICNSSRSFMDLKALLSSLNDFASLSFAESWDNVGLLVEPSPPHTVNTLFLTNDLTEEVMEEVLQKKADLILSYHPPIFRPMKRITWNTWKERLVIRALENRVGIYSPHTAYDAAPQGVNNWLAKGLGACTSRPIHPSKAPNYPTEGNHRVEFNVNYTQDLDKVMSAVKGIDGVSVTSFSARTGNEEQTRINLNCTQKALMQVVDFLSRNKQLYQKTEILSLEKPLLLHTGMGRLCTLDESVSLATMIDRIKRHLKLSHIRLALGVGRTLESQVKVVALCAGSGSSVLQGVEADLYLTGEMSHHDTLDAASQGINVILCEHSNTERGFLSDLRDMLDSHLENKINIILSETDRDPLQVV

SEQ ID NO: 12932 - protein, 480 aa, Homo sapiens
MAGGGGDLSTRRLNECISPVANEMNHLPAHSHDLQRMFTEDQGVDDRLLYDIVFKHFKRNKVEISNAIKKTFPFLEGLRDRDLITNKMFEDSQDSCRNLVPVQRVVYNVLSELEKTFNLPVLEALFSDVNMQEYPDLIHIYKGFENVIHDKLPLQESEEEEREERSGLQLSLEQGTGENSFRSLTWPPSGSPSHAGTTPPENGLSEHPCETEQINAKRKDTTSDKDDSLGSQQTNEQCAQKAEPTESCEQIAVQVNNGDAGREMPCPLPCDEESPEAELHNHGIQINSCSVRLVDIKKEKPFSNSKVECQAQARTHHNQASDIIVISSEDSEGSTDVDEPLEVFISAPRSEPVINNDNPLESNDEKEGQEATCSRPQIVPEPMDFRKLSTFRESFKKRVIGQDHDFSESSEEEAPAEASSGALRSKHGEKAPMTSRSTSTWRIPSRKRRFSSSDFSDLSNGEELQETCSSSLRRGSGKED

SEQ ID NO: 12933 - protein, 1236 aa, Homo sapiens
MSAEASARPLRVGSRVEVIGKGHRGTVAYVGATLFATGKWVGVILDEAKGKNDGTVQGRKYFTCDEGHGIFVRQSQIQVFEDGADTTSPETPDSSASKVLKREGTDTTAKTSKLPTRPASTGVAGASSSLGPSGSASAGELSSSEPSTPAQTPLAAPIIPTPVLTSPGAVPPLPSPSKEEEGLRAQVRDLEEKLETLRLKRAEDKAKLKELEKHKIQLEQVQEWKSKMQEQQADLQRRLKEARKEAKEALEAKERYMEEMADTADAIEMATLDKEMAEERAESLQQEVEALKERVDELTTDLEILKAEIEEKGSDGAASSYQLKQLEEQNARLKDALVRMRDLSSSEKQEHVKLQKLMEKKNQELEVVRQQRERLQEELSQAESTIDELKEQVDAALGAEEMVEMLTDRNLNLEEKVRELRETVGDLEAMNEMNDELQENARETELELREQLDMAGARVREAQKRVEAAQETVADYQQTIKKYRQLTAHLQDVNRELTNQQEASVERQQQPPPETFDFKIKFAETKAHAKAIEMELRQMEVAQANRHMSLLTAFMPDSFLRPGGDHDCVLVLLLMPRLICKAELIRKQAQEKFELSENCSERPGLRGAAGEQLSFAAGLVYSLSLLQATLHRYEHALSQCSVDVYKKVGSLYPEMSAHERSLDFLIELLHKDQLDETVNVEPLTKAIKYYQHLYSIHLAEQPEDCTMQLADHIKFTQSALDCMSVEVGRLRAFLQGGQEATDIALLLRDLETSCSDIRQFCKKIRRRMPGTDAPGIPAALAFGPQVSDTLLDCRKHLTWVVAVLQEVAAAAAQLIAPLAENEGLLVAALEELAFKASEQIYGTPSSSPYECLRQSCNILISTMNKLATAMQEGEYDAERPPSKPPPVELRAAALRAEITDAEGLGLKLEDRETVIKELKKSLKIKGEELSEANVRLSLLEKKLDSAAKDADERIEKVQTRLEETQALLRKKEKEFEETMDALQADIDQLEAEKAELKQRLNSQSKRTIEGLRGPPPSGIATLVSGIAGGAIPGQAPGSVPGPGLVKDSPLLLQQISAMRLHISQLQHENSILKGAQMKASLASLPPLHVAKLSHEGPGSELPAGALYRKTSQLLETLNQLSTHTHVVDITRTSPAAKSPSAQLMEQVAQLKSLSDTVEKLKDEVLKETVSQRPGATVPTDFATFPSSAFLRAKEEQQDDTVYMGKVTFSCAAGFGQRHRLVLTQEQLHQLHSRLIS

SEQ ID NO: 12934 - protein, 94 aa, Homo sapiens
MDSSNCKVIAPLLSQRYRRMVTKDGHSTLQMDGAQRGLAYLRDAWGILMDMRWRWMMLVFSASFVVHWLVFAVLWCFCGEDCPAKKSSFFNSLY

SEQ ID NO: 12935 - protein, 556 aa, Homo sapiens
MFYTHVLMSKRGPLAKIWLAAHWEKKLTKAHVFECNLEITIEKILSPKVKIALRTSGHLLLGVVRIYNRKAKYLLADCSEAFLKMKMTFCPGLVDLPKENFEASYNAITLPEEFHDFDTQNMNAIDVSEHFTQNQSRPEEITLRENFDNDLIFQAESFGEESEILRRHSFFDDNILLNSSGPLIEHSSGSLTGERSLFYDSGDGFGDEGAAGEMIDNLLQDDQNILLEDMHLNREISLPSEPPNSLAVEPDNSECICVPENEKMNETILLSTEEEGFTLDPIDISDIAEKRKGKKRRLLIDPIKELSSKVIHKQLTSFADTLMVLELAPPTQRLMMWKKRGGVHTLLSTAAQDLIHAELKMLFTKCFLSSGFKLGRKMIQKESVREEVGNQNIVETSMMQEPNYQQELSKPQTWKDVIGGSQHSSHEDTNKNINSEQDIVEMVSLAAEESSLMNDLFAQEIEYSPVELESLSNEENIETERWNGRILQMLNRLRESNKMGMQSFSLMKLCRNSDRKQAAAKFYSFLVLKKQLAIELSQSAPYADIIATMGPMFYNI

SEQ ID NO: 12936 - protein, 1705 aa, Homo sapiens
MASGSRWRPTPPPLLLLLLLALAARADGLEFGGGPGQWARYARWAGAASSGELSFSLRTNATRALLLYLDDGGDCDFLELLLVDGRLRLRFTLSCAEPATLQLDTPVADDRWHMVLLTRDARRTALAVDGEARAAEVRSKRREMQVASDLFVGGIPPDVRLSALTLSTVKYEPPFRGLLANLKLGERPPALLGSQGLRGATADPLCAPARNPCANGGLCTVLAPGEVGCDCSHTGFGGKFCSEEEHPMEGPAHLTLNSEVGSLLFSEGGAGRGGAGDVHQPTKGKEEFVATFKGNEFFCYDLSHNPIQSSTDEITLAFRTLQRNGLMLHTGKSADYVNLSLKSGAVWLVINLGSGAFEALVEPVNGKFNDNAWHDVRVTRNLRQHAGIGHAMVTISVDGILTTTGYTQEDYTMLGSDDFFYIGGSPNTADLPGSPVSNNFMGCLKDVVYKNNDFKLELSRLAKEGDPKMKLQGDLSFRCEDVAALDPVTFESPEAFVALPRWSAKRTGSISLDFRTTEPNGLLLFSQGRRAGGGAGSHSSAQRADYFAMELLDGHLYLLLDMGSGGIKLRASSRKVNDGEWCHVDFQRDGRKGSISVNSRSTPFLATGDSEILDLESELYLGGLPEGGRVDLPLPPEVWTAALRAGYVGCVRDLFIDGRSRDLRGLAEAQGAVGVAPFCSRETLKQCASAPCRNGGVCREGWNRFICDCIGTGFLGRVCEREATVLSYDGSMYMKIMLPNAMHTEAEDVSLRFMSQRAYGLMMATTSRESADTLRLELDGGQMKLTVNLDCLRVGCAPSKGPETLFAGHKLNDNEWHTVRVVRRGKSLQLSVDNVTVEGQMAGAHMRLEFHNIETGIMTERRFISVVPSNFIGHLSGLVFNGQPYMDQCKDGDITYCELNARFGLRAIVADPVTFKSRSSYLALATLQAYASMHLFFQFKTTAPDGLLLFNSGNGNDFIVIELVKGYIHYVFDLGNGPSLMKGNSDKPVNDNQWHNVVVSRDPGNVHTLKIDSRTVTQHSNGARNLDLKGELYIGGLSKNMFSNLPKLVASRDGFQGCLASVDLNGRLPDLIADALHRIGQVERGCDGPSTTCTEESCANQGVCLQQWDGFTCDCTMTSYGGPVCNDPGTTYIFGKGGALITYTWPPNDRPSTRMDRLAVGFSTHQRSAVLVRVDSASGLGDYLQLHIDQGTVGVIFNVGTDDITIDEPNAIVSDGKYHVVRFTRSGGNATLQVDSWPVNERYPAGNFDNERLAIARQRIPYRLGRVVDEWLLDKGRQLTIFNSQAAIKIGGRDQGRPFQGQVSGLYYNGLKVLALAAESDPNVRTEGHLRLVGEGPSVLLSAETTATTLLADMATTIMETTTTMATTTTRRGRSPTLRDSTTQNTDDLLVASAECPSDDEDLEECEPSTGGELILPIITEDSLDPPPVATRSPFVPPPPTFYPFLTGVGATQDTLPPPAARRPPSGGPCQAERDDSDCEEPIEASGFASGEVFDSSLPPTDDEDFYTTFPLVTDRTTLLSPRKPAPRPNLRTDGATGAPGVLFAPSAPAPNLPAGKMNHRDPLQPLLENPPLGPGAPTSFEPRRPPPLRPGVTSAPGFPHLPTANPTGPGERGPPGAVEVIRESSSTTGMVVGIVAAAALCILILLYAMYKYRNRDEGSYQVDQSRNYISNSAQSNGAVVKEKAPAAPKTPSKAKKNKDKEYYV

SEQ ID NO: 12937 - protein, 1613 aa, Homo sapiens
MVDASGRAAAEGWRKMEAPPDGAADLVPLDRYDAARAKIAANLQWICAKAYGRDNIPEDLRDPFYVDQYEQEHIKPPVIKLLLSSELYCRVCSLILKGDQVAALQGHQSVIQALSRKGIYVMESDDTPVTESDLSRAPIKMSAHMAMVDALMMAYTVEMISIEKVVASVKRFSTFSASKELPYDLEDAMVFWINKVNLKMREITEKEVKLKQQLLESPAHQKSPSKWYWKLVPVRYRREHLSARQSPYFPLLEDLMRDGSDGAALLAVIHYYCPEQMKLDDICLKEVTSMADSLYNIRLLREFSNEYLNKCFYLTLEDMLYAPLVLKPNVMVFIAELFWWFENVKPDFVQPRDVQELKDAKTVLHQKSSRPPVPISNATKRSFLGSPAAGTLAELQPPVQLPAEGCHRHYLHPEEPEYLGKGTAAFSPSHPLLPLRQKQQKSIQGEDIPDQRHRSNSLTRVDGQPRGAAIAWPEKKTRPASQPTPFALHHAASCEVDPSSGDSISLARSISKDSLASNIVNLTPQNQPHPTATKSHGKSLLSNVSIEDEEEELVAIVRADVVPQQADPEFPRASPRALGLTANARSPQGQLDTSESKPDSFFLEPLMPAVLKPAKEKQVITKEDERGEGRPRSIVSRRPSEGPQPLVRRKMTGSRDLNRTFTPIPCSEFPMGIDPTETGPLSVETAGEVCGGPLALGGFDPFPQGPSTDGFFLHVGRADEDTEGRLYVSCSKSPNSHDSEPWTLLRQDSDSDVVDIEEAEHDFMGEAHPVVFSRYIGEEESAKLQEDMKVKEHEDKDDASGRSSPCLSTASQMSSVSMASGSVKMTSFAERKLQRLNSCETKSSTSSSQKTTPDASESCPAPLTTWRQKREQSPSQHGKDPASLLASELVQLHMQLEEKRRAIEAQKKKMEALSARQRLKLGKAAFLHVVKKGKAEAAPPLRPEHFAKEYSQHNGEDCGDAVSKTEDFLVKEEQREELLHEPQDVDKESLAFAQQHKAKDPVALHELERNKVISAALLEDTVGEVVDVNECDLSIEKLNETISTLQQAILKISQQQEQLLMKSPTVPVPGSKNNSQDHKVKAPVHFVEPLSPTGVAGHRKAPRLGQGRNSRSGRPAELKVPKDRPQGSSRSKTPTPSVETLPHLRPFPASSHPRTPTDPGLDSALEPSGDPHGKCLFDSYRLHDESNQRTLTLSSSKDANILSEQMSLKEVLDASVKEVGSSSSDVSGKESVPVEEPLRSRASLIEVDLSDLKAPDEDGELVSLDGSADLVSEGDQKPGVGFFFKDEQKAEDELAKKRAAFLLKQQRKAEEARVRKQQLEAEVELKRDEARRKAEEDRVRKEEEKARRELIKQEYLRRKQQQILEEQGLGKPKSKPKKPRPKSVHREESCSDSGTKCSSTPDNLSRTQSGSSLSLASAATTEPESVHSGGTPSQRVESMEALPILSRNPSRSTDRDWETASAASSLASVAEYTGPKLFKEPSSKSNKPIIHNAISHCCLAGKVNEPHKNSILEELEKCDANHYIILFRDAGCQFRALYCYYPDTEEIYKLTGTGPKNITKKMIDKLYKYSSDRKQFNLIPAKTMSVSVDALTIHNHLWQPKRPAVPKKAQTRK

SEQ ID NO: 12938 - protein, 112 aa, Homo sapiens
MLQKREAPVPTKTKVAVDENKAKEFLGSLKRQKRQLWDRTRPEVQQWYQQFLYMGFDEAKFEDDITYWLNRDRNGHEYYGDYYQRHYDEDSAIGPRSPYGFRHGASVNYDDY

SEQ ID NO: 12939 - protein, 688 aa, Homo sapiens
MAGGGGDLSTRRLNECISPVANEMNHLPAHSHDLQRMFTEDQGVDDRLLYDIVFKHFKRNKVEISNAIKKTFPFLEGLRDRDLITNKMFEDSQDSCRNLVPVQRVVYNVLSELEKTFNLPVLEALFSDVNMQEYPDLIHIYKGFENVIHDKLPLQESEEEEREERSGLQLSLEQGTGENSFRSLTWPPSGSPSHAGTTPPENGLSEHPCETEQINAKRKDTTSDKDDSLGSQQTNEQCAQKAEPTESCEQIAVQVNNGDAGREMPCPLPCDEESPEAELHNHGIQINSCSVRLVDIKKEKPFSNSKVECQAQARTHHNQASDIIVISSEDSEGSTDVDEPLEVFISAPRSEPVINNDNPLESNDEKEGQEATCSRPQIVPEPMDFRKLSTFRESFKKRVIGQDHDFSESSEEEAPAEASSGALRSKHGEKAPMTSRSTSTWRIPSRKRRFSSSDFSDLSNGEELQETCSSSLRRGSGSQPQEPENKKCSCVMCFPKGVPRSQEARTESSQASDMMDTMDVENNSTLEKHSGKRRKKRRHRSKVNGLQRGRKKDRPRKHLTLNNKVQKKRWQQRGRKANTRPLKRRRKRGPRIPKDENINFKQSELPVTCGEVKGTLYKERFKQGTSKKCIQSEDKKWFTPREFEIEGDRGASKNWKLSIRCGGYTLKVLMENKFLPEPPSTRKKVMIK

SEQ ID NO: 12940 - protein, 493 aa, Homo sapiens
MPVPPPPAPPPPPTFALANTEKPTLNKTEQAGRNALLSDISKGKKLKKTVTNDRSAPILDKPKGAGAGGGGGGFGGGGGFGGGGGGGGGGSFGGGGPPGLGGLFQAGMPKLRSTANRDNDSGGSRPPLLPPGGRSTSAKPFSPPSGPGRFPVPSPGHRSGPPEPQRNRMPPPRPDVGSKPDSIPPPVPSTPRPIQSSPHNRGSPPVPGGPRQPSPGPTPPPFPGNRGTALGGGSIRQSPLSSSSPFSNRPPLPPTPSRALDDKPPPPPPPVGNRPSIHREAVPPPPPQNNKPPVPSTPRPSASSQAPPPPPPPSRPGPPPLPPSSSGNDETPRLPQRNLSLSSSTPPLPSPGRSGPLPPPPSERPPPPVRDPPGRSGPLPPPPPVSRNGSTSRALPATPQLPSRSGVDSPRSGPRPPLPPDRPSAGAPPPPPPSTSIRNGFQDSPCEDEWESRFYFHPISDLPPPEPYVQTTKSYPSKLARNESRSEYFCQGF

SEQ ID NO: 12941 - protein, 550 aa, Homo sapiens
MASASSGPSSSVGFSSFDPAVPSCTLSSAASGIKRPMASEVPYASGMPIKKIGHRSVDSSGETTYKKTTSSALKGAIQLGITHTVGSLSTKPERDVLMQDFYVVESIFFPSEGSNLTPAHHYNDFRFKTYAPVAFRYFRELFGIRPDDYLYSLCSEPLIELCSSGASGSLFYVSSDDEFIIKTVQHKEAEFLQKLLPGYYMNLNQNPRTLLPKFYGLYCVQAGGKNIRIVVMNNLLPRSVKMHIKYDLKGSTYKRRASQKEREKPLPTFKDLDFLQDIPDGLFLDADMYNALCKTLQRDCLVLQSFKIMDYSLLMSIHNIDHAQREPLSSETQYSVDTRRPAPQKALYSTAMESIQGEARRGGTMETDDHMGGIPARNSKGERLLLYIGIIDILQSYRFVKKLEHSWKALVHDGDTVSVHRPGFYAERFQRFMCNTVFKKIPLKPSPSKKFRSGSSFSRRAGSSGNSCITYQPSVSGEHKAQVTTKAEVEPGVHLGRPDVLPQTPPLEEISEGSPIPDPSFSPLVGETLQMLTTSTTLEKLEVAESEFTH

SEQ ID NO: 12942 - protein, 417 aa, Homo sapiens
MAAMLKCVMSGSQVKVFGKAVQALSRISDEFWLDPSKKGLALRCVNSSRSAYGCVLFSPVFFQHYQWSALVKMSENELDTTLHLKCKLGMKSILPIFRCLNSLERNIEKCRIFTRSDKCKVVIQFFYRHGIKRTHNICFQESQPLQVIFDKNVCTNTLMIQPRLLADAIVLFTSSQEEVTLAVTPLNFCLKSSNEESMDLSNAVHSEMFVGSDEFDFFQIGMDTEITFCFKELKGILTFSEATHAPISIYFDFPGKPLALSIDDMLVEANFILATLADEQSRASSPQSLCLSQKRKRSDLIEKKAGKNVTGQALECISKKAAPRRLYPKETLTNISALENCGSPAMKRVDGDVSEVSESSVSNTEEVPGSLCLRKFSCMFFGAVSSDQQEHFNHPFDSLARASDSEEDMNNGSFSIF

SEQ ID NO: 12943 - protein, 1471 aa, Homo sapiens
MEPRMESCLAQVLQKDVGKRLQVGQELIDYFSDKQKSADLEHDQTMLDKLVDGLATSWVNSSNYKVVLLGMDILSALVTRLQDRFKAQIGTVLPSLIDRLGDAKDSVREQDQTLLLKIMDQAANPQYVWDRMLGGFKHKNFRTREGICLCLIATLNASGAQTLTLSKIVPHICNLLGDPNSQVRDAAINSLVEIYRHVGERVRADLSKKGLPQSRLNVIFTKFDEVQKSGNMIQSANDKNFDDEDSVDGNRPSSASSTSSKAPPSSRRNVGMGTTRRLGSSTLGSKSSAAKEGAGAVDEEDFIKAFDDVPVVQIYSSRDLEESINKIREILSDDKHDWEQRVNALKKIRSLLLAGAAEYDNFFQHLRLLDGAFKLSAKDLRSQVVREACITLGHLSSVLGNKFDHGAEAIMPTIFNLIPNSAKIMATSGVVAVRLIIRHTHIPRLIPVITSNCTSKSVAVRRRCFEFLDLLLQEWQTHSLERHISVLAETIKKGIHDADSEARIEARKCYWGFHSHFSREAEHLYHTLESSYQKALQSHLKNSDSIVSLPQSDRSSSSSQESLNRPLSAKRSPTGSTTSRASTVSTKSVSTTGSLQRSRSDIDVNAAASAKSKVSSSSGTTPFSSAAALPPGSYASLGRIRTRRQSSGSATNVASTPDNRGRSRAKVVSQSQRSRSANPAGAGSRSSSPGKLLGSGYGGLTGGSSRGPPVTPSSEKRSKIPRSQGCSRETSPNRIGLDRFGLGQPGRIPGSVNAMRVLSTSTDLEAAVADALLLGDSRSKKKPVRRRYEPYGMYSDDDANSDASSVCSERSYGSRNGGIPHYLRQTEDVAEVLNHCASSNWSERKEGLLGLQNLLKSQRTLSRVELKRLCEIFTRMFADPHSKRVFSMFLETLVDFIIIHKDDLQDWLFVLLTQLLKKMGADLLGSVQAKVQKALDVTRDSFPFDQQFNILMRFIVDQTQTPNLKVKVAILKYIESLARQMDPTDFVNSSETRLAVSRIITWTTEPKSSDVRKAAQIVLISLFELNTPEFTMLLGALPKTFQDGATKLLHNHLKNSSNTSVGSPSNTIGRTPSRHTSSRTSPLTSPTNCSHGGLSPSMLDYDTENLNSEEIYSSLRGVTEAIEKFSFRSQEDLNEPIKRDGKKECDIVSRDGGAASPATEGRGGSEVEGGRTALDNKTSLLNTQPPRAFPGPRARDYNPYPYSDAINTYDKTALKEAVFDDDMEQLRDVPIDHSDLVADLLKELSNHNERVEERKGALLELLKITREDSLGVWEEHFKTILLLLLETLGDKDHSIRALALRVLREILRNQPARFKNYAELTIMKTLEAHKDSHKEVVRAAEEAASTLASSIHPEQCIKVLCPIIQTADYPINLAAIKMQTKVVERIAKESLLQLLVDIIPGLLQGYDNTESSVRKASVFCLVAIYSVIGEDLKPHLAQLTGSKMKLLNLYIKRAQTTNSNSSSSSDVSTHS

SEQ ID NO: 12944 - protein, 405 aa, Homo sapiens
MAASGKTSKSEPNHVIFKKISRDKSVTIYLGNRDYIDHVSQVQPVDGVVLVDPDLVKGKKVYVTLTCAFRYGQEDIDVIGLTFRRDLYFSRVQVYPPVGAASTPTKLQESLLKKLGSNTYPFLLTFPDYLPCSVMLQPAPQDSGKSCGVDFEVKAFATDSTDAEEDKIPKKSSVRLLIRKVQHAPLEMGPQPRAEAAWQFFMSDKPLHLAVSLNKEIYFHGEPIPVTVTVTNNTEKTVKKIKAFVEQVANVVLYSSDYYVKPVAMEEAQEKVPPNSTLTKTLTLLPLLANNRERRGIALDGKIKHEDTNLASSTIIKEGIDRTVLGILVSYQIKVKLTVSGFLGELTSSEVATEVPFRLMHPQPEDPAKESYQDANLVFEEFARHNLKDAGEAEEGKRDKNDVDE

SEQ ID NO: 12945 - protein, 952 aa, Homo sapiens
MEVRRGDTCPRPHPSGLREEGLEPKVAFPGGANRCWNLGADAGSRLTDVFGSVMLTGSASFYDCYTSQSEDNVDLRQTYTPFSSTEYSSSVDSSLFCAPWSTYGDDIKQPSNSQISIKNRIQTERNDYGSETDLYGLVSNILEEQDKSQPYFAEGTCSSNLKSVWPMNTSRFADHHDLLTETKRPIDTVISQQAFYSDESVSAMEKQYLRNSNLTPQQKIDELHHGFTGLDLEEQWMYPSRSDHSNCHNIQTNDTAKTTFQEYPLIKNCFTPQTGLSDIMKESGVDIYHYGRDRICTKGLEAPLQQKRAEMFLSQFNRYNENVDYCRYPEYVHPNKAKLNKCSNFSVQDSKKLANGTPETPTVEADTYTKLFQVKPANQKKMEETIPDQQNFTFPKTTPHLTEKQFAKEAVFTADFGLTSEYGLKPHTACPANDFANVTEKQQFAKPDPPHSEYFKSVNLLSNSATSSGGINLNRPTWMNVQTKNNTPIPYRNQGNLMKLNSHLSAASKGSNHSSDFPQLSSTNLTPNSNLFQKYCQENPSAFSSFDFSYSGAERIQSVNHIEGLTKPGEENLFKLVTDKKIKQPNGFCDNYSAQKYGIIENVNKHNFQAKPQSGHYDPEEGPKHLDGLSQNTYQDLLESQGHSNSHRTRGGDNSRVNRTQVSCFSNNYMMGDLRHNQCFQQLGSNGFPLRSTHPFGHSVVPLLDSYDLLSYDDLSHLYPYFNMMYGDNSFSGLMPTFGFQRPIKTRSGPASELHIRLEECCEQWRALEKERKKTELALAKNYPGKKVSSTNNTPVPRLTSNPSRVDRLIVDELRELARVVTLLGKMERLRSSLLHASISTALDRHLESIHIVQSRRKDEIVNASNRQRQGVPRCQDDRDVFALASAIKEMCVATRKTRTALWCALQMTLPKTASTADVVKPLQDTVNCEDKVHESINSSNPMNQRGETNKH

SEQ ID NO: 12946 - protein, 938 aa, Homo sapiens
MFPMQKGSLNLLRQKWESCDYQRSECHPRDSHCTIFQPQESKLLAPEGEVVSAPQSLDPTSLPYSTGEEMWSSKPEEKDSVDKSNNTREYGRPEVLKEDSLSSRRRIERFSIALDELRSVFEAPKSGNKPAEYGGKEVEIERSLCSPAFKSHPGSQLEDSVKDSDKKGKETSFDKMSPESGHSRIFEATAGPNKPESGFAEDSAARGEGVSDLHEVVSLKERMARYQAAVSRGDCRSFSANMMEESEMCAVPGGLAKVKKQFEDEITSSRNTFAQYQYQHQNRSEQEAIHSSQVGTSRSSQEMARNEQEGSKVQKIDVHGTEMVSHLEKHTEEVNQASQFHQYVQETVIDTPEDEEIPKVSTKLLKEQFEKSAQEKILYSDKEMTTPAKQIKKLLLQDKEICILCQKTVYPMECLVADKQNFHKSCFRCHHCNSKLSLGNYASLHGQIYCKPHFKQLFKSKGNYDEGFGHKQHKDRWNCKNQSRSVDFIPNEEPNMCKNIAENTLVPGDRNEHLDAGNSEGQRNDLRKLGERGKLKVIWPPSKEIPKKTLPFEEELKMSKPKWPPEMTTLLSPEFKSESLLEDVRTPENKGQRQDHFPFLQPYLQSTHVCQKEDVIGIKEMKMPEGRKDEKKEGRKNVQDRPSEAEDTKSNRKSAMDLNDNNNVIVQSAEKEKNEKTNQTNGAEVLQVTNTDDEMMPENHKENLNKNNNNNYVAVSYLNNCRQKTSILEFLDLLPLSSEANDTANEYEIEKLENTSRISELLGIFESEKTYSRNVLAMALKKQTDRAAAGSPVQPAPKPSLSRGLMVKGGSSIISPDTNLLNIKGSHSKSKNLHFFFSNTVKITAFSKKNENIFNCDLIDSVDQIKNMPCLDLREFGKDVKPWHVETTEAARNNENTGFDALSHECTAKPLFPRVEVQSEQLTVEEQIKRNRCYSDTE

SEQ ID NO: 12947 - protein, 1170 aa, Homo sapiens
MNMFLYFQTIIKEGMLTKQNNSFQRSKRRYFKLRGRTLYYAKTAKSIIFDEVDLTDASVAESSTKNVNNSFTVITPCRKLILCADNRKEMEDWIAALKTVQNREHFEPTQYSMDHFSGMHNWYACSHARPTYCNVCREALSGVTSHGLSCEVCKFKAHKRCAVRATNNCKWTTLASIGKDIIEDADGIAMPHQWLEGNLPVSAKCTVCDKTCGSVLRLQDWRCLWCKAMVHTSCKESLLTKCPLGLCKVSVIPPTALNSIDSDGFWKASCPPSCTSPLLVFVNSKSGDNQGVKFLRRFKQLLNPAQVFDLMNGGPHLGLRLFQKFDTFRILVCGGDGSVGWVLSEIDSLNLHKQCQLGVLPLGTGNDLARVLGWGSACDDDTQLPQILEKLERASTKMLDRWSVMAYEAKLPRQASSSTVTEDFSEDSEVQQILFYEDSVAAHLSKILTSDQHSVVISSAKVLCETVKDFVARVGKAYEKTTESSEESEVMAKKCSVLKEKLDSLLKTLDDESQASSSLPNPPPTIAEEAEDGDGSGSICGSTGDRLVASACPARPQIFRPREQLMLRANSLKKAIRQIIEHTEKAVDEQNAQTQEQEGFVLGLSESEEKMDHRVCPPLSHSESFGVPKGRSQRKVSKSPCEKLISKGSLSLGSSASLPPQPGSRDGLPALNTKILYPNVRAGMSGSLPGGSVISRLLINADPFNSEPETLEYYTEKCVMNNYFGIGLDAKISLDFNNKRDEHPEKCRSRTKNMMWYGVLGTKELLHRTYKNLEQKVLLECDGRPIPLPSLQGIAVLNIPSYAGGTNFWGGTKEDDTFAAPSFDDKILEVVAVFGSMQMAVSRVIRLQHHRIAQCRTVKISILGDEGVPVQVDGEAWVQPPGYIRIVHKNRAQTLTRDRAFESTLKSWEDKQKCELPRPPSCSLHPEMLSEEEATQMDQFGQAAGVLIHSIREIAQSHRDMEQELAHAVNASSKSMDRVYGKPRTTEGLNCSFVLEMVNNFRALRSETELLLSGKMALQLDPPQKEQLGSALAEMDRQLRRLADTPWLCQSAEPGDEESVMLDLAKRSRSGKFRLVTKFKKEKNNKNKEAHSSLGAPVHLWGTEEVAAWLEHLSLCEYKDIFTRHDIRGSELLHLERRDLKDLGVTKVGHMKRILCGIKELSRSAPAVEA

SEQ ID NO: 12948 - protein, 961 aa, Homo sapiens
MKKFFDSRREQGGSGLGSGSSGGGGSTSGLGSGYIGRVFGIGRQQVTVDEVLAEGGFAIVFLVRTSNGMKCALKRMFVNNEHDLQVCKREIQIMRDLSGHKNIVGYIDSSINNVSSGDVWEVLILMDFCRGGQVVNLMNQRLQTGFTENEVLQIFCDTCEAVARLHQCKTPIIHRDLKVENILLHDRGHYVLCDFGSATNKFQNPQTEGVNAVEDEIKKYTTLSYRAPEMVNLYSGKIITTKADIWALGCLLYKLCYFTLPFGESQVAICDGNFTIPDNSRYSQDMHCLIRYMLEPDPDKRPDIYQVSYFSFKLLKKECPIPNVQNSPIPAKLPEPVKASEAAAKKTQPKARLTDPIPTTETSIAPRQRPKAGQTQPNPGILPIQPALTPRKRATVQPPPQAAGSSNQPGLLASVPQPKPQAPPSQPLPQTQAKQPQAPPTPQQTPSTQAQGLPAQAQATPQHQQQLFLKQQQQQQQPPPAQQQPAGTFYQQQQAQTQQFQAVHPATQKPAIAQFPVVSQGGSQQQLMQNFYQQQQQQQQQQQQQQLATALHQQQLMTQQAALQQKPTMAAGQQPQPQPAAAPQPAPAQEPAIQAPVRQQPKVQTTPPPAVQGQKVGSLTPPSSPKTQRAGHRRILSDVTHSAVFGVPASKSTQLLQAAAAEASLNKSKSATTTPSGSPRTSQQNVYNPSEGSTWNPFDDDNFSKLTAEELLNKDFAKLGEGKHPEKLGGSAESLIPGFQSTQGDAFATTSFSAGTAEKRKGGQTVDSGLPLLSVSDPFIPLQVPDAPEKLIEGLKSPDTSLLLPDLLPMTDPFGSTSDAVIEKADVAVESLIPGLEPPVPQRLPSQTESVTSNRTDSLTGEDSLLDCSLLSNPTTDLLEEFAPTAISAPVHKAAEDSNLISGFDVPEGSDKVAEDEFDPIPVLITKNPQGGHSRNSSGSSESSLPNLARSLLLVDQLIDL

SEQ ID NO: 12949 - protein, 971 aa, Homo sapiens
MRMSDTVTVKDETATMKDLEAEVKDTTRVENLIKSENYGKILVEKNEHCIENNIDLQEKIQIQLTQSFEKEEKPSKDEAEKEKASDKLPRKMLSRDSSQEYTDSTGIDLHEFLVNTLKNNPRDRMMLLKLEQEILDFIGNNESPRKKFPPMTSYHRMLLHRVAAYFGLDHNVDQSGKSVIVNKTSNTRIPDQKFNEHIKDDKGEDFQKRYILKRDNSSFDKDDNQMRIRLKDDRRSKSIEEREEEYQRARDRIFSQDSLCSQENYIIDKRLQDEDASSTQQRRQIFRVNKDASGRSTNSHQSSTENELKYSEPRPWSSTDSDSSLRNLKPAVTKASSFSGISVLTRGDSSGSSKSIGRLSKTGQPFINPDGSPVVYNPPMTQQPVRSQVPGPPQPPLPAPPQQPAANHIFSQQDNLGSQFSHMSLARQPSADGSDPHAAMFQSTVVLQSPQQSGYIMTAAPPPHPPPPPPPPPPPPPLPPGQPVPTAGYPASGHPVSQPVLQQQGYIQQPSPQMPACYCAPGHYHSSQPQYRPVPSVHYNSHLNQPLPQPAQQTGYQVIPNQQQNYQGIVGVQQPQSQSLVSGQPNSIGNQIQGVVIPYTSVPTYQVSLPQGSQGIPHQTYQQPVMFPNQSNQGSMPTTGMPVYYSVIPPGQQNNLSSSVGYLQHPGSEQVQFPRTTSPCSSQQLQGHQCTAGPPPPPGGGMVMMQLSVPNNPQSCAHSPPQWKQNKYYCDHQRGQKCVEFSSVDNIVQHSPQLSSPIISPAQSPAPAQLSTLKTVRPSGPPLSIMPQFSRPFVPGQGDSRYPLLGQPLQYNPPAVLHGHIPNQQGQPGSRHGNRGRRQAKKAASTDLGAGETVVGKVLEITELPDGITRMEAEKLFGELFKIGAKIRWLRDPQSQPRRHPLCCGSGDNTANPERSKPSDLASTYTVLATFPSISAAQNALKKQINSVNKFKLRTSKKHYDFHILERASSQ

SEQ ID NO: 12950 - protein, 930 aa, Homo sapiens
MCSGSGRRRSSLSPTMRPGTGAERGGLMMGHPGMHYAPMGMHPMGQRANMPPVPHGMMPQMMPPMGGPPMGQMPGMMSSVMPGMMMSHMSQASMQPALPPGVNSMDVAAGTASGAKSMWTEHKSPDGRTYYYNTETKQSTWEKPDDLKTPAEQLLSKCPWKEYKSDSGKPYYYNSQTKESRWAKPKELEDLEGYQNTIVAGSLITKSNLHAMIKAEESSKQEECTTTSTAPVPTTEIPTTMSTMAAAEAAAAVVAAAAAAAAAAAAANANASTSASNTVSGTVPVVPEPEVTSIVATVVDNENTVTISTEEQAQLTSTPAIQDQSVEVSSNTGEETSKQETVADFTPKKEEEESQPAKKTYTWNTKEEAKQAFKELLKEKRVPSNASWEQAMKMIINDPRYSALAKLSEKKQAFNAYKVQTEKEEKEEARSKYKEAKESFQRFLENHEKMTSTTRYKKAEQMFGEMEVWNAISERDRLEIYEDVLFFLSKKEKEQAKQLRKRNWEALKNILDNMANVTYSTTWSEAQQYLMDNPTFAEDEELQNMDKEDALICFEEHIRALEKEEEEEKQKSLLRERRRQRKNRESFQIFLDELHEHGQLHSMSSWMELYPTISSDIRFTNMLGQPGSTALDLFKFYVEDLKARYHDEKKIIKDILKDKGFVVEVNTTFEDFVAIISSTKRSTTLDAGNIKLAFNSLLEKAEAREREREKEEARKMKRKESAFKSMLKQAAPPIELDAVWEDIRERFVKEPAFEDITLESERKRIFKDFMHVLEHECQHHHSKNKKHSKKSKKHHRKRSRSRSGSDSDDDDSHSKKKRQRSESRSASEHSSSAESERSYKKSKKHKKKSKKRRHKSDSPESDAEREKDKKEKDRESEKDRTRQRSESKHKSPKKKTGKDSGNWDTSGSELSEGELEKRRRTLLEQLDDDQ

SEQ ID NO: 12951 - protein, 2116 aa, Homo sapiens
MSGFRLGDHVWLEPPSTHKTGVAIGGIIKEAKPGKVLVEDDEGKEHWIRAEDFGVLSPMHPNSVQGVDDMIRLGDLNEAGMVHNLLIRYQQHKIYTYTGSILVAVNPFQVLPLYTLEQVQLYYSRHMGELPPHVFAIANNCYFSMKRNKRDQCCIISGESGAGKTETTKLILQFLATISGQHSWIEQQVLEANPILEAFGNAKTIRNDNSSRFGKYIDIYFNPSGVIEGARIEQFLLEKSRVCRQAPEERNYHIFYCMLMGVSAEDKQLLSLGTPSEYHYLTMGNCTSCEGLNDAKDYAHIRSAMKILQFSDSESWDVIKLLAAILHLGNVGFMASVFENLDASDVMETPAFPTVMKLLEVQHQELRDCLIKHTILIRGEFVTRSLNIAQAADRRDAFVKGIYGHLFLWIVKKINAAIFTPPAQDPKNVRRAIGLLDIFGFENFENNSFEQLCINFANEHLQQFFVQHVFTMEQEEYRSENISWDYIHYTDNRPTLDLLALKPMSIISLLDEESRFPQGTDLTMLQKLNSVHANNKAFLQPKNIHDARFGIAHFAGEVYYQAEGFLEKNRDVLSTDILTLVYSSKNKFLREIFNLELAETKLGHGTIRQAKAGNHLFKSADSNKRPSTLGSQFKQSLDQLMKILTNCQPYFIRCIKPNEYKKPLLFDRELCLRQLRYSGMMETVHIRKSGFPIRYTFEEFSQRFGVLLPNAMRMQLQGKLRQMTLGITDVWLRTDKDWKAGKTKIFLRDHQDTLLEVQRSQVLDRAALSIQKVLRGYRYRKEFLRQRRAAVTLQAWWRGYCNRRNFKLILVGFERLQAIARSQPLARQYQAMRQRTVQLQALCRGYLVRQQVQAKRRAVVVIQAHARGMAARRNFQQRKANAPLVIPAEGQKSQGALPAKKRRSIYDTVTDTEMVEKVFGFLPAMIGGQEGQASPHFEDLESKTQKLLEVDLDTVPMAEEPEEDVDGLAEYTFPKFAVTYFQKSASHTHIRRPLRYPLLYHEDDTDCLAALVIWNVILRFMGDLPEPVLYARSSQQGSSVMRQIHDTLGREHGAQVPQHSRSAQVASQLNIGEEALEPDGLGADRPMSNLEKVHFIVGYAILRPSLRDEIYCQICKQLSENFKTSSLARGWILLSLCLGCFPPSERFMKYLLNFIGQGPATYGPFCAERLRRTYANGVRAEPPTWLELQAVKSKKHIPIQVILATGESLTVPVDSASTSREMCMHIAHKQGLSDHLGFSLQVAVYDKFWSLGSGRDHMMDAIARCEQMAQERGESQRQSPWRIYFRKEFFTPWHDSREDPVSTELIYRQVLRGVWSGEYSFEKEEELVELLARHCYVQLGASAESKAVQELLPSCIPHKLYRTKPPDRWASLVTAACAKAPYTQKQVTPLAVREQVVDAARLQWPLLFSRLFEVITLSGPRLPKTQLILAVNWKGLCFLDQQEKMLLELSFPEVMGLATNREAQGGQRLLLSTMHEEYEFVSPSSVAIAELVALFLEGLKERSIFAMALQDRKATDDTTLLAFKKGDLLVLTKKQGLLASENWTLGQNDRTGKTGLVPMACLYTIPTVTKPSAQLLSLLAMSPEKRKLAAQEGQFTEPRPEEPPKEKLHTLEEFSYEFFRAPEKDMVSMAVLPLARARGHLWAYSCEPLRQPLLKRVHANVDLWDIACQIFVAILRYMGDYPSRQAWPTLELTDQIFTLALQHPALQDEVYCQILKQLTHNSNRHSEERGWQLLWLCTGLFPPSKGLLPHAQKFIDTRRGKLLAPDCSRRIQKVLRTGPRKQPPHQVEVEAAEQNVSRICHKIYFPNDTSEMLEVVANTRVRDVCDSIATRLQLASWEGCSLFIKISDKVISQKEGDFFFDSLREVSDWVKKNKPQKEGAPVTLPYQVYFMRKLWLNISPGKDVNADTILHYHQELPKYLRGFHKCSREDAIHLAGLIYKAQFNNDRSQLASVPKILRELVPENLTRLMSSEEWKKSILLAYDKHKDKTVEEAKVAFLKWICRWPTFGSAFFEVKQTSEPSYPDVILIAINRHGVLLIHPKTKDLLTTYPFTKISSWSSGSTYFHMALGSLGRGSRLLCETSLGYKMDDLLTSYVQQLLSAMNKQRGSKAPALAST

SEQ ID NO: 12952 - protein, 413 aa, Homo sapiens
MSGFSPELIDYLEGKISFEEFERRREERKTREKKSLQEKGKLSAEENPDDSEVPSSSGINSTKSQDKDVNEGETSDGVRKSVHKVFASMLGENEDDEEEEEEEEEEEEEEETPEQPTAGDVFVLEMVLNRETKKMMKEKRPRSKLPRALRGLMGEANIRFARGEREEAILMCMEIIRQAPLAYEPFSTLAMIYEDQGDMEKSLQFELIAAHLNPSDTEEWVRLAEMSLEQDNIKQAIFCYTKALKYEPTNVRYLWERSSLYEQMGDHKMAMDGYRRILNLLSPSDGERFMQLARDMAKSYYEANDVTSAINIIDEAFSKHQGLVSMEDVNIAAELYISNKQYDKALEIITDFSGIVLEKKTSEEGTSEENKAPENVTCTIPDGVPIDITVKLMVCLVHLNILEPLNVCNKICT

SEQ ID NO: 12953 - protein, 433 aa, Homo sapiens
MALTLFDTDEYRPPVWKSYLYQLQQEAPHPRRITCTCEVENRPKYYGREFHGMISREAADQLLIVAEGSYLIRESQRQPGTYTLALRFGSQTRNFRLYYDGKHFVGEKRFESIHDLVTDGLITLYIETKAAEYIAKMTINPIYEHVGYTTLNREPAYKKHMPVLKETHDERDSTGQDGVSEKRVHTFRGPHWCEYCANFMWGLIAQGVKCADCGLNVHKQCSKMVPNDCKPDLKHVKKVYSCDLTTLVKAHTTKRPMVVDMCIREIESRGLNSEGLYRVSGFSDLIEDVKMAFDRDGEKADISVNMYEDINIITGALKLYFRDLPIPLITYDAYPKFIESAKIMDPDEQLETLHEALKLLPPAHCETLRYLMAHLKRVTLHEKENLMNAENLGIVFGPTLMRSPELDAMAALNDIRYQRLVVELLIKNEDILF

SEQ ID NO: 12954 - protein, 206 aa, Homo sapiens
MECLYYFLGFLLLAARLPLDAAKRFHDVLGNERPSAYMREHNQLNGWSSDENDWNEKLYPVWKRGDMRWKNSWKGGRVQAVLTSDSPALVGSNITFAVNLIFPRCQKEDANGNIVYEKNCRNEAGLSADPYVYNWTAWSEDSDGENGTGQSHHNVFPDGKPFPHHPGWRRWNFIYVFHTLGWLLQTPKLLLYLSLKFQPSLFLLYN

SEQ ID NO: 12955 - protein, 447 aa, Homo sapiens
MKVLLRLICFIALLISSLEADKCKEREEKIILVSSANEIDVRPCPLNPNEHKGTITWYKDDSKTPVSTEQASRIHQHKEKLWFVPAKVEDSGHYYCVVRNSSYCLRIKISAKFVENEPNLCYNAQAIFKQKLPVAGDGGLVCPYMEFFKNENNELPKLQWYKDCKPLLLDNIHFSGVKDRLIVMNVAEKHRGNYTCHASYTYLGKQYPITRVIEFITLEENKPTRPVIVSPANETMEVDLGSQIQLICNVTGQLSDIAYWKWNGSVIDEDDPVLGEDYYSVENPANKRRSTLITVLNISEIESRFYKHPFTCFAKNTHGIDAAYIQLIYPVTNFQKHMIGICVTLTVIIVCSVFIYKIFKIDIVLWYRDSCYDFLPIKASDGKTYDAYILYPKTVGEGSTSDCDIFVFKVLPEVLEKQCGYKLFIYGRDDYVGEGMCVMEQSKGLLL

SEQ ID NO: 12956 - protein, 297 aa, Homo sapiens
MGRKKIQISRILDQRNRQVTFTKRKFGLMKKAYELSVLCDCEIALIIFNSANRLFQYASTDMDRVLLKYTEYSEPHESRTNTDILEVPQTLKRRGIGLDGPELEPDEGPEEPGEKFRRLAGEGGDPALPRPRLYPAAPAMPSPDVVYGALPPPGCDPSGLGEALPAQSRPSPFRPAAPKAGPPGLVHPLFSPSHLTSKTPPPLYLPTEGRRSDLPGGLAGPRGGLNTSRSLYSGLQNPCSTATPGPPLGSFPFLPGGPPEYGLGDPPPPPGLLQPPTLAPWQPSRGDGPPAVSSQPR

SEQ ID NO: 12957 - protein, 1253 aa, Homo sapiens
MMNVPGGGAAAVMMTGYNNGRCPRNSLYSDCIIEEKTVVLQKKDNEGFGFVLRGAKADTPIEEFTPTPAFPALQYLESVDEGGVAWQAGLRTGDFLIEVNNENVVKVGHRQVVNMIRQGGNHLVLKVVTVTRNLDPDDTARKKAPPPPKRAPTTALTLRSKSMTSELEELVDKDKPEEIVPASKPSRAAENMAVEPRVATIKQRPSSRCFPAGSDMNSVYERQGIAVMTPTVPGSPKAPFLGIPRGTMRRQKSIDSRIFLSGITEEERQFLAPPMLKFTRSLSMPDTSEDIPPPPQSVPPSPPPPSPTTYNCPKSPTPRVYGTIKPAFNQNSAAKVSPATRSDTVATMMREKGMYFRRELDRYSLDSEDLYSRNAGPQANFRNKRGQMPENPYSEVGKIASKAVYVPAKPARRKGMLVKQSNVEDSPEKTCSIPIPTIIVKEPSTSSSGKSSQGSSMEIDPQAPEPPSQLRPDESLTVSSPFAAAIAGAVRDREKRLEARRNSPAFLSTDLGDEDVGLGPPAPRTRPSMFPEEGDFADEDSAEQLSSPMPSATPREPENHFVGGAEASAPGEAGRPLNSTSKAQGPESSPAVPSASSGTAGPGNYVHPLTGRLLDPSSPLALALSARDRAMKESQQGPKGEAPKADLNKPLYIDTKMRPSLDAGFPTVTRQNTRGPLRRQETENKYETDLGRDRKGDDKKNMLIDIMDTSQQKSAGLLMVHTVDATKLDNALQEEDEKAEVEMKPDSSPSEVPEGVSETEGALQISAAPEPTTVPGRTIVAVGSMEEAVILPFRIPPPPLASVDLDEDFIFTEPLPPPLEFANSFDIPDDRAASVPALSDLVKQKKSDTPQSPSLNSSQPTNSADSKKPASLSNCLPASFLPPPESFDAVADSGIEEVDSRSSSDHHLETTSTISTVSSISTLSSEGGENVDTCTVYADGQAFMVDKPPVPPKPKMKPIIHKSNALYQDALVEEDVDSFVIPPPAPPPPPGSAQPGMAKVLQPRTSKLWGDVTEIKSPILSGPKANVISELNSILQQMNREKLAKPGEGLDSPMGAKSASLAPRSPEIMSTISGTRSTTVTFTVRPGTSQPITLQSRPPDYESRTSGTRRAPSPVVSPTEMNKETLPAPLSAATASPSPALSDVFSLPSQPPSGDLFGLNPAGRSRSPSPSILQQPISNKPFTTKPVHLWTKPDVADWLESLNLGEHKEAFMDNEIDGSHLPNLQKEDLIDLGVTRVGHRMNIERALKQLLDR

SEQ ID NO: 12958 - protein, 577 aa, Homo sapiens
MPEGAQGLSLSKPSPSLGCGRRGEVCDCGTVCETRTAPAAPTMASPRGSGSSTSLSTVGSEGDPAPGPTPACSASRPEPLPGPPIRLHLSPVGIPGSARPSRLERVAREIVETERAYVRDLRSIVEDYLGPLLDGGVLGLSVEQVGTLFANIEDIYEFSSELLEDLENSSSAGGIAECFVQRSEDFDIYTLYCMNYPSSLALLRELSLSPPAALWLQERQAQLRHSLPLQSFLLKPVQRILKYHLLLQELGKHWAEGPGTGGREMVEEAIVSMTAVAWYINDMKRKQEHAARLQEVQRRLGGWTGPELSAFGELVLEGAFRGGGGGGPRLRGGERLLFLFSRMLLVAKRRGLEYTYKGHIFCCNLSVSESPRDPLGFKVSDLTIPKHRHLLQAKNQEEKRLWIHCLQRLFFENHPASIPAKAKQVLLENSLHCAPKSKPVLEPLTPPLGSPRPRDARSFTPGRRNTAPSPGPSVIRRGRRQSEPVKDPYVMFPQNAKPGFKHAGSEGELYPPESQPPVSGSAPPEDLEDAGPPTLDPSGTSITEEILELLNQRGLRDPGESMGLHRAQGAPDAPFHM

SEQ ID NO: 12959 - protein, 906 aa, Homo sapiens
MFGRSRSWVGGGHGKTSRNIHSLDHLKYLYHVLTKNTTVTEQNRNLLVETIRSITEILIWGDQNDSSVFDFFLEKNMFVFFLNILRQKSGRYVCVQLLQTLNILFENISHETSLYYLLSNNYVNSIIVHKFDFSDEEIMAYYISFLKTLSLKLNNHTVHFFYNEHTNDFALYTEAIKFFNHPESMVRIAVRTITLNVYKVDNQAMLHYIRDKTAVPYFSNLVWFIGSHVIELDDCVQTDEEHRNRGKLSDLVAEHLDHLHYLNDILIINCEFLNDVLTDHLLNRLFLPLYVYSLENQDKGGERPKISLPVSLYLLSQVFLIIHHAPLVNSLAEVILNGDLSEMYAKTEQDIQRSSAKPSIRCFIKPTETLERSLEMNKHKGKRRVQKRPNYKNVGEEEDEEKGPTEDAQEDAEKAKEIEMVIMERSKLSELAASTSVQEQNTTDEEKSAAATCSESTQWSRPFLDMVYHALDSPDDDYHALFVLCLLYAMSHNKGMDPEKLERIQLPVPNAAEKTTYNHPLAERLIRIMNNAAQPDGKIRLATLELSCLLLKQQVLMSAGCIMKDVHLACLEGAREESVHLVRHFYKGEDIFLDMFEDEYRSMTMKPMNVEYLMMDASILLPPTGTPLTGIDFVKRLPCGDVEKTRRAIRVFFMLRSLSLQLRGEPETQLPLTREEDLIKTDDVLDLNNSDLIACTVITKDGGMVQRFLAVDIYQMSLVEPDVSRLGWGVVKFAGLLQDMQVTGVEDDSRALNITIHKPASSPHSKPFPILQATFIFSDHIRCIIAKQRLAKGRIQARRMKMQRIAALLDLPIQPTTEVLGFGLGSSTSTQHLPFRFYDQGRRGSSDPTVQRSVFASVDKVPGEPAPRPAPQLVHHGGRSRSFSLWSLCELPFLSQKPRRLAAPAS

SEQ ID NO: 12960 - protein, 1314 aa, Homo sapiens
MKHLYGLFHYNPMMLGLESLPDPTDTWEIIETIGKGTYGKVYKVTNKRDGSLAAVKILDPVSDMDEEIEAEYNILQFLPNHPNVVKFYGMFYKADHCVGGQLWLVLELCNGGSVTELVKGLLRCGQRLDEAMISYILYGALLGLQHLHNNRIIHRDVKGNNILLTTEGGVKLVDFGVSAQLTSTRLRRNTSVGTPFWMAPEVIACEQQYDSSYDARCDVWSLGITAIELGDGDPPLFDMHPVKTLFKIPRNPPPTLLHPEKWCEEFNHFISQCLIKDFERRPSVTHLLDHPFIKGVHGKVLFLQKQLAKVLQDQKHQNPVAKTRHERMHTRRPYHVEDAEKYCLEDDLVNLEVLDEDTIIHQLQKRYADLLIYTYVGDILIALNPFQNLSIYSPQFSRLYHGVKRASNPPHIFASADAAYQCMVTLSKDQCIVISGESGSGKTESAHLIVQHLTFLGKANNQTLREKILQVNSLVEAFGNSCTAINDNSSRFGKYLEMMFTPTGVVMGARISEYLLEKSRVIKQAAREKNFHIFYYIYAGLHHQKKLSDFRLPEEKPPRYIADETGRVMHDITSKESYRRQFEAIQHCFRIIGFTDKEVHSVYRILAGILNIGNIEFAAISSQHQTDKSEVPNAEALQNAASVLCISPEELQEALTSHCVVTRGETIIRANTVDRAADVRDAMSKALYGRLFSWIVNRINTLLQPDENICSAGGGMNVGILDIFGFENFQRNSFEQLCINIANEQIQYYFNQHVFALEQMEYQNEGIDAVPVEYEDNRPLLDMFLQKPLGLLALLDEESRFPQATDQTLVDKFEDNLRCKYFWRPKGVELCFGIQHYAGKVLYDASGVLEKNRDTLPADVVVVLRTSENKLLQQLFSIPLTKTGNLAQTRARITVASSSLPPHFSAGKAKVDTLEVIRHPEETTNMKRQTVASYFRYSLMDLLSKMVVGQPHFVRCIKPNDDREALQFSRERVLAQLRSTGILETVSIRRQGYSHRILFEEFVKRYYYLAFTAHQTPLASKESCVAILEKSRLDHWVLGKTKVFLKYYHVEQLNLLLREVIGRVVVLQAYTKGWLGARRYKRVREKREKGAIAIQSGDTSNQSSGPHSPVAAGTRGSAEVQDCSEPGDHKVLRGSVHRRSHSQAESNNGRTQTSSNSPAVTEKNGHSQAQSSPKGCDIFAGHANKHSVSGTDLLSSRICHPAPDQQGLSLWGAPQKPGSENGLAQKHRTPRRRCQQPKMLSSPEDTMYYNQLNGTLEYQGSKRKPRKLGQIKVLDGEDEYYKSLSPVDCIPEENNSAHPSFFSSSSKGDSFAQH

SEQ ID NO: 12961 - protein, 571 aa, Homo sapiens
MSREAGSCRVGTGARARSRKPKKPHYIPRPWGKPYNYKCFQCPFTCLEKSHLYNHMKYSLCKDSLSLLLDSPDWACRRGSTTPRPHAPTPDRPGESDPGRQPQGARPTGAAPAPDLVVADIHSLHCGGGPKSRAKGSPGPPPPVARATRKGPGPSGLLPESWKPGMGGDPRGVGAGDMASAGPEGSVPCYPPPAPGEFPEAHSLHLSLLGVNYPLSPGLFSYLGPSLAAAAHVPFLASASPLLPPATAFPAVQPPQRPTPAPRLYYPLLLEHTLGLPAGKAALAKAPVSPRSPSGTPAPGLLKVPVPGLGPWPRVTPRDPGQEGELERAAQSDPRRRLSLGSRLELPKASPSLTRFCSRSSLPTGSSVMLWPEDGDPGGPETPGPEGPLPLQPRGPVPGSPEHVGEDLTRALGDYARVEQRLGQLGPAGGLAPRPLREQLGKIRLELLTIHQALEQAVRPPDAPLDLSVKRAPAKGPQALGEAWGRPELGPVLTGGTPEPPGMLGPAAPQPFSGHTTKCEADSSVPPPGLPLAAPDDPVIPGSGWGTCVATRSSQTPEAVCGLQSPQGAEV

SEQ ID NO: 12962 - protein, 652 aa, Homo sapiens
MSSQGSPSVALSTTTVSSVAVQAGDSKIVIAVIKCGKWVQLQLAESQPNLLEIGSSQDETKKLLHDHELLLAKLKALEDRVWELLQEADKTAEENKDQSQVYDAMAETLGEAWAALVSMLERRTELLRLTSEFFENALEFAIKIDQAEDFLQNTHEFESAESLKSLLQLHEHHTKELLERSLALLNKSQQLTDFIEKFKCEGPNVNPELTQGAHSSCLKVDRLLELLQDRRRQLDKYLKQQWQELSQVLQICQWDQQENQVTCWFQKTIRNLQEQSLGSSLSDNEDRIHKQEELIIKAKEWNSAVEKLKSEALRILLSKDYVEKEHLQLSHQKLSQLQEEFGQLMVERNTWLKKANEFFNSANKAFDVLGRVEAYLKLLKSEGLSLAVLAVRHEELHRKIKDCTTDALQKGQTLISQVDSCSSQVSGIHEMMGCIKRRVDHLTEQCSAHKEYALKKQQLTASVEGYLRKVEMSIQKISPVLSNAMDVGSTRSESEKILNKYLELDIQAKETSHELEAAAKTMMEKNEFVSDEMVSLSSKARWLAEELNLFGQSIDYRSQVLQTYVAFLKSSEEVEMQFQSLKEFYETEIPQKEQDDAKAKHCSDSAEKQWQLFLKKSFITQDLGLEFLNLINMVRMALNGSHLLQGYSSKSK

SEQ ID NO: 12963 - protein, 620 aa, Homo sapiens
MMRSRSKSPRRPSPTARGANCDVELLKTTTRDREELKCMLEKYERHLAEIQGNVKVLKSERDKIFLLYEQAQEEITRLRREMMKSCKSPKSTTAHAILRRVETERDVAFTDLRRMTTERDSLRERLKIAQETAFNEKAHLEQRIEELECTVHNLDDERMEQMSNMTLMKETISTVEKEMKSLARKAMDTESELGRQKAENNSLRLLYENTEKDLSDTQRHLAKKKYELQLTQEKIMCLDEKIDNFTRQNIAQREEISILGGTLNDLAKEKECLQACLDKKSENIASLGESLAMKEKTISGMKNIIAEMEQASRQCTEALIVCEQDVSRMRRQLDETNDELAQIARERDILAHDNDNLQEQFAKAKQENQALSKKLNDTHNELNDIKQKVQDTNLEVNKLKNILKSEESENRQMMEQLRKANEDAENWENKARQSEADNNTLKLELITAEAEGNRLKEKVDSLNREVEQRENELDSAHSEIELLRSQMANERISMQNLEALLVANRDKEYQSQIALQEKESEIQLLKEHLCLAENKMAIQSRDVAQFRNVVTQLEADLDITKRQLGTERFERERAVQELRRQNYSSNAYHMSSTMKPNTKCHSPERAHHRSPDRGLDRSLE

SEQ ID NO: 12964 - protein, 457 aa, Homo sapiens
MPEEMDKPLISLHLVDSDSSLAKVPDEAPKVGILGSGDFARSLATRLVGSGFKVVVGSRNPKRTARLFPSAAQVTFQEEAVSSPEVIFVAVFREHYSSLCSLSDQLAGKILVDVSNPTEQEHLQHRESNAEYLASLFPTCTVVKAFNVISAWTLQAGPRDGNRQVPICGDQPEAKRAVSEMALAMGFMPVDMGSLASAWEVEAMPLRLLPAWKVPTLLALGLFVCFYAYNFVRDVLQPYVQESQNKFFKLPVSVVNTTLPCVAYVLLSLVYLPGVLAAALQLRRGTKYQRFPDWLDHWLQHRKQIGLLSFFCAALHALYSFCLPLRRAHRYDLVNLAVKQVLANKSHLWVEEEVWRMEIYLSLGVLALGTLSLLAVTSLPSIANSLNWREFSFVQCVATSSAGNTGSGTRRPESQSQDPHLPAPHHQTSFLGPRSFCCSLVPVSTPYGHQEDLSWTR

SEQ ID NO: 12965 - protein, 2102 aa, Homo sapiens
MLCCLLVRASNLPSAKKDRRSDPVASLTFRGVKKRTKVIKNSVNPVWNEGFEWDLKGIPLDQGSELHVVVKDHETMGRNRFLGEAKVPLREVLATPSLSASFNAPLLDTKKQPTGASLVLQVSYTPLPGAVPLFPPPTPLEPSPTLPDLDVVADTGGEEDTEDQGLTGDEAEPFLDQSGGPGAPTTPRKLPSRPPPHYPGIKRKRSAPTSRKLLSDKPQDFQIRVQVIEGRQLPGVNIKPVVKVTAAGQTKRTRIHKGNSPLFNETLFFNLFDSPGELFDEPIFITVVDSRSLRTDALLGEFRMDVGTIYREPRHAYLRKWLLLSDPDDFSAGARGYLKTSLCVLGPGDEAPLERKDPSEDKEDIESNLLRPTGVALRGAHFCLKVFRAEDLPQMDDAVMDNVKQIFGFESNKKNLVDPFVEVSFAGKMLCSKILEKTANPQWNQNITLPAMFPSMCEKMRIRIIDWDRLTHNDIVATTYLSMSKISAPGGEIEEEPAGAVKPSKASDLDDYLGFLPTFGPCYINLYGSPREFTGFPDPYTELNTGKGEGVAYRGRLLLSLETKLVEHSEQKVEDLPADDILRVEKYLRRRKYSLFAAFYSATMLQDVDDAIQFEVSIGNYGNKFDMTCLPLASTTQYSRAVFDGCHYYYLPWGNVKPVVVLSSYWEDISHRIETQNQLLGIADRLEAGLEQVHLALKAQCSTEDVDSLVAQLTDELIAGCSQPLGDIHETPSATHLDQYLYQLRTHHLSQITEAALALKLGHSELPAALEQAEDWLLRLRALAEEPQNSLPDIVIWMLQGDKRVAYQRVPAHQVLFSRRGANYCGKNCGKLQTIFLKYPMEKVPGARMPVQIRVKLWFGLSVDEKEFNQFAEGKLSVFAETYENETKLALVGNWGTTGLTYPKFSDVTGKIKLPKDSFRPSAGWTWAGDWFVCPEKTLLHDMDAGHLSFVEEVFENQTRLPGGQWIYMSDNYTDVNGEKVLPKDDIECPLGWKWEDEEWSTDLNRAVDEQGWEYSITIPPERKPKHWVPAEKMYYTHRRRRWVRLRRRDLSQMEALKRHRQAEAEGEGWEYASLFGWKFHLEYRKTDAFRRRRWRRRMEPLEKTGPAAVFALEGALGGVMDDKSEDSMSVSTLSFGVNRPTISCIFDYGNRYHLRCYMYQARDLAAMDKDSFSDPYAIVSFLHQSQKTVVVKNTLNPTWDQTLIFYEIEIFGEPATVAEQPPSIVVELYDHDTYGADEFMGRCICQPSLERMPRLAWFPLTRGSQPSGELLASFELIQREKPAIHHIPGFEVQETSRILDESEDTDLPYPPPQREANIYMVPQNIKPALQRTAIEILAWGLRNMKSYQLANISSPSLVVECGGQTVQSCVIRNLRKNPNFDICTLFMEVMLPREELYCPPITVKVIDNRQFGRRPVVGQCTIRSLESFLCDPYSAESPSPQGGPDDVSLLSPGEDVLIDIDDKEPLIPIQLADGLSSLAPTNTASPPSSPHEEEFIDWWSKFFASIGEREKCGSYLEKDFDTLKVYDTQLENVEAFEGLSDFCNTFKLYRGKTQEETEDPSVIGEFKGLFKIYPLPEDPAIPMPPRQFHQLAAQGPQECLVRIYIVRAFGLQPKDPNGKCDPYIKISIGKKSVSDQDNYIPCTLEPVFGKMFELTCTLPLEKDLKITLYDYDLLSKDEKIGETVVDLENRLLSKFGARCGLPQTYCVSGPNQWRDQLRPSQLLHLFCQQHRVKAPVYRTDRVMFQDKEYSIEEIEAGRIPNPHLGPVEERLALHVLQQQGLVPEHVESRPLYSPLQPDIEQGKLQMWVDLFPKALGRPGPPFNITPRRARRFFLRCIIWNTRDVILDDLSLTGEKMSDIYVKGWMIGFEEHKQKTDVHYRSLGGEGNFNWRFIFPFDYLPAEQVCTIAKKDAFWRLDKTESKIPARVVFQIWDNDKFSFDDFLGSLQLDLNRMPKPAKTAKKCSLDQLDDAFHPEWFVSLFEQKTVKGWWPCVAEEGEKKILAGKLEMTLEIVAESEHEERPAGQGRDEPNMNPKLEDPRRPDTSFLWFTSPYKTMKFILWRRFRWAIILFIILFILLLFLAIFIYAFPNYAAMKLVKPFS

SEQ ID NO: 12966 - protein, 813 aa, Homo sapiens
MTSFQEVPLQTSNFAHVIFQNVAKSYLPNAHLECHYTLTPYIHPHPKDWVGIFKVGWSTARDYYTFLWSPMPEHYVEGSTVNCVLAFQGYYLPNDDGEFYQFCYVTHKGEIRGASTPFQFRASSPVEELLTMEDEGNSDMLVVTTKAGLLELKIEKTMKEKEELLKLIAVLEKETAQLREQVGRMERELNHEKERCDQLQAEQKGLTEVTQSLKMENEEFKKRFSDATSKAHQLEEDIVSVTHKAIEKETELDSLKDKLKKAQHEREQLECQLKTEKDEKELYKVHLKNTEIENTKLMSEVQTLKNLDGNKESVITHFKEEIGRLQLCLAEKENLQRTFLLTTSSKEDTCFLKEQLRKAEEQVQATRQEVVFLAKELSDAVNVRDRTMADLHTARLENEKVKKQLADAVAELKLNAMKKDQDKTDTLEHELRREVEDLKLRLQMAADHYKEKFKECQRLQKQINKLSDQSANNNNVFTKKTGNQQKVNDASVNTDPATSASTVDVKPSPSAAEADFDIVTKGQVCEMTKEIADKTEKYNKCKQLLQDEKAKCNKYADELAKMELKWKEQVKIAENVKLELAEVQDNYKLQLAEKDKEISGLISHLENLSREKELKRSLENPAERKMEGQNSQSPQCFKTCSEQNGYVLTLSNAQPVLQYGNPYASQETRDGADGAFYPDEIQRPPVRVPSWGLEDNVVCSQPARNFSRPDGLEDSEDSKEDENVPTAPDPPSQHLRGHGTGFCFDSSFDVHKKCPLCELMFPPNYDQSKFEEHVESHWKVCPMCSEQFPPDYDQQVFERHVQTHFDQNVLNFD

SEQ ID NO: 12967 - protein, 1467 aa, Homo sapiens
MSDESASGSDPDLDPDVELEDAEEEEEEEEVAVEECDRDDEEDLLDDPSLEGMCGTEHAQLGEDGQQPPRCTSTTSSQSEPSEQLRRHQGKNLASEDPKKKRAQKPSHMRRNIRKLLREDQLEPVTKAAQQEELERRKRLEQQRKDYAAPIPTVPLEFLPEEIALRASDGPQLPPRVLAQEVICLDSSSGSEDEKSSRDEVIELSSGEEDTLHIVDSSESVSEDDEEEEKGGTHVNDVLNQRDALGRVLVNLNHPPEEENVFLAPQLARAVKPHQIGGIRFLYDNLVESLERFKTSSGFGCILAHSMGLGKTLQVISFIDVLFRHTPAKTVLAIVPVNTLQNWLAEFNMWLPPPEALPADNKPEEVQPRFFKVHILNDEHKTMASRAKVMADWVSEGGVLLMGYEMYRLLTLKKSFATGRPKKTKKRSHPVIIDLDEEDRQQEFRREFEKALCRPGPDVVICDEGHRIKNCQASTSQALKNIRSRRRVVLTGYPLQNNLIEYWCMVDFVRPDFLGTRQEFSNMFERPILNGQCIDSTPQDVRLMRYRSHVLHSLLEGFVQRRGHTVLKIHLPAKEENVILVRLSKIQRDLYTQFMDRFRDCGSSGWLGLNPLKAFCVCCKIWNHPDVLYEALQKESLANEQDLDVEELGSAGTSARCPPQGTKGKGEDSTLASSMGEATNSKFLQGVGFNPFQERGNNIVTYEWAKDLLTNYQTGVLENSPKMVLLFHLIEESVKLGDKILVFSQSLSTLALIEEFLGKREVPCPPGTEGQGAQKWVRNISYFRLDGSTPAFERERLINQFNDPSNLTTWLFLLSTRAGCLGVNLIGANRVVVFDASWNPCHDAQAVCRVYRYGQKKPCYIYRLVADYTLEKKIYDRQISKQGMSDRVVDDLNPMLNFTRKEVENLLHFVEKEPAPQVSLNVKGIKESVLQLACLKYPHLITKEPFEHESLLLNRKDHKLTKAEKKAAKKSYEEDKRTSVPYTRPSYAQYYPASDQSLTSIPAFSQRNWQPTLKGDEKPVASVRPVQSTPIPMMPRHVPLGGSVSSASSTNPSMNFPINYLQRAGVLVQKVVTTTDIVIPGLNSSTDVQARINAGESIHIIRGTKGTYIRTSDGRIFAVRATGKPKVPEDGRMAASGSQGPSCESTSNGRHSASSPKAPDPEGLARPVSPDSPEIISELQQYADVAAARESRQSSPSTNAALPGPPAQLMDSSAVPGTALGTEPRLGGHCLNSSLLVTGQPCGDRHPVLDLRGHKRKLATPPAAQESSRRRSRKGHLPAPVQPYEHGYPVSGGFAMPPVSLNHNLTTPFTSQAGENSLFMGSTPSYYQLSNLLADARLVFPVTTDPLVPAGPVSSSSTATSVTASNPSFMLNPSVPGILPSYSLPFSQPLLSEPRMFAPFPSPVLPSNLSRGMSIYPGYMSPHAGYPAGGLLRSQVPPFDSHEVAEVGFSSNDDEDKDDDVIEVTGK

SEQ ID NO: 12968 - protein, 630 aa, Homo sapiens
MSDKSELKAELERKKQRLAQIREEKKRKEEERKKKETDQKKEAVAPVQEESDLEKKRREAEALLQSMGLTPESPIAEQPLRVVTADTCLFHYLVPPPMSPSSKSVSTPSEAGSQDSGDGAVGSRRGPIKLGMAKITQVDFPPREIVTYTKETQTPVMAQPKEDEEEDDDVVAPKPPIEPEEEKTLKKDEENDSKAPPHELTEEEKQQILHSEEFLSFFDHSTRIVERALSEQINIFFDYSGRDLEDKEGEIQAGAKLSLNRQFFDERWSKHRVVSCLDWSSQYPELLVASYNNNEDAPHEPDGVALVWNMKYKKTTPEYVFHCQSAVMSATFAKFHPNLVVGGTYSGQIVLWDNRSNKRTPVQRTPLSAAAHTHPVYCVNVVGTQNAHNLISISTDGKICSWSLDMLSHPQDSMELVHKQSKAVAVTSMSFPVGDVNNFVVGSEEGSVYTACRHGSKAGISEMFEGHQGPITGIHCHAAVGAVDFSHLFVTSSFDWTVKLWTTKNNKPLYSFEDNADYVYDVMWSPTHPALFACVDGMGRLDLWNLNNDTEVPTASISVEGNPALNRVRWTHSGREIAVGDSEGQIVIYDVGEQIAVPRNDEWARFGRTLAEINANRADAEEEAATRIPA

SEQ ID NO: 12969 - protein, 744 aa, Homo sapiens
MDEKYVNSIWDLLKNAIQEIQRKNNSGLSFEELYRNAYTMVLHKHGEKLYTGLREVVTEHLINKVREDVLNSLNNNFLQTLNQAWNDHQTAMVMIRDILMYMDRVYVQQNNVENVYNLGLIIFRDQVVRYGCIRDHLRQTLLDMIARERKGEVVDRGAIRNACQMLMILGLEGRSVYEEDFEAPFLEMSAEFFQMESQKFLAENSASVYIKKVEARINEEIERVMHCLDKSTEEPIVKVVERELISKHMKTIVEMENSGLVHMLKNGKTEDLGCMYKLFSRVPNGLKTMCECMSSYLREQGKALVSEEGEGKNPVDYIQGLLDLKSRFDRFLLESFNNDRLFKQTIAGDFEYFLNLNSRSPEYLSLFIDDKLKKGVKGLTEQEVETILDKAMVLFRFMQEKDVFERYYKQHLARRLLTNKSVSDDSEKNMISKLKTECGCQFTSKLEGMFRDMSISNTTMDEFRQHLQATGVSLGGVDLTVRVLTTGYWPTQSATPKCNIPPAPRHAFEIFRRFYLAKHSGRQLTLQHHMGSADLNATFYGPVKKEDGSEVGVGGAQVTGSNTRKHILQVSTFQMTILMLFNNREKYTFEEIQQETDIPERELVRALQSLACGKPTQRVLTKEPKSKEIENGHIFTVNDQFTSKLHRVKIQTVAAKQGESDPERKETRQKVDDDRKHEIEAAIVRIMKSRKKMQHNVLVAEVTQQLKARFLPSPVVIKKRIEGLIEREYLARTPEDRKVYTYVA

SEQ ID NO: 12970 - protein, 1609 aa, Homo sapiens
MGSKRRRATSPSSSVSGDFDDGHHSVSTPGPSRKRRRLSNLPTVDPIAVCHELYNTIRDYKDEQGRLLCELFIRAPKRRNQPDYYEVVSQPIDLMKIQQKLKMEEYDDVNLLTADFQLLFNNAKSYYKPDSPEYKAACKLWDLYLRTRNEFVQKGEADDEDDDEDGQDNQGTVTEGSSPAYLKEILEQLLEAIVVATNPSGRLISELFQKLPSKVQYPDYYAIIKEPIDLKTIAQRIQNGSYKSIHAMAKDIDLLAKNAKTYNEPGSQVFKDANSIKKIFYMKKAEIEHHEMAKSSLRMRTPSNLAAARLTGPSHSKGSLGEERNPTSKYYRNKRAVQGGRLSAITMALQYGSESEEDAALAAARYEEGESEAESITSFMDVSNPFYQLYDTVRSCRNNQGQLIAEPFYHLPSKKKYPDYYQQIKMPISLQQIRTKLKNQEYETLDHLECDLNLMFENAKRYNVPNSAIYKRVLKLQQVMQAKKKELARRDDIEDGDSMISSATSDTGSAKRKSKKNIRKQRMKILFNVVLEAREPGSGRRLCDLFMVKPSKKDYPDYYKIILEPMDLKIIEHNIRNDKYAGEEGMIEDMKLMFRNARHYNEEGSQVYNDAHILEKLLKEKRKELGPLPDDDDMASPKLKLSRKSGISPKKSKYMTPMQQKLNEVYEAVKNYTDKRGRRLSAIFLRLPSRSELPDYYLTIKKPMDMEKIRSHMMANKYQDIDSMVEDFVMMFNNACTYNEPESLIYKDALVLHKVLLETRRDLEGDEDSHVPNVTLLIQELIHNLFVSVMSHQDDEGRCYSDSLAEIPAVDPNFPNKPPLTFDIIRKNVENNRYRRLDLFQEHMFEVLERARRMNRTDSEIYEDAVELQQFFIKIRDELCKNGEILLSPALSYTTKHLHNDVEKERKEKLPKEIEEDKLKREEEKREAEKSEDSSGAAGLSGLHRTYSQDCSFKNSMYHVGDYVYVEPAEANLQPHIVCIERLWEDSAEKEVFKSDYYNKVPVSKILGKCVVMFVKEYFKLCPENFRDEDVFVCESRYSAKTKSFKKIKLWTMPISSVRFVPRDVPLPVVRVASVFANADKGDDEKNTDNSEDSRAEDNFNLEKEKEDVPVEMSNGEPGCHYFEQLHYNDMWLKVGDCVFIKSHGLVRPRVGRIEKVWVRDGAAYFYGPIFIHPEETEHEPTKMFYKKEVFLSNLEETCPMTCILGKCAVLSFKDFLSCRPTEIPENDILLCESRYNESDKQMKKFKGLKRFSLSAKVVDDEIYYFRKPIVPQKEPSPLLEKKIQLLEAKFAELEGGDDDIEEMGEEDSEVIEPPSLPQLQTPLASELDLMPYTPPQSTPKSAKGSAKKEGSKRKINMSGYILFSSEMRAVIKAQHPDYSFGELSRLVGTEWRNLETAKKAEYEGMMGGYPPGLPPLQGPVDGLVSMGSMQPLHPGGPPPHHLPPGVPGLPGIPPPGVMNQGVAPMVGTPAPGGSPYGQQVGVLGPPGQQAPPPYPGPHPAGPPVIQQPTTPMFVAPPPKTQRLLHSEAYLKYIEGLSAESNSISKWDQTLAARRRDVHLSKEQESRLPSHWLKSKGAHTTMADALWRLRDLMLRDTLNIRQAYNLENV

SEQ ID NO: 12971 - protein, 866 aa, Homo sapiens
MTTFGAVAEWRLPSLRRATLWIPQWFAKKAIFNSPLEAAMAFPHLQQPSFLLASLKADSINKPFAQQCQDLVKVIEDFPAKELHTIFPWLVESIFGSLDGVLVGWNLRCLQGRVNPVEYSIVMEFLDPGGPMMKLVYKLQAEDYKFDFPVSYLPGPVKASIQECILPDSPLYHNKVQFTPTGGLGLNLALNPFEYYIFFFALSLITQKPLPVSLHVRTSDCAYFILVDRYLSWFLPTEGSVPPPLSSSPGGTSPSPPPRTPAIPFASYGLHHTSLLKRHISHQTSVNADPASHEIWRSETLLQVFVEMWLHHYSLEMYQKMQSPHAKLEVLHYRLSVSSALYSPAQPSLQALHAYQESFTPTEEHVLVVRLLLKHLHAFANSLKPEQASPSAHSHATSPLEEFKRAAVPRFVQQKLYLFLQHCFGHWPLDASFRAVLEMWLSYLQPWRYAPDKQAPGSDSQPRCVSEKWAPFVQENLLMYTKLFVGFLNRALRTDLVSPKHALMVFRVAKVFAQPNLAEMIQKGEQLFLEPELVIPHRQHRLFTAPTFTGSFLSPWPPAVTDASFKVKSHVYSLEGQDCKYTPMFGPEARTLVLRLAQLITQAKHTAKSISDQCAESPAGHSFLSWLGFSSMDTNGSYTANDLDEMGQDSVRKTDEYLEKALEYLRQIFRLSEAQLRQFTLALGTTQDENGKKQLPDCIVGEDGLILTPLGRYQIINGLRRFEIEYQGDPELQPIRSYEIASLVRTLFRLSSAINHRFAGQMAALCSRDDFLGSFCRYHLTEPGLASRHLLSPVGRRQVAGHTRGPRLSLRFLGSYRTLVSLLLAFFVASLFCVGPLPCTLLLTLGYVLYASAMTLLTERGKLHQP

SEQ ID NO: 12972 - protein, 778 aa, Homo sapiens
MLIGEIFELMQFLFVVAFTTFLVSCVDYDILFANKMVNHSLHPTEPVKVTLPDAFLPAQVCSARIQENGSLITILVIAGVFWIHRLIKFIYNICCYWEIHSFYLHALRIPMSALPYCTWQEVQARIVQTQKEHQICIHKRELTELDIYHRILRFQNYMVALVNKSLLPLRFRLPGLGEAVFFTRGLKYNFELILFWGPGSLFLNEWSLKAEYKRGGQRLELAQRLSNRILWIGIANFLLCPLILIWQILYAFFSYAEVLKREPGALGARCWSLYGRCYLRHFNELEHELQSRLNRGYKPASKYMNCFLSPLLTLLAKNGAFFAGSILAVLIALTIYDEDVLAVEHVLTTVTLLGVTVTVCRSFIPDQHMVFCPEQLLRVILAHIHYMPDHWQGNAHRSQTRDEFAQLFQYKAVFILEELLSPIVTPLILIFCLRPRALEIIDFFRNFTVEVVGVGDTCSFAQMDVRQHGHPQWLSAGQTEASVYQQAEDGKTELSLMHFAITNPGWQPPRESTAFLGFLKEQVQRDGAAASLAQGGLLPENALFTSIQSLQSESEPLSLIANVVAGSSCRGPPLPRDLQGSRHRAEVASALRSFSPLQPGQAPTGRAHSTMTGSGVDARTASSGSSVWEGQLQSLVLSEYASTEMSLHALYMHQLHKQQAQAEPERHVWHRRESDESGESAPDEGGEGARAPQSIPRSASYPCAAPRPGAPETTALHGGFQRRYGGITDPGTVPRVPSHFSRLPLGGWAEDGQSASRHPEPVPEEGSEDELPPQVHKV

SEQ ID NO: 12973 - protein, 575 aa, Homo sapiens
MQMYLPFCGIAISNAQLFAASRKEYERSRALLEVVNDLFEEQTDLEKIVKKIMHRAQTLLKCERCSVLLLEDIESPVVKFTKSFELMSPKCSADAENSFKESMEKSSYSDWLINNSIAELVASTGLPVNISDAYQDPRFDAEADQISGFHIRSVLCVPIWNSNHQIIGVAQVLNRLDGKPFDDADQRLFEAFVIFCGLGINNTIMYDQVKKSWAKQSVALDVLSYHATCSKAEVDKFKAANIPLVSELAIDDIHFDDFSLDVDAMITAALRMFMELGMVQKFKIDYETLCRWLLTVRKNYRMVLYHNWRHAFNVCQLMFAMLTTAGFQDILTEVEILAVIVGCLCHDLDHRGTNNAFQAKSGSALAQLYGTSATLEHHHFNHAVMILQSEGHNIFANLSSKEYSDLMQLLKQSILATDLTLYFERRTEFFELVSKGEYDWNIKNHRDIFRSMLMTACDLGAVTKPWEISRQVAELVTSEFFEQGDRERLELKLTPSAIFDRNRKDELPRLQLEWIDSICMPLYQALVKVNVKLKPMLDSVATNRSKWEELHQKRLLASTASSSPASVMVAKEDRN

SEQ ID NO: 12974 - protein, 586 aa, Homo sapiens
MRPVSVWQWSPWGLLLCLLCSSCLGSPSPSTGPEKKAGSQGLRFRLAGFPRKPYEGRVEIQRAGEWGTICDDDFTLQAAHILCRELGFTEATGWTHSAKYGPGTGRIWLDNLSCSGTEQSVTECASRGWGNSDCTHDEDAGVICKDQRLPGFSDSNVIEARVRLKGGAHPGEGRVEVLKASTWGTVCDRKWDLHAASVVCRELGFGSAREALSGARMGQGMGAIHLSEVRCSGQELSLWKCPHKNITAEDCSHSQDAGVRCNLPYTGAETRIRLSGGRSQHEGRVEVQIGGPGPLRWGLICGDDWGTLEAMVACRQLGLGYANHGLQETWYWDSGNITEVVMSGVRCTGTELSLDQCAHHGTHITCKRTGTRFTAGVICSETASDLLLHSALVQETAYIEDRPLHMLYCAAEENCLASSARSANWPYGHRRLLRFSSQIHNLGRADFRPKAGRHSWVWHECHGHYHSMDIFTHYDILTPNGTKVAEGHKASFCLEDTECQEDVSKRYECANFGEQGITVGCWDLYRHDIDCQWIDITDVKPGNYILQVVINPNFEVAESDFTNNAMKCNCKYDGHRIWVHNCHIGI

SEQ ID NO: 12975 - protein, 2118 aa, Homo sapiens
MLRVFILYAENVHTPDTDISDAYCSAVFAGVKKRTKVIKNSVNPVWNEGFEWDLKGIPLDQGSELHVVVKDHETMGRNRFLGEAKVPLREVLATPSLSASFNAPLLDTKKQPTGASLVLQVSYTPLPGAVPLFPPPTPLEPSPTLPDLDVVAGGGQSRAETWSLLSDSTMDTRYSGKKWPAPTDTGGEEDTEDQGLTGDEAEPFLDQSGGPGAPTTPRKLPSRPPPHYPGIKRKRSAPTSRKLLSDKPQDFQIRVQVIEGRQLPGVNIKPVVKVTAAGQTKRTRIHKGNSPLFNETLFFNLFDSPGELFDEPIFITVVDSRSLRTDALLGEFRMDVGTIYREPRHAYLRKWLLLSDPDDFSAGARGYLKTSLCVLGPGDEAPLERKDPSEDKEDIESNLLRPTGVALRGAHFCLKVFRAEDLPQMDDAVMDNVKQIFGFESNKKNLVDPFVEVSFAGKMLCSKILEKTANPQWNQNITLPAMFPSMCEKMRIRIIDWDRLTHNDIVATTYLSMSKISAPGGEIEVDDYLGFLPTFGPCYINLYGSPREFTGFPDPYTELNTGKGEGVAYRGRLLLSLETKLVEHSEQKVEDLPADDILRVEKYLRRRKYSLFAAFYSATMLQDVDDAIQFEVSIGNYGNKFDMTCLPLASTTQYSRAVFDGCHYYYLPWGNVKPVVVLSSYWEDISHRIETQNQLLGIADRLEAGLEQVHLALKAQCSTEDVDSLVAQLTDELIAGCSQPLGDIHETPSATHLDQYLYQLRTHHLSQITEAALALKLGHSELPAALEQAEDWLLRLRALAEEPQNSLPDIVIWMLQGDKRVAYQRVPAHQVLFSRRGANYCGKNCGKLQTIFLKYPMEKVPGARMPVQIRVKLWFGLSVDEKEFNQFAEGKLSVFAETYENETKLALVGNWGTTGLTYPKFSDVTGKIKLPKDSFRPSAGWTWAGDWFVCPEKTLLHDMDAGHLSFVEEVFENQTRLPGGQWIYMSDNYTDVNGEKVLPKDDIECPLGWKWEDEEWSTDLNRAVDEQGWEYSITIPPERKPKHWVPAEKMYYTHRRRRWVRLRRRDLSQMEALKRHRQAEAEGEGWEYASLFGWKFHLEYRKTDAFRRRRWRRRMEPLEKTGPAAVFALEGALGGVMDDKSEDSMSVSTLSFGVNRPTISCIFDYGNRYHLRCYMYQARDLAAMDKDSFSDPYAIVSFLHQSQKTVVVKNTLNPTWDQTLIFYEIEIFGEPATVAEQPPSIVVELYDHDTYGADEFMGRCICQPSLERMPRLAWFPLTRGSQPSGELLASFELIQREKPAIHHIPGFEVQETSRILDESEDTDLPYPPPQREANIYMVPQNIKPALQRTAIEILAWGLRNMKSYQLANISSPSLVVECGGQTVQSCVIRNLRKNPNFDICTLFMEVMLPREELYCPPITVKVIDNRQFGRRPVVGQCTIRSLESFLCDPYSAESPSPQGGPDDVSLLSPGEDVLIDIDDKEPLIPIQLADGLSSLAPTNTASPPSSPHEEEFIDWWSKFFASIGEREKCGSYLEKDFDTLKVYDTQLENVEAFEGLSDFCNTFKLYRGKTQEETEDPSVIGEFKGLFKIYPLPEDPAIPMPPRQFHQLAAQGPQECLVRIYIVRAFGLQPKDPNGKCDPYIKISIGKKSVSDQDNYIPCTLEPVFGKMFELTCTLPLEKDLKITLYDYDLLSKDEKIGETVVDLENRLLSKFGARCGLPQTYCVSGPNQWRDQLRPSQLLHLFCQQHRVKAPVYRTDRVMFQDKEYSIEEIEAGRIPNPHLGPVEERLALHVLQQQGLVPEHVESRPLYSPLQPDIEQGKLQMWVDLFPKALGRPGPPFNITPRRARRFFLRCIIWNTRDVILDDLSLTGEKMSDIYVKGWMIGFEEHKQKTDVHYRSLGGEGNFNWRFIFPFDYLPAEQVCTIAKKDAFWRLDKTESKIPARVVFQIWDNDKFSFDDFLGSLQLDLNRMPKPAKTAKKCSLDQLDDAFHPEWFVSLFEQKTVKGWWPCVAEEGEKKILAGKLEMTLEIVAESEHEERPAGQGRDEPNMNPKLEDPRRPDTSFLWFTSPYKTMKFILWRRFRWAIILFIILFILLLFLAIFIYAFPNYAAMKLVKPFS

SEQ ID NO: 12976 - protein, 743 aa, Homo sapiens
MAHRPKRTFRQRAADSSDSDGAEESPAEPGAPRELPVPGSAEEEPPSGGGRAQVAGLPHRVRGPRGRGRVWASSRRATKAAPRADEGSESRTLDVSTDEEDKIHHSSESKDDQGLSSDSSSSLGEKELSSTVKIPDAAFIQAARRKRELARAQDDYISLDVQHTSSISVSRNEETSEESQEDEKQDTWEQQQMRKAVKIIEERDIDLSCGNGSSKVKKFDTSISFPPVNLEIIKKQLNTRLTLLQETHRSHLREYEKYVQDVKSSKSTIQNLESSSNQALNCKFYKSMKIYVENLIDCLNEKIINIQEIESSMHALLLKQAMTFMKRRQDELKHESTYLQQLSRKDETSTSGNFSVDEKTQWILEEIESRRTKRRQARVLSGNCNHQEGTSSDDELPSAEMIDFQKSQGDILQKQKKVFEEVQDDFCNIQNILLKFQQWREKFPDSYYEAFISLCIPKLLNPLIRVQLIDWNPLKLESTGLKEMPWFKSVEEFMDSSVEDSKKESSSDKKVLSAIINKTIIPRLTDFVEFLWDPLSTSQTTSLITHCRVILEEHSTCENEVSKSRQDLLKSIVSRMKKAVEDDVFIPLYPKSAVENKTSPHSKFQERQFWSGLKLFRNILLWNGLLTDDTLQELGLGKLLNRYLIIALLNATPGPDVVKKCNQVAACLPEKWFENSAMRTSIPQLENFIQFLLQSAHKLSRSEFRDEVEEIILILVKIKALNQAESFIGEHHLDHLKSLIKED

SEQ ID NO: 12977 - protein, 796 aa, Homo sapiens
MNQTASVSHHIKCQPSKTIKELGSNSPPQRNWKGIAIALLVILVVCSLITMSVILLTPDELTNSSETRLSLEDLFRKDFVLHDPEARWINDTDVVYKSENGHVIKLNIETNATTLLLENTTFVTFKASRHSVSPDLKYVLLAYDVKQIFHYSYTASYVIYNIHTREVWELNPPEVEDSVLQYAAWGVQGQQLIYIFENNIYYQPDIKSSSLRLTSSGKEEIIFNGIADWLYEEELLHSHIAHWWSPDGERLAFLMINDSLVPTMVIPRFTGALYPKGKQYPYPKAGQVNPTIKLYVVNLYGPTHTLELMPPDSFKSREYYITMVKWVSNTKTVVRWLNRAQNISILTVCETTTGACSKKYEMTSDTWLSQQNEEPVFSRDGSKFFMTVPVKQGGRGEFHHVAMFLIQSKSEQITVRHLTSGNWEVIKILAYDETTQKIYFLSTESSPRGRQLYSASTEGLLNRQCISCNFMKEQCTYFDASFSPMNQHFLLFCEGPRVPVVSLHSTDNPAKYFILESNSMLKEAILKKKIGKPEIKILHIDDYELPLQLSLPKDFMDRNQYALLLIMDEEPGGQLVTDKFHIDWDSVLIDMDNVIVARFDGRGSGFQGLKILQEIHRRLGSVEVKDQITAVKFLLKLPYIDSKRLSIFGKGYGGYIASMILKSDEKLFKCGSVVAPITDLKLYASAFSERYLGMPSKEESTYQAASVLHNVHGLKEENILIIHGTADTKVHFQHSAELIKHLIKAGVNYTMQVYPDEGHNVSEKSKYHLYSTILKFFSDCLKEEISVLPQEPEEDE

SEQ ID NO: 12978 - protein, 346 aa, Homo sapiens
MPLFPNLPRLSFEEDFQNPSVTEDLVDAQDSIDEEEEDASSTSSSSFHFLFPSSSSLSSSSPLSSPLPSTLILGVPEDEDMPAAGMPPLPQSPPEIPPQGPPKISPQGPPQSPPQSPLDSCSSPLLWTRLDEESSSEEEDTATWHALPESESLPRYALDEKVAELVQFLLLKYQTKEPVTKAEMLTTVIKKYKDYFPMIFGKAHEFIELIFGIALTDMDPDNHSYFFEDTLDLTYEGSLIDDQGMPKNCLLILILSMIFIKGSCVPEEVIWEVLSAIGVCAGREHFIYGDPRKLLTIHWVQRKYLEYREVPNSAPPRYEFLWGPRAHSEASKRSLRVFIQAIQYHP

SEQ ID NO: 12979 - protein, 1609 aa, Homo sapiens
MAGLRRPQPGCYCRTAAAVNLLLGVFQVLLPCCRPGGAQGQAIEPLPNVVELWQAEEGELLLPTQGDSEEGLEEPSQEQSFSDKLFSGKGLHFQPSVLDFGIQFLGHPVAKILHAYNPSRDSEVVVNSVFAAAGHFHVPPVPCRVIPAMGKTSFRIIFLPTEEGSIESSLFINTSSYGVLSYHVSGIGTRRISTEGSAKQLPNAYFLLPKVQSIQLSQMQAETTNTSLLQVQLECSLHNKVCQQLKGCYLESDDVLRLQMSIMVTMENFSKEFEENTQHLLDHLSIVYVATDESETSDDSAVNMYILHSGNSLIWIQDIRHFSQRDALSLQFEPVLLPTSTTNFTKIASFTCKATSCDSGIIEDVKKTTHTPTLKACLFSSVAQGYFRMDSSATQFHIETHENTSGLWSIWYRNHFDRSVVLNDVFLSKETKHMLKILNFTGPLFLPPGCWNIFSLKLAVKDIAINLFTNVFLTTNIGAIFAIPLQIYSAPTKEGSLGFEVIAHCGMHYFMGKSKAGNPNWNGSLSLDQSTWNVDSELANKLYERWKKYKNGDVCKRNVLGTTRFAHLKKSKESESFVFFLPRLIAEPGLMLNFSATALRSRMIKYFVVQNPSSWPVSLQLLPLSLYPKPEALVHLLHRWFGTDMQMINFTTGEFQLTEACPYLGTHSEESRFGILHLHLQPLEMKRVGVVFTPADYGKVTSLILIRNNLTVIDMIGVEGFGARELLKVGGRLPGAGGSLRFKVPESTLMDCRRQLKDSKQILSITKNFKVENIGPLPITVSSLKINGYNCQGYGFEVLDCHQFSLDPNTSRDISIVFTPDFTSSWVIRDLSLVTAADLEFRFTLNVTLPHHLLPLCADVVPGPSWEESFWRLTVFFVSLSLLGVILIAFQQAQYILMEFMKTRQRQNASSSSQQNNGPMDVISPHSYKSNCKNFLDTYGPSDKGRGKNCLPVNTPQSRIQNAAKRSPATYGHSQKKHKCSVYYSKHKTSTAAASSTSTTTEEKQTSPLGSSLPAAKEDICTDAMRENWISLRYASGINVNLQKNLTLPKNLLNKEENTLKNTIVFSNPSSECSMKEGIQTCMFPKETDIKTSENTAEFKERELCPLKTSKKLPENHLPRNSPQYHQPDLPEISRKNNGNNQQVPVKNEVDHCENLKKVDTKPSSEKKIHKTSREDMFSEKQDIPFVEQEDPYRKKKLQEKREGNLQNLNWSKSRTCRKNKKRGVAPVSRPPEQSDLKLVCSDFERSELSSDINVRSWCIQESTREVCKADAEIASSLPAAQREAEGYYQKPEKKCVDKFCSDSSSDCGSSSGSVRASRGSWGSWSSTSSSDGDKKPMVDAQHFLPAGDSVSQNDFPSEAPISLNLSHNICNPMTVNSLPQYAEPSCPSLPAGPTGVEEDKGLYSPGDLWPTPPVCVTSSLNCTLENGVPCVIQESAPVHNSFIDWSATCEGQFSSAYCPLELNDYNAFPEENMNYANGFPCPADVQTDFIDHNSQSTWNTPPNMPAAWGHASFISSPPYLTSTRSLSPMSGLFGSIWAPQSDVYENCCPINPTTEHSTHMENQAVVCKEYYPGFNPFRAYMNLDIWTTTANRNANFPLSRDSSYCGNV

SEQ ID NO: 12980 - protein, 961 aa, Homo sapiens
MEKQRALVAAKDGDVATLERLLEAGALGPGITDALGAGLVHHATRAGHLDCVKFLVQRAQLPGNQRAHNGATPAHDAAATGSLAELCWLVREGGCGLQDQDASGVSPLHLAARFGHPVLVEWLLHEGHSATLETREGARPLHHAAVSGDLTCLKLLTAAHGSSVNRRTRSGASPLYLACQEGHLHLAQFLVKDCGADVHLRALDGMSALHAAAARGHYSLVVWLVTFTDIGLTARDNEGATALHFAARGGHTPILDRLLLMGTPILRDSWGGTPLHDAAENGQMEVPLLMTPPPPPFPPPPLLATRRSLEDGRRGGPGPGNPSPMSLSPAWPGHPDQPLPREQMTSPAPPRIITSATADPEGTETALAGDTSDGLAALQLDGLPSGDIDGLVPTRDERGQPIPEWKRQVMVRKLQARLGAESSAEAQDNGGSSGPTEQAAWRYSQTHQAILGPFGELLTEDDLVYLEKQIADLQLRRRCQEYESELGRLAAELQALLPEPLVSITVNSHFLPRAPGLEVEEASIPAAEPAGSAEASEVAPGVQPLPFWCSHISRLVRSLSLLLKGVHGLVQGDEKPSTRPLQDTCREASASPPRSEAQRQIQEWGVSVRTLRGNFESASGPLCGFNPGPCEPGAQHRQCLSGCWPALPKPRSGLASGEPRPGDTEEASDSGISCEEVPSEAGAAAGPDLASLRKERIIMLFLSHWRRSAYTPALKTVACRTLGARHAGLRGQEAARSPGPPSPPSEGPRLGHLWQQRSTITHLLGNWKAIMAHVPARQLRRLSRQPRGALSPEQFLPHVDGAPVPYSSLSLDLFMLGYFQLLECDLPAEERKLRHLLCFEVFEHLGTHGWEAVRAFHKAVTDEVAAGRRAWTDGFEDIKARFFGSSQRPAWDTEPGRKSGLTLLGPLPHAAVPCSGPEPTAQRLGSRSQQGSFNGEDICGYINRSFAFWKEKEAEMFNFGE

SEQ ID NO: 12981 - protein, 637 aa, Homo sapiens
MSLSPAWPGHPDQPLPREQMTSPAPPRIITSATADPEGTETALAGDTSDGLAALQLDGLPSGDIDGLVPTRDERGQPIPEWKRQVMVRKLQARLGAESSAEAQDNGGSSGPTEQAAWRYSQTHQAILGPFGELLTEDDLVYLEKQIADLQLRRRCQEYESELGRLAAELQALLPEPLVSITVNSHFLPRAPGLEVEEASIPAAEPAGSAEASEVAPGVQPLPFWCSHISRLVRSLSLLLKGVHGLVQGDEKPSTRPLQDTCREASASPPRSEAQRQIQEWGVSVRTLRGNFESASGPLCGFNPGPCEPGAQHRQCLSGCWPALPKPRSGLASGEPRPGDTEEASDSGISCEEVPSEAGAAAGPDLASLRKERIIMLFLSHWRRSAYTPALKTVACRTLGARHAGLRGQEAARSPGPPSPPSEGPRLGHLWQQRSTITHLLGNWKAIMAHVPARQLRRLSRQPRGALSPEQFLPHVDGAPVPYSSLSLDLFMLGYFQLLECDLPAEERKLRHLLCFEVFEHLGTHGWEAVRAFHKAVTDEVAAGRRAWTDGFEDIKARFFGSSQRPAWDTEPGRKSGLTLLGPLPHAAVPCSGPEPTAQRLGSRSQQGSFNGEDICGYINRSFAFWKEKEAEMFNFGE

SEQ ID NO: 12982 - protein, 487 aa, Homo sapiens
MPLEDLLAFYGYEPTIPAVANSSANSSPSELADELPDMTLDKEEIAKDLLSGDDEETQSSADDLTPSVTSHETSDFFPRPLRSNTACDGDKESEVEDVETDSGNSPEDLRKEIMIGLQYQAEIPPYLGEYDGNEKVYENEDQLLWCPDVVLESKVKEYLVETSLRTGSEKIMDRISAGTHTRDNEQALYELLKCNHNIKEAIERYCCNGKASQEGMTAWTEEECRSFEHALMLFGKDFHLIQKNKVRTRTVAECVAFYYMWKKSERYDYFAQQTRFGKKRYNHHPGVTDYMDRLVDETEALGGTVNASALTSNRPEPIPDQQLNILNSFTASDLTALTNSVATVCDPTDVNCLDDSFPPLGNTPRGQVNHVPVVTEELLTLPSNGESDCFNLFETGFYHSELNPMNMCSEESERPAKRLKMGIAVPESFMNEVSVNNLGVDFENHTHHITSAKMAVSVADFGSLSANETNGFISAHALHQHAALHSE

SEQ ID NO: 12983 - protein, 659 aa, Homo sapiens
MNTSRFADHHDLLTETKRPIDTVISQQAFYSDESVSAMEKQYLRNSNLTPQQKIDELHHGFTGLDLEEQWMYPSRSDHSNCHNIQTNDTAKTTFQEYPLIKNCFTPQTGLSDIMKESGVDIYHYGRDRICTKGLEAPLQQKRAEMFLSQFNRYNENVDYCRYPEYVHPNKAKLNKCSNFSVQDSKKLANGTPETPTVEADTYTKLFQVKPANQKKMEETIPDQQNFTFPKTTPHLTEKQFAKEAVFTADFGLTSEYGLKPHTACPANDFANVTEKQQFAKPDPPHSEYFKSVNLLSNSATSSGGINLNRPTWMNVQTKNNTPIPYRNQGNLMKLNSHLSAASKGSNHSSDFPQLSSTNLTPNSNLFQKYCQENPSAFSSFDFSYSGAERIQSVNHIEGLTKPGEENLFKLVTDKKIKQPNGFCDNYSAQKYGIIENVNKHNFQAKPQSGHYDPEEGPKHLDGLSQNTYQDLLESQGHSNSHRTRGGDNSRVNRTQVSCFSNNYMMGDLRHNQCFQQLGSNGFPLRSTHPFGHSVVPLLDSYDLLSYDDLSHLYPYFNMMYGDNSFSGLMPTFGFQRPIKTRSGPASELHIRLEECCEQWRALEKERKKTELALAKNYPGKKVSSTNNTPVPRLTSNPSRVDRLIVDELRELARVSCKNR

SEQ ID NO: 12984 - protein, 632 aa, Homo sapiens
MSDKSELKAELERKKQRLAQIREEKKRKEEERKKKETDQKKEAVAPVQEESDLEKKRREAEALLQSMGLTPESPIVPPPMSPSSKSVSTPSEAGSQDSGDGAVGSRTLHWDTDPSVLQLHSDSDLGRGPIKLGMAKITQVDFPPREIVTYTKETQTPVMAQPKEDEEEDDDVVAPKPPIEPEEEKTLKKDEENDSKAPPHELTEEEKQQILHSEEFLSFFDHSTRIVERALSEQINIFFDYSGRDLEDKEGEIQAGAKLSLNRQFFDERWSKHRVVSCLDWSSQYPELLVASYNNNEDAPHEPDGVALVWNMKYKKTTPEYVFHCQSAVMSATFAKFHPNLVVGGTYSGQIVLWDNRSNKRTPVQRTPLSAAAHTHPVYCVNVVGTQNAHNLISISTDGKICSWSLDMLSHPQDSMELVHKQSKAVAVTSMSFPVGDVNNFVVGSEEGSVYTACRHGSKAGISEMFEGHQGPITGIHCHAAVGAVDFSHLFVTSSFDWTVKLWTTKNNKPLYSFEDNADYVYDVMWSPTHPALFACVDGMGRLDLWNLNNDTEVPTASISVEGNPALNRVRWTHSGREIAVGDSEGQIVIYDVGEQIAVPRNDEWARFGRTLAEINANRADAEEEAATRIPA

SEQ ID NO: 12985 - protein, 554 aa, Homo sapiens
MESSDVNKRLEKLSALDYKIFYYEIPGPINKTTERHLAINCVHDRVVCWWPLVNDDAWPWAPISSEKDRANLLLLGYAQGRLEVLSSVRTEWDPLDVRFGTKQPYQVFTVEHSVSVDKEPMADSCIYECIRNKIQCVSVTRIPLKSKAISCCRNVTEDKLILGCEDSSLILYETHRRVTLLAQTELLPSLISCHPSGAILLVGSNQGELQIFDMALSPINIQLLAEDRLPRETLQFSKLFDASSSLVQMQWIAPQVVSQKGEGSDIYDLLFLRFERGPLGVLLFKLGVFTRGQLGLIDIIFQYIHCDEIYEAINILSSMNWDTLGHQCFISMSAIVNHLLRQKLTPEREAQLETSLGTFYAPTRPLLDSTILEYRDQISKYARRFFHHLLRYQRFEKAFLLAVDVGARDLFMDIHYLALDKGELALAEVARKRASDIDAESITSGVELLGPLDRGDMLNEAFIGLSLAPQGEDSFPDNLPPSCPTHRHILQQRILNGSSNRQIIDRRNELEKDICSGFLMTNTCNAEDGELREDGREQEIRDGGSLKMIHFGLV

SEQ ID NO: 12986 - protein, 1634 aa, Homo sapiens
MGSKRRRATSPSSSVSGDFDDGHHSVSTPGPSRKRRRLSNLPTVDPIAVCHELYNTIRDYKDEQGRLLCELFIRAPKRRNQPDYYEVVSQPIDLMKIQQKLKMEEYDDVNLLTADFQLLFNNAKSYYKPDSPEYKAACKLWDLYLRTRNEFVQKGEADDEDDDEDGQDNQGTVTEGSSPAYLKEILEQLLEAIVVATNPSGRLISELFQKLPSKVQYPDYYAIIKEPIDLKTIAQRIQNGSYKSIHAMAKDIDLLAKNAKTYNEPGSQVFKDANSIKKIFYMKKAEIEHHEMAKSSLRMRTPSNLAAARLTGPSHSKGSLGEERNPTSKYYRNKRAVQGGRLSAITMALQYGSESEEDAALAAARYEEGESEAESITSFMDVSNPFYQLYDTVRSCRNNQGQLIAEPFYHLPSKKKYPDYYQQIKMPISLQQIRTKLKNQEYETLDHLECDLNLMFENAKRYNVPNSAIYKRVLKLQQVMQAKKKELARRDDIEDGDSMISSATSDTGSAKRKSKKNIRKQRMKILFNVVLEAREPGSGRRLCDLFMVKPSKKDYPDYYKIILEPMDLKIIEHNIRNDKYAGEEGMIEDMKLMFRNARHYNEEGSQVYNDAHILEKLLKEKRKELGPLPDDDDMASPKLKLSRKSGISPKKSKYMTPMQQKLNEVYEAVKNYTDKRGRRLSAIFLRLPSRSELPDYYLTIKKPMDMEKIRSHMMANKYQDIDSMVEDFVMMFNNACTYNEPESLIYKDALVLHKVLLETRRDLEGDEDSHVPNVTLLIQELIHNLFVSVMSHQDDEGRCYSDSLAEIPAVDPNFPNKPPLTFDIIRKNVENNRYRRLDLFQEHMFEVLERARRMNRTDSEIYEDAVELQQFFIKIRDELCKNGEILLSPALSYTTKHLHNDVEKERKEKLPKEIEEDKLKREEEKREAEKSEDSSGAAGLSGLHRTYSQDCSFKNSMYHVGDYVYVEPAEANLQPHIVCIERLWEDSAGEKWLYGCWFYRPNETFHLATRKFLEKEVFKSDYYNKVPVSKILGKCVVMFVKEYFKLCPENFRDEDVFVCESRYSAKTKSFKKIKLWTMPISSVRFVPRDVPLPVVRVASVFANADKGDDEKNTDNSEDSRAEDNFNLEKEKEDVPVEMSNGEPGCHYFEQLHYNDMWLKVGDCVFIKSHGLVRPRVGRIEKVWVRDGAAYFYGPIFIHPEETEHEPTKMFYKKEVFLSNLEETCPMTCILGKCAVLSFKDFLSCRPTEIPENDILLCESRYNESDKQMKKFKGLKRFSLSAKVVDDEIYYFRKPIVPQKEPSPLLEKKIQLLEAKFAELEGGDDDIEEMGEEDSEVIEPPSLPQLQTPLASELDLMPYTPPQSTPKSAKGSAKKEGSKRKINMSGYILFSSEMRAVIKAQHPDYSFGELSRLVGTEWRNLETAKKAEYEGMMGGYPPGLPPLQGPVDGLVSMGSMQPLHPGGPPPHHLPPGVPGLPGIPPPGVMNQGVAPMVGTPAPGGSPYGQQVGVLGPPGQQAPPPYPGPHPAGPPVIQQPTTPMFVAPPPKTQRLLHSEAYLKYIEGLSAESNSISKWDQTLAARRRDVHLSKEQESRLPSHWLKSKGAHTTMADALWRLRDLMLRDTLNIRQAYNLENV

SEQ ID NO: 12987 - protein, 1597 aa, Homo sapiens
MGSKRRRATSPSSSVSGDFDDGHHSVSTPGPSRKRRRLSNLPTVDPIAVCHELYNTIRDYKDEQGRLLCELFIRAPKRRNQPDYYEVVSQPIDLMKIQQKLKMEEYDDVNLLTADFQLLFNNAKSYYKPDSPEYKAACKLWDLYLRTRNEFVQKGEADDEDDDEDGQDNQGTVTEGSSPAYLKEILEQLLEAIVVATNPSGRLISELFQKLPSKVQYPDYYAIIKEPIDLKTIAQRIQNGSYKSIHAMAKDIDLLAKNAKTYNEPGSQVFKDANSIKKIFYMKKAEIEHHEMAKSSLRMRTPSNLAAARLTGPSHSKGSLGEERNPTSKYYRNKRAVQGGRLSAITMALQYGSESEEDAALAAARYEEGESEAESITSFMDVSNPFYQLYDTVRSCRNNQGQLIAEPFYHLPSKKKYPDYYQQIKMPISLQQIRTKLKNQEYETLDHLECDLNLMFENAKRYNVPNSAIYKRVLKLQQVMQAKKKELARRDDIEDGDSMISSATSDTGSAKRKRNTHDSEMLGLRRLSSKKNIRKQRMKILFNVVLEAREPGSGRRLCDLFMVKPSKKDYPDYYKIILEPMDLKIIEHNIRNDKYAGEEGMIEDMKLMFRNARHYNEEGSQVYNDAHILEKLLKEKRKELGPLPDDDDMASPKLKLSRKSGISPKKSKYMTPMQQKLNEVYEAVKNYTDKRGRRLSAIFLRLPSRSELPDYYLTIKKPMDMEKIRSHMMANKYQDIDSMVEDFVMMFNNACTYNEPESLIYKDALVLHKVLLETRRDLEGDEDSHVPNVTLLIQELIHNLFVSVMSHQDDEGRCYSDSLAEIPAVDPNFPNKPPLTFDIIRKNVENNRYRRLDLFQEHMFEVLERARRMNRTDSEIYEDAVELQQFFIKIRDELCKNGEILLSPALSYTTKHLHNDVEKERKEKLPKEIEEDKLKREEEKREAEKSEDSSGAAGLSGLHRTYSQDCSFKNSMYHVGDYVYVEPAEANLQPHIVCIERLWEDSAGEKWLYGCWFYRPNETFHLATRKFLEKEVFKSDYYNKVPVSKILGKCVVMFVKEYFKLCPENFRDEDVFVCESRYSAKTKSFKKIKLWTMPISSVRFVPRDVPLPVVRVASVFANADKGDDEKNTDNSEDSRAEDNFNLEKEKEDVPVEMSNGEPGCHYFEQLHYNDMWLKVGDCVFIKSHGLVRPRVGRIEKVWVRDGAAYFYGPIFIHPEETEHEPTKMFYKKEVFLSNLEETCPMTCILGKCAVLSFKDFLSCRPTEIPENDILLCESRYNESDKQMKKFKGLKRFSLSAKVVDDEIYYFRKPIVPQKEPSPLLEKKIQLLEAKFAELEGGDDDIEEMGEEDSEVIEPPSLPQLQTPLASELDLMPYTPPQSTPKSAKGSAKKEGSKRKINMSGYILFSSEMRAVIKAQHPDYSFGELSRLVGTEWRNLETAKKAEYEGVMNQGVAPMVGTPAPGGSPYGQQVGVLGPPGQQAPPPYPGPHPAGPPVIQQPTTPMFVAPPPKTQRLLHSEAYLKYIEGLSAESNSISKWDQTLAARRRDVHLSKEQESRLPSHWLKSKGAHTTMADALWRLRDLMLRDTLNIRQAYNLENV

SEQ ID NO: 12988 - protein, 1941 aa, Homo sapiens
MAQGSGGREGALRTPAGGWHSPPSPDMQELLRSVERDLSIDPRQLAPAPGGTHVVALVPARWLASLRDRRLPLGPCPRAEGLGEAEVRTLLQRSVQRLPAGWTRVEVHGLRKRRLSYPLGGGLPFEDGSCGPETLTRFMQEVAAQNYRNLWRHAYHTYGQPYSHSPAPSAVPALDSVRQALQRVYGCSFLPVGETTQCPSYAREGPCPPRGSPACPSLLRAEALLESPEMLYVVHPYVQFSLHDVVTFSPAKLTNSQAKVLFILFRVLRAMDACHRQGLACGALSLYHIAVDEKLCSELRLDLSAYERPEEDENEEAPVARDEAGIVSQEEQGGQPGQPTGQEELRSLVLDWVHGRISNFHYLMQLNRLAGRRQGDPNYHPVLPWVVDFTTPHGRFRDLRKSKFRLNKGDKQLDFTYEMTRQAFVAGGAGGGEPPHVPHHISDVLSDITYYVYKARRTPRSVLCGHVRAQWEPHEYPASMERMQNWTPDECIPEFYTDPSIFRSIHPDMPDLDVPAWCSSSQEFVAAHRALLESREVSRDLHHWIDLTFGYKLQGKEAVKEKNVCLHLVDAHTHLASYGVVQLFDQPHPQRLAGAPALAPEPPLIPKLLVQTIQETTGREDFTENPGQLPNGVGRPVLEATPCEASWTRDRPVAGEDDLEQATEALDSISLAGKAGDQLGSSSQASPGLLSFSVASASRPGRRNKAAGADPGEGEEGRILLPEGFNPMQALEELEKTGNFLAKGLGGLLEVPEQPRVQPAVPLQCLLHRDMQALGVLLAEMVFATRVRTLQPDAPLWVRFQAVRGLCTRHPKEVPVSLQPVLDTLLQMSGPEVPMGAERGKLDQLFEYRPVSQGLPPPCPSQLLSPFSSVVPFPPYFPALHRFILLYQARRVEDEAQGRELVFALWQQLGAVLKDITPEGLEILLPFVLSLMSEEHTAVYTAWYLFEPVAKALGPKNANKYLLKPLIGAYESPCQLHGRFYLYTDCFVAQLMVRLGLQAFLTHLLPHVLQVLAGAEASQEESKDLAGAAEEEESGLPGAGPGSCAFGEEIPMDGEPPASSGLGLPDYTSGVSFHDQADLPETEDFQAGLYVTESPQPQEAEAVSLGRLSDKSSTSETSLGEERAPDEGGAPVDKSSLRSGDSSQDLKQSEGSEEEEEEEDSCVVLEEEEGEQEEVTGASELTLSDTVLSMETVVAGGSGGDGEEEEEALPEQSEGKEQKILLDTACKMVRWLSAKLGPTVASRHVARNLLRLLTSCYVGPTRQQFTVSSGESPPLSAGNIYQKRPVLGDIVSGPVLSCLLHIARLYGEPVLTYQYLPYISYLVAPGSASGPSRLNSRKEAGLLAAVTLTQKIIVYLSDTTLMDILPRISHEVLLPVLSFLTSLVTGFPSGAQARTILCVKTISLIALICLRIGQEMVQQHLSEPVATFFQVFSQLHELRQQDLKLDPAGRGEGQLPQVVFSDGQQRPVDPALLDELQKVFTLEMAYTIYVPFSCLLGDIIRKIIPNHELVGELAALYLESISPSSRNPASVEPTMPGTGPEWDPHGGGCPQDDGHSGTFGSVLVGNRIQIPNDSRPENPGPLGPISGVGGGGLGSGSDDNALKQELPRSVHGLSGNWLAYWQYEIGVSQQDAHFHFHQIRLQSFPGHSGAVKCVAPLSSEDFFLSGSKDRTVRLWPLYNYGDGTSETAPRLVYTQHRKSVFFVGQLEAPQHVVSCDGAVHVWDPFTGKTLRTVEPLDSRVPLTAVAVMPAPHTSITMASSDSTLRFVDCRKPGLQHEFRLGGGLNPGLVRALAISPSGRSVVAGFSSGFMVLLDTRTGLVLRGWPAHEGDILQIKAVEGSVLVSSSSDHSLTVWKELEQKPTHHYKSASDPIHTFDLYGSEVVTGTVSNKIGVCSLLEPPSQATTKLSSENFRGTLTSLALLPTKRHLLLGSDNGVIRLLA

SEQ ID NO: 12989 - protein, 280 aa, Homo sapiens
MTGRDSLSDGRTSSRALVPGGSPRGSRPRGFAITDLLGLEAELPAPAGPGQGSGCEGPAVAPCPGPGLDGSSLARGALPLGLGLLCGFGTQPPAAARAPCLLLADVPFLPPRGPEPAAPLAPSRPPPALGRQKRSDSVSTSDEDSQSEDRNDLKASPTLGKRKKRRHRTVFTAHQLEELEKAFSEAHYPDVYAREMLAVKTELPEDRIQVWFQNRRAKWRKREKRWGGSSVMAEYGLYGAMVRHCIPLPDSVLNSAEGGLLGSCAPWLLEGETLGCREMK

SEQ ID NO: 12990 - protein, 954 aa, Homo sapiens
MGVTVQSQGPGGKVVTCAHRYEKRQHVNTKQESRDIFGRCYVLSQNLRIEDDMDGGDWSFCDGRLRGHEKFGSCQQGVAATFTKDFHYIVFGAPGTYNWKGLLFLTSVSYTDPDQFVYKTRPPREQPDTFPDVMMNSYLGFSLDSGKGIVSKDEITFVSGAPRANHSGAVVLLKRDMKSAHLLPEHIFDGEGLASSFGYDVAVVDLNKDGWQDIVIGAPQYFDRDGEVGGAVYVYMNQQGRWNNVKPIRLNGTKDSMFGIAVKNIGDINQDGYPDIAVGAPYDDLGKVFIYHGSANGINTKPTQVLKGISPYFGYSIAGNMDLDRNSYPDVAVGSLSDSVTIFRSRPVINIQKTITVTPNRIDLRQKTACGAPSGICLQVKSCFEYTANPAGYNPSISIVGTLEAEKERRKSGLSSRVQFRNQGSEPKYTQELTLKRQKQKVCMEETLWLQDNIRDKLRPIPITASVEIQEPSSRRRVNSLPEVLPILNSDEPKTAHIDVHFLKEGCGDDNVCNSNLKLEYKFCTREGNQDKFSYLPIQKGVPELVLKDQKDIALEITVTNSPSNPRNPTKDGDDAHEAKLIATFPDTLTYSAYRELRAFPEKQLSCVANQNGSQADCELGNPFKRNSNVTFYLVLSTTEVTFDTPDLDINLKLETTSNQDNLAPITAKAKVVIELLLSVSGVAKPSQVYFGGTVVGEQAMKSEDEVGSLIEYEFRVINLGKPLTNLGTATLNIQWPKEISNGKWLLYLVKVESKGLEKVTCEPQKEINSLNLTESHNSRKKREITEKQIDDNRKFSLFAERKYQTLNCSVNVNCVNIRCPLRGLDSKASLILRSRLWNSTFLEEYSKLNYLDILMRAFIDVTAAAENIRLPNAGTQVRVTVFPSKTVAQYSGVPWWIILVAILAGILMLALLVFILWKCGFFKRNKKDHYDATYHKAEIHAQPSDKERLTSDA

SEQ ID NO: 12991 - protein, 2098 aa, Homo sapiens
MLCCLLVRASNLPSAKKDRRSDPVASLTFRGVKKRTKVIKNSVNPVWNEGFEWDLKGIPLDQGSELHVVVKDHETMGRNRFLGEAKVPLREVLATPSLSASFNAPLLDTKKQPTGASLVLQVSYTPLPGAVPLFPPPTPLEPSPTLPDLDVVAGGGQSRAETWSLLSDSTMDTRYSGKKWPAPTDTGGEEDTEDQGLTGDEAEPFLDQSGGPGAPTTPRKLPSRPPPHYPGIKRKRSAPTSRKLLSDKPQDFQIRVQVIEGRQLPGVNIKPVVKVTAAGQTKRTRIHKGNSPLFNETLFFNLFDSPGELFDEPIFITVVDSRSLRTDALLGEFRMDVGTIYREPRHAYLRKWLLLSDPDDFSAGARGYLKTSLCVLGPGDEAPLERKDPSEDKEDIESNLLRPTGVALRGAHFCLKVFRAEDLPQMDDAVMDNVKQIFGFESNKKNLVDPFVEVSFAGKMLCSKILEKTANPQWNQNITLPAMFPSMCEKMRIRIIDWDRLTHNDIVATTYLSMSKISAPGGEIEVDDYLGFLPTFGPCYINLYGSPREFTGFPDPYTELNTGKGEGVAYRGRLLLSLETKLVEHSEQKVEDLPADDILRVEKYLRRRKYSLFAAFYSATMLQDVDDAIQFEVSIGNYGNKFDMTCLPLASTTQYSRAVFDGCHYYYLPWGNVKPVVVLSSYWEDISHRIETQNQLLGIADRLEAGLEQVHLALKAQCSTEDVDSLVAQLTDELIAGCSQPLGDIHETPSATHLDQYLYQLRTHHLSQITEAALALKLGHSELPAALEQAEDWLLRLRALAEEPQNSLPDIVIWMLQGDKRVAYQRVPAHQVLFSRRGANYCGKNCGKLQTIFLKYPMEKVPGARMPVQIRVKLWFGLSVDEKEFNQFAEGKLSVFAETYENETKLALVGNWGTTGLTYPKFSDVTGKIKLPKDSFRPSAGWTWAGDWFVCPEKTLLHDMDAGHLSFVEEVFENQTRLPGGQWIYMSDNYTDVNGEKVLPKDDIECPLGWKWEDEEWSTDLNRAVDEQGWEYSITIPPERKPKHWVPAEKMYYTHRRRRWVRLRRRDLSQMEALKRHRQAEAEGEGWEYASLFGWKFHLEYRKTDAFRRRRWRRRMEPLEKTGPAAVFALEGALGGVMDDKSEDSMSVSTLSFGVNRPTISCIFDYGNRYHLRCYMYQARDLAAMDKDSFSDPYAIVSFLHQSQKTVVVKNTLNPTWDQTLIFYEIEIFGEPATVAEQPPSIVVELYDHDTYGADEFMGRCICQPSLERMPRLAWFPLTRGSQPSGELLASFELIQREKPAIHHIPGFEVQETSRILDESEDTDLPYPPPQREANIYMVPQNIKPALQRTAIEILAWGLRNMKSYQLANISSPSLVVECGGQTVQSCVIRNLRKNPNFDICTLFMEVMLPREELYCPPITVKVIDNRQFGRRPVVGQCTIRSLESFLCDPYSAESPSPQGGPDDVSLLSPGEDVLIDIDDKEPLIPIQEEEFIDWWSKFFASIGEREKCGSYLEKDFDTLKVYDTQLENVEAFEGLSDFCNTFKLYRGKTQEETEDPSVIGEFKGLFKIYPLPEDPAIPMPPRQFHQLAAQGPQECLVRIYIVRAFGLQPKDPNGKCDPYIKISIGKKSVSDQDNYIPCTLEPVFGKMFELTCTLPLEKDLKITLYDYDLLSKDEKIGETVVDLENRLLSKFGARCGLPQTYCVSGPNQWRDQLRPSQLLHLFCQQHRVKAPVYRTDRVMFQDKEYSIEEIEAGRIPNPHLGPVEERLALHVLQQQGLVPEHVESRPLYSPLQPDIEQGKLQMWVDLFPKALGRPGPPFNITPRRARRFFLRCIIWNTRDVILDDLSLTGEKMSDIYVKGWMIGFEEHKQKTDVHYRSLGGEGNFNWRFIFPFDYLPAEQVCTIAKKDAFWRLDKTESKIPARVVFQIWDNDKFSFDDFLGSLQLDLNRMPKPAKTAKKCSLDQLDDAFHPEWFVSLFEQKTVKGWWPCVAEEGEKKILAGKLEMTLEIVAESEHEERPAGQGRDEPNMNPKLEDPRRPDTSFLWFTSPYKTMKFILWRRFRWAIILFIILFILLLFLAIFIYAFPNYAAMKLVKPFS

SEQ ID NO: 12992 - protein, 314 aa, Homo sapiens
MGFWILAILTILMYSTAAKFSKQSWGLENEALIVRCPRQGKPSYTVDWYYSQTNKSIPTQERNRVFASGQLLKFLPAAVADSGIYTCIVRSPTFNRTGYANVTIYKKQSDCNVPDYLMYSTVSGSEKNSKIYCPTIDLYNWTAPLEWFKNCQALQGSRYRAHKSFLVIDNVMTEDAGDYTCKFIHNENGANYSVTATRSFTVKDEQGFSLFPVIGAPAQNEIKEVEIGTQFLAAVLWQLNGTKITDFGEPRIQQEEGQNQSFSNGLACLDMVLRIADVKEEDLLLQYDCLALNLHGLRRHTVRLSRKNPSKECF

SEQ ID NO: 12993 - protein, 971 aa, Homo sapiens
MFPMQKGSLNLLRQKWESCDYQRSECHPRDSHCTIFQPQESKLLAPEGEVVSAPQSLDPTSLPYSTGEEMWSSKPEEKDSVDKSNNTREYGRPEVLKEDSLSSRRRIERFSIALDELRSVFEAPKSGNKPAEYGGKEVEIERSLCSPAFKSHPGSQLEDSVKDSDKKGKETSFDKMSPESGHSRIFEAVFSTDQAQILRLHLHPKLTKTPKNSLKSSTYISTAGPNKPESGFAEDSAARGEGVSDLHEVVSLKERMARYQAAVSRGDCRSFSANMMEESEMCAVPGGLAKVKKQFEDEITSSRNTFAQYQYQHQNRSEQEAIHSSQVGTSRSSQEMARNEQEGSKVQKIDVHGTEMVSHLEKHTEEVNQASQFHQYVQETVIDTPEDEEIPKVSTKLLKEQFEKSAQEKILYSDKEMTTPAKQIKKLLLQDKEICILCQKTVYPMECLVADKQNFHKSCFRCHHCNSKLSLGNYASLHGQIYCKPHFKQLFKSKGNYDEGFGHKQHKDRWNCKNQSRSVDFIPNEEPNMCKNIAENTLVPGDRNEHLDAGNSEGQRNDLRKLGERGKLKVIWPPSKEIPKKTLPFEEELKMSKPKWPPEMTTLLSPEFKSESLLEDVRTPENKGQRQDHFPFLQPYLQSTHVCQKEDVIGIKEMKMPEGRKDEKKEGRKNVQDRPSEAEDTKSNRKSAMDLNDNNNVIVQSAEKEKNEKTNQTNGAEVLQVTNTDDEMMPENHKENLNKNNNNNYVAVSYLNNCRQKTSILEFLDLLPLSSEANDTANEYEIEKLENTSRISELLGIFESEKTYSRNVLAMALKKQTDRAAAGSPVQPAPKPSLSRGLMVKGGSSIISPDTNLLNIKGSHSKSKNLHFFFSNTVKITAFSKKNENIFNCDLIDSVDQIKNMPCLDLREFGKDVKPWHVETTEAARNNENTGFDALSHECTAKPLFPRVEVQSEQLTVEEQIKRNRCYSDTE

SEQ ID NO: 12994 - protein, 564 aa, Homo sapiens
MAEDKSKRDSIEMSMKGCQTNNGFVHNEDILEQTPDPGSSTDNLKHSTRGILGSQEPDFKGVQPYAGMPKEVLFQFSGQARYRIPREILFWLTVASVLVLIAATIAIIALSPKCLDWWQEGPMYQIYPRSFKDSNKDGNGDLKGIQDKLDYITALNIKTVWITSFYKSSLKDFRYGVEDFREVDPIFGTMEDFENLVAAIHDKGLKLIIDFIPNHTSDKHIWFQLSRTRTGKYTDYYIWHDCTHENGKTIPPNNWLSVYGNSSWHFDEVRNQCYFHQFMKEQPDLNFRNPDVQEEIKEILRFWLTKGVDGFSLDAVKFLLEAKHLRDEIQVNKTQIPDTVTQYSELYHDFTTTQVGMHDIVRSFRQTMDQYSTEPGRYRFMGTEAYAESIDRTVMYYGLPFIQEADFPFNNYLSMLDTVSGNSVYEVITSWMENMPEGKWPNWMIGGPDSSRLTSRLGNQYVNVMNMLLFTLPGTPITYYGEEIGMGNIVAANLNESYDINTLRSKSPMQWDNSSNAGFSEASNTWLPTNSDYHTVNVDVSISENFMLILETKKWVSTESTHSP

SEQ ID NO: 12995 - protein, 727 aa, Homo sapiens; identical to SEQ ID NO: 4120

SEQ ID NO: 12996 - protein, 496 aa, Homo sapiens
MASPSGLCVLVRLPKLICGGKTLPRTLLDILADGTILKVGVGCSEDASKLLQDYGLVVRGCLDLRYLAMRQRNNLLCNGLSLKSLAETVLNFPLDKSLLLRCSNWDAETLTEDQVIYAARDAQISVALFLHLLGYPFSRNSPGEKNDDHSSWRKVLEKCQGVVDIPFRSKGMSRLGEEVNGEATESQQKPRNKKSKMDGMVPGNHQGRDPRKHKRKPLGVGYSARKSPLYDNCFLHAPDGQPLCTCDRRKAQWYLDKGIGELVSEEPFVVKLRFEPAGRPESPGDYYLMVKENLCVVCGKRDSYIRKNVIPHEYRKHFPIEMKDHNSHDVLLLCTSCHAISNYYDNHLKQQLAKEFQAPIGSEEGLRLLEDPERRQVRSGARALLNAESLPTQRKEELLQALREFYNTDVVTEEMLQEAASLETRISNENYVPHGLKVVQCHSQGGLRSLMQLESRWRQHFLDSMQPKHLPQQWSVDHNHQKLLRKFGEDLPIQLS

SEQ ID NO: 12997 - protein, 2166 aa, Homo sapiens
MDLRLGQEFDVPIGAVVKLCDSGQVQVVDDEDNEHWISPQNATHIKPMHPTSVHGVEDMIRLGDLNEAGILRNLLIRYRDHLIYTYTGSILVAVNPYQLLSIYSPEHIRQYTNKKIGEMPPHIFAIADNCYFNMKRNSRDQCCIISGESGAGKTESTKLILQFLAAISGQHSWIEQQVLEATPILEAFGNAKTIRNDNSSRFGKYIDIHFNKRGAIEGAKIEQYLLEKSRVCRQALDERNYHVFYCMLEGMSEDQKKKLGLGQASDYNYLAMGNCITCEGRVDSQEYANIRSAMKVLMFTDTENWEISKLLAAILHLGNLQYEARTFENLDACEVLFSPSLATAASLLEVNPPDLMSCLTSRTLITRGETVSTPLSREQALDVRDAFVKGIYGRLFVWIVDKINAAIYKPPSQDVKNSRRSIGLLDIFGFENFAVNSFEQLCINFANEHLQQFFVRHVFKLEQEEYDLESIDWLHIEFTDNQDALDMIANKPMNIISLIDEESKFPKGTDTTMLHKLNSQHKLNANYIPPKNNHETQFGINHFAGIVYYETQGFLEKNRDTLHGDIIQLVHSSRNKFIKQIFQADVAMGAETRKRSPTLSSQFKRSLELLMRTLGACQPFFVRCIKPNEFKKPMLFDRHLCVRQLRYSGMMETIRIRRAGYPIRYSFVEFVERYRVLLPGVKPAYKQGDLRGTCQRMAEAVLGTHDDWQIGKTKIFLKDHHDMLLEVERDKAITDRVILLQKVIRGFKDRSNFLKLKNAATLIQRHWRGHNCRKNYGLMRLGFLRLQALHRSRKLHQQYRLARQRIIQFQARCRAYLVRKAFRHRLWAVLTVQAYARGMIARRLHQRLRAEYLWRLEAEKMRLAEEEKLRKEMSAKKAKEEAERKHQERLAQLAREDAERELKEKEAARRKKELLEQMERARHEPVNHSDMVDKMFGFLGTSGGLPGQEGQAPSGFEDLERGRREMVEEDLDAALPLPDEDEEDLSEYKFAKFAATYFQGTTTHSYTRRPLKQPLLYHDDEGDQLAALAVWITILRFMGDLPEPKYHTAMSDGSEKIPVMTKIYETLGKKTYKRELQALQGEGEAQLPEGQKKSSVRHKLVHLTLKKKSKLTEEVTKRLHDGESTVQGNSMLEDRPTSNLEKLHFIIGNGILRPALRDEIYCQISKQLTHNPSKSSYARGWILVSLCVGCFAPSEKFVKYLRNFIHGGPPGYAPYCEERLRRTFVNGTRTQPPSWLELQATKSKKPIMLPVTFMDGTTKTLLTDSATTAKELCNALADKISLKDRFGFSLYIALFDKVSSLGSGSDHVMDAISQCEQYAKEQGAQERNAPWRLFFRKEVFTPWHSPSEDNVATNLIYQQVVRGVKFGEYRCEKEDDLAELASQQYFVDYGSEMILERLLNLVPTYIPDREITPLKTLEKWAQLAIAAHKKGIYAQRRTDAQKVKEDVVSYARFKWPLLFSRFYEAYKFSGPSLPKNDVIVAVNWTGVYFVDEQEQVLLELSFPEIMAVSSSRGAKTTAPSFTLATIKGDEYTFTSSNAEDIRDLVVTFLEGLRKRSKYVVALQDNPNPAGEESGFLSFAKGDLIILDHDTGEQVMNSGWANGINERTKQRGDFPTDSVYVMPTVTMPPREIVALVTMTPDQRQDVVRLLQLRTAEPEVRAKPYTLEEFSYDYFRPPPKHTLSRVMVSKARGKDRLWSHTREPLKQALLKKLLGSEELSQEACLAFIAVLKYMGDYPSKRTRSVNELTDQIFEGPLKAEPLKDEAYVQILKQLTDNHIRYSEERGWELLWLCTGLFPPSNILLPHVQRFLQSRKHCPLAIDCLQRLQKALRNGSRKYPPHLVEVEAIQHKTTQIFHKVYFPDDTDEAFEVESSTKAKDFCQNIATRLLLKSSEGFSLFVKIADKVLSVPENDFFFDFVRHLTDWIKKARPIKDGIVPSLTYQVFFMKKLWTTTVPGKDPMADSIFHYYQELPKYLRGYHKCTREEVLQLGALIYRVKFEEDKSYFPSIPKLLRELVPQDLIRQVSPDDWKRSIVAYFNKHAGKSKEEAKLAFLKLIFKWPTFGSAFFEVKQTTEPNFPEILLIAINKYGVSLIDPKTKDILTTHPFTKISNWSSGNTYFHITIGNLVRGSKLLCETSLGYKMDDLLTSYISQMLTAMSKQRGSRSGK

SEQ ID NO: 12998 - protein, 950 aa, Homo sapiens
MRRPRRPGGLGGSGGLRLLLCLLLLSSRPGGCSAVSAHGCLFDRRLCSHLEVCIQDGLFGQCQVGVGQARPLLQVTSPVLQRLQGVLRQLMSQGLSWHDDLTQYVISQEMERIPRLRPPEPRPRDRSGLAPKRPGPAGELLLQDIPTGSAPAAQHRLPQPPVGKGGAGASSSLSPLQAELLPPLLEHLLLPPQPPHPSLSYEPALLQPYLFHQFGSRDGSRVSEGSPGMVSVGPLPKAEAPALFSRTASKGIFGDHPGHSYGDLPGPSPAQLFQDSGLLYLAQELPAPSRARVPRLPEQGSSSRAEDSPEGYEKEGLGDRGEKPASPAVQPDAALQRLAAVLAGYGVELRQLTPEQLSTLLTLLQLLPKGAGRNPGGVVNVGADIKKTMEGPVEGRDTAELPARTSPMPGHPTASPTSSEVQQVPSPVSSEPPKAARPPVTPVLLEKKSPLGQSQPTVAGQPSARPAAEEYGYIVTDQNVVGPALTFRIRHNEQNLSLADVTQQAGLVKSELEAQTGLQILQTGVGQREEAAAVLPQTAHSTSPMRSVLLTLVALAGVAGLLVALAVALCVRQHARQQDKERLAALGPEGAHGDTTFEYQDLCRQHMATKSLFNRAEGPPEPSRVSSVSSQFSDAAQASPSSHSSTPSWCEEPAQANMDISTGHMILAYMEDHLRNRDRLAKEWQALCAYQAEPNTCATAQGEGNIKKNRHPDFLPYDHARIKLKVESSPSRSDYINASPIIEHDPRMPAYIATQGPLSHTIADFWQMVWESGCTVIVMLTPLVEDGVKQCDRYWPDEGASLYHVYEVNLVSEHIWCEDFLVRSFYLKNVQTQETRTLTQFHFLSWPAEGTPASTRPLLDFRRKVNKCYRGRSCPIIVHCSDGAGRTGTYILIDMVLNRMAKGVKEIDIAATLEHVRDQRPGLVRSKDQFEFALTAVAEEVNAILKALPQ

SEQ ID NO: 12999 - protein, 1652 aa, Homo sapiens
MGSKRRRATSPSSSVSGDFDDGHHSVSTPGPSRKRRRLSNLPTVDPIAVCHELYNTIRDYKDEQGRLLCELFIRAPKRRNQPDYYEVVSQPIDLMKIQQKLKMEEYDDVNLLTADFQLLFNNAKSYYKPDSPEYKAACKLWDLYLRTRNEFVQKGEADDEDDDEDGQDNQGTVTEGSSPAYLKEILEQLLEAIVVATNPSGRLISELFQKLPSKVQYPDYYAIIKEPIDLKTIAQRIQNGSYKSIHAMAKDIDLLAKNAKTYNEPGSQVFKDANSIKKIFYMKKAEIEHHEMAKSSLRMRTPSNLAAARLTGPSHSKGSLGEERNPTSKYYRNKRAVQGGRLSAITMALQYGSESEEDAALAAARYEEGESEAESITSFMDVSNPFYQLYDTVRSCRNNQGQLIAEPFYHLPSKKKYPDYYQQIKMPISLQQIRTKLKNQEYETLDHLECDLNLMFENAKRYNVPNSAIYKRVLKLQQVMQAKKKELARRDDIEDGDSMISSATSDTGSAKRKRNTHDSEMLGLRRLSSKKNIRKQRMKILFNVVLEAREPGSGRRLCDLFMVKPSKKDYPDYYKIILEPMDLKIIEHNIRNDKYAGEEGMIEDMKLMFRNARHYNEEGSQVYNDAHILEKLLKEKRKELGPLPDDDDMASPKLKLSRKSGISPKKSKYMTPMQQKLNEVYEAVKNYTDKRGRRLSAIFLRLPSRSELPDYYLTIKKPMDMEKIRSHMMANKYQDIDSMVEDFVMMFNNACTYNEPESLIYKDALVLHKVLLETRRDLEGDEDSHVPNVTLLIQELIHNLFVSVMSHQDDEGRCYSDSLAEIPAVDPNFPNKPPLTFDIIRKNVENNRYRRLDLFQEHMFEVLERARRMNRTDSEIYEDAVELQQFFIKIRDELCKNGEILLSPALSYTTKHLHNDVEKERKEKLPKEIEEDKLKREEEKREAEKSEDSSGAAGLSGLHRTYSQDCSFKNSMYHVGDYVYVEPAEANLQPHIVCIERLWEDSAGEKWLYGCWFYRPNETFHLATRKFLEKEVFKSDYYNKVPVSKILGKCVVMFVKEYFKLCPENFRDEDVFVCESRYSAKTKSFKKIKLWTMPISSVRFVPRDVPLPVVRVASVFANADKGDDEKNTDNSEDSRAEDNFNLEKEKEDVPVEMSNGEPGCHYFEQLHYNDMWLKVGDCVFIKSHGLVRPRVGRIEKVWVRDGAAYFYGPIFIHPEETEHEPTKMFYKKEVFLSNLEETCPMTCILGKCAVLSFKDFLSCRPTEIPENDILLCESRYNESDKQMKKFKGLKRFSLSAKVVDDEIYYFRKPIVPQKEPSPLLEKKIQLLEAKFAELEGGDDDIEEMGEEDSEVIEPPSLPQLQTPLASELDLMPYTPPQSTPKSAKGSAKKEGSKRKINMSGYILFSSEMRAVIKAQHPDYSFGELSRLVGTEWRNLETAKKAEYEERAAKVAEQQERERAAQQQQPSASPRAGTPVGALMGVVPPPTPMGMLNQQLTPVAGVMNQGVAPMVGTPAPGGSPYGQQVGVLGPPGQQAPPPYPGPHPAGPPVIQQPTTPMFVAPPPKTQRLLHSEAYLKYIEGLSAESNSISKWDQTLAARRRDVHLSKEQESRLPSHWLKSKGAHTTMADALWRLRDLMLRDTLNIRQAYNLENV

SEQ ID NO: 13000 - protein, 951 aa, Homo sapiens
MRGRGNARSSQALGVSWCPATWHPRLDMGRLHRPRSSTSYRNLPHLFLFFLFVGPFSCLGSYSRATELLYSLNEGLPAGVLIGSLAEDLRLLPRSAGRPDPQSQLPERTGAEWNPPLSFSLASRGLSGQYVTLDNRSGELHTSAQEIDREALCVEGGGGTAWSGSVSISSSPSDSCLLLLDVLVLPQEYFRFVKVKIAIRDINDNAPQFPVSQISVWVPENAPVNTRLAIEHPAVDPDVGINGVQTYRLLDYHGMFTLDVEENENGERTPYLIVMGALDRETQDQYVSIIIAEDGGSPPLLGSATLTIGISDINDNCPLFTDSQINVTVYGNATVGTPIAAVQAVDKDLGTNAQITYSYSQKVPQASKDLFHLDENTGVIKLFSKIGGSVLESHKLTILANGPGCIPAVITALVSIIKVIFRPPEIVPRYIANEIDGVVYLKELEPVNTPIAFFTIRDPEGKYKVNCYLDGEGPFRLSPYKPYNNEYLLETTKPMDYELQQFYEVAVVAWNSEGFHVKRVIKVQLLDDNDNAPIFLQPLIELTIEENNSPNAFLTKLYATDADSEERGQVSYFLGPDAPSYFSLDSVTGILTVSTQLDREEKEKYRYTVRAVDCGKPPRESVATVALTVLDKNDNSPRFINKDFSFFVPENFPGYGEIGVISVTDADAGRNGWVALSVVNQSDIFVIDTGKGMLRAKVSLDREQQSSYTLWVEAVDGGEPALSSTAKITILLLDINDNPPLVLFPQSNMSYLLVLPSTLPGSPVTEVYAVDKDTGMNAVIAYSIIGRRGPRPESFRIDPKTGNITLEEALLQTDYGLHRLLVKVSDHGYPEPLHSTVMVNLFVNDTVSNESYIESLLRKEPEINIEEKEPQISIEPTHRKVESVSCMPTLVALSVISLGSITLVTGMGIYICLRKGEKHPREDENLEVQIPLKGKIDLHMRERKPMDISNI

SEQ ID NO: 13001 - protein, 600 aa, Homo sapiens
MNQRDQPFMTIQRNDSSDNLVFHMKNEMRNIKYKPVDYQQLRALTEAKKLASASAKLKIRKAMLTSKLSKEQTLIKQHKQVWWQEYQRLNEVRCKMESEIKSLLNEENIGNECLCDLTNFEQELSEQQCTYLKNVINPIQQLRADLKYRQHHTLQHSHPHIEFNSMKVLEEVDFVKKQLKTVFERLRLEQQRIENDLSDWSIKILDHSLEEKTNPLSELPIELESLECPYPDLKSSILSEFYKFTQKYQKKLQDFNLQLEDIYRNCQLSEEDHWIYQAILDQYPGDLFGRRTLYLDMLQRYFPHKSRHDLVEHEKYCDQYRFAIEQQNILISNWNKNKKDFIQKAVLTLTEACATHEMESMLAKDKKKQQELCADLKAKVRQWRAHQEEVARLEMEISARRREKEEEKEKLWKKKELLQRAEKKKKIKKYWAKKKQKWQEMEMRDLQRLEELKKLIAEQSLKDRERVKYRQELLERRLMEKKEVALQEAHEDKERARRLEALRKQVAVVAQFDPVRMMSDTMASKARMGIEIEEEFILQKPLFTLNTYNEQQIISDPRLRFELALREAGLHRTLYAKEILPKISPQKPPRKDMESTVFKI

SEQ ID NO: 13002 - protein, 2112 aa, Homo sapiens
MLCCLLVRASNLPSAKKDRRSDPVASLTFRGVKKRTKVIKNSVNPVWNEGFEWDLKGIPLDQGSELHVVVKDHETMGRNRFLGEAKVPLREVLATPSLSASFNAPLLDTKKQPTGASLVLQVSYTPLPGAVPLFPPPTPLEPSPTLPDLDVVAGGGQSRAETWSLLSDSTMDTRYSGKKWPAPTDTGGEEDTEDQGLTGDEAEPFLDQSGGPGAPTTPRKLPSRPPPHYPGIKRKRSAPTSRKLLSDKPQDFQIRVQVIEGRQLPGVNIKPVVKVTAAGQTKRTRIHKGNSPLFNETLFFNLFDSPGELFDEPIFITVVDSRSLRTDALLGEFRMDVGTIYREPRHAYLRKWLLLSDPDDFSAGARGYLKTSLCVLGPGDEAPLERKDPSEDKEDIESNLLRPTGVALRGAHFCLKVFRAEDLPQMDDAVMDNVKQIFGFESNKKNLVDPFVEVSFAGKMLCSKILEKTANPQWNQNITLPAMFPSMCEKMRIRIIDWDRLTHNDIVATTYLSMSKISAPGGEIEEEPAGAVKPSKASDLDDYLGFLPTFGPCYINLYGSPREFTGFPDPYTELNTGKGEGVAYRGRLLLSLETKLVEHSEQKVEDLPADDILRVEKYLRRRKYSLFAAFYSATMLQDVDDAIQFEVSIGNYGNKFDMTCLPLASTTQYSRAVFDGCHYYYLPWGNVKPVVVLSSYWEDISHRIETQNQLLGIADRLEAGLEQVHLALKAQCSTEDVDSLVAQLTDELIAGCSQPLGDIHETPSATHLDQYLYQLRTHHLSQITEAALALKLGHSELPAALEQAEDWLLRLRALAEEPQNSLPDIVIWMLQGDKRVAYQRVPAHQVLFSRRGANYCGKNCGKLQTIFLKYPMEKVPGARMPVQIRVKLWFGLSVDEKEFNQFAEGKLSVFAETYENETKLALVGNWGTTGLTYPKFSDVTGKIKLPKDSFRPSAGWTWAGDWFVCPEKTLLHDMDAGHLSFVEEVFENQTRLPGGQWIYMSDNYTDVNGEKVLPKDDIECPLGWKWEDEEWSTDLNRAVDEQGWEYSITIPPERKPKHWVPAEKMYYTHRRRRWVRLRRRDLSQMEALKRHRQAEAEGEGWEYASLFGWKFHLEYRKTDAFRRRRWRRRMEPLEKTGPAAVFALEGALGGVMDDKSEDSMSVSTLSFGVNRPTISCIFDYGNRYHLRCYMYQARDLAAMDKDSFSDPYAIVSFLHQSQKTVVVKNTLNPTWDQTLIFYEIEIFGEPATVAEQPPSIVVELYDHDTYGADEFMGRCICQPSLERMPRLAWFPLTRGSQPSGELLASFELIQREKPAIHHIPGFEVQETSRILDESEDTDLPYPPPQREANIYMVPQNIKPALQRTAIEILAWGLRNMKSYQLANISSPSLVVECGGQTVQSCVIRNLRKNPNFDICTLFMEVMLPREELYCPPITVKVIDNRQFGRRPVVGQCTIRSLESFLCDPYSAESPSPQGGPDDVSLLSPGEDVLIDIDDKEPLIPIQEEEFIDWWSKFFASIGEREKCGSYLEKDFDTLKVYDTQLENVEAFEGLSDFCNTFKLYRGKTQEETEDPSVIGEFKGLFKIYPLPEDPAIPMPPRQFHQLAAQGPQECLVRIYIVRAFGLQPKDPNGKCDPYIKISIGKKSVSDQDNYIPCTLEPVFGKMFELTCTLPLEKDLKITLYDYDLLSKDEKIGETVVDLENRLLSKFGARCGLPQTYCVSGPNQWRDQLRPSQLLHLFCQQHRVKAPVYRTDRVMFQDKEYSIEEIEAGRIPNPHLGPVEERLALHVLQQQGLVPEHVESRPLYSPLQPDIEQGKLQMWVDLFPKALGRPGPPFNITPRRARRFFLRCIIWNTRDVILDDLSLTGEKMSDIYVKGWMIGFEEHKQKTDVHYRSLGGEGNFNWRFIFPFDYLPAEQVCTIAKKDAFWRLDKTESKIPARVVFQIWDNDKFSFDDFLGSLQLDLNRMPKPAKTAKKCSLDQLDDAFHPEWFVSLFEQKTVKGWWPCVAEEGEKKILAGKLEMTLEIVAESEHEERPAGQGRDEPNMNPKLEDPRRPDTSFLWFTSPYKTMKFILWRRFRWAIILFIILFILLLFLAIFIYAFPNYAAMKLVKPFS

SEQ ID NO: 13003 - protein, 533 aa, Homo sapiens
LFDRHLCVRQLRYSGMMETIRIRRAGYPIRYSFVEFVERYRVLLPGVKPAYKQGDLRGTCQRMAEAVLGTHDDWQIGKTKIFLKDHHDMLLEVERDKAITDRVILLQKVIRGFKDRSNFLKLKNAATLIQRHWRGHNCRKNYGLMRLGFLRLQALHRSRKLHQQYRLARQRIIQFQARCRAYLVRKAFRHRLWAVLTVQAYARGMIARRLHQRLRAEYLWRLEAEKMRLAEEEKLRKEMSAKKAKEEAERKHQERLAQLAREDAERELKEKEAARRKKELLEQMERARHEPVNHSDMVDKMFGFLGTSGGLPGQEGQAPSGFEDLERGRREMVEEDLDAALPLPDEDEEDLSEYKFAKFAATYFQGTTTHSYTRRPLKQPLLYHDDEGDQLAALAVWITILRFMGDLPEPKYHTAMSDGSEKIPVMTKIYETLGKKTYKRELQALQGEGEAQLPEGQKKSSVRHKLVHLTLKKKSKLTEEVTKRLHDGESTVQGNSMLEDRPTSNLEKLHFIIGNGILRPALRSVPGGGDTRA

SEQ ID NO: 13004 - protein, 340 aa, Homo sapiens
MSILIIEAFYGGSHKQLVDLLQEELGDCVVYTLPAKKWHWRARTSALYFSQTIPISEHYRTLFASSVLNLTELAALRPDLGKLKKILYFHENQLIYPVKKCQERDFQYGYNQILSCLVADVVVFNSVFNMESFLTSMGKFMKLIPDHRPKDLESIIRPKCQVIYFPIRFPDVSREHDKDPESFFKVLMHLKDLGLNFHVSVLGETFTDVPDIFSEAKKALGSSVLHWGYLPSKDDYFQVLCMADVVISTAKHEFFGVAMLEAVYCGCYPLCPKDLVYPEIFPAEYLYSTPEQLSKRLQNFCKRPDIIRKHLYKGEIAPFSWAALHGKFRSLLTTEPREDL

SEQ ID NO: 13005 - protein, 1150 aa, Homo sapiens
MPSYQGYILESAPVGATISDSLNLTSPLRIVALDKDIEDVPPSGVPTKDPELHLFLNDYTSVFTVTQTGITRYLTLLQPVDREEQQTYTFSITAFDGVQESEPVIVNIQVMDANDNTPTFPEISYDVYVYTDMRPGDSVIQLTAVDADEGSNGEITYEILVGAQGDFIINKTTGLITIAPGVEMIVGRTYALTVQAADNAPPAERRNSICTVYIEVLPPNNQSPPRFPQLMYSLEISEAMRVGAVLLNLQATDREGDSITYAIENGDPQRVFNLSETTGILTLGKALDRESTDRYILIITASDGRPDGTSTATVNIVVTDVNDNAPVFDPYLPRNLSVVEEEANAFVGQVKATDPDAGINGQVHYSLGNFNNLFRITSNGSIYTAVKLNREVRDYYELVVVATDGAVHPRHSTLTLAIKVLDIDDNSPVFTNSTYTVLVEENLPAGTTILQIEAKDVDLGANVSYRIRSPEVKHFFALHPFTGELSLLRSLDYEAFPDQEASITFLVEAFDIYGTMPPGIATVTVIVKDMNDYPPVFSKRIYKGMVAPDAVKGTPITTVYAEDADPPGLPASRVRYRVDDVQFPYPASIFEVEEDSGRVITRVNLNEEPTTIFKLVVVAFDDGEPVMSSSATVKILVLHPGEIPRFTQEEYRPPPVSELATKGTMVGVISAAAINQSIVYSIVSGNEEDTFGINNITGVIYVNGPLDYETRTSYVLRVQADSLEVVLANLRVPSKSNTAKVYIEIQDENNHPPVFQKKFYIGGVSEDARMFTSVLRVKATDKDTGNYSVMAYRLIIPPIKEGKEGFVVETYTGLIKTAMLFHNMRRSYFKFQVIATDDYGKGLSGKADVLVSVVNQLDMQVIVSNVPPTLVEKKIEDLTEILDRYVQEQIPGAKVVVESIGARRHGDAFSLEDYTKCDLTVYAIDPQTNRAIDRNELFKFLDGKLLDINKDFQPYYGEGGRILEIRTPEAVTSIKKRGESLGYTEGALLALAFIIILCCIPAILVVLVSYRQFKVRQAECTKTARIQAALPAAKPAVPAPAPVAAPPPPPPPPPGAHLYEELGDSSMHKNYPWSLELILARNMDKIITVMSMGMKCLNMGVAVDCYHQLDRRNMVRWLVKLRKNMRRKRKSQRKLKNQRLKLESLVRRKK

SEQ ID NO: 13006 - protein, 2180 aa, Homo sapiens
MSFRGKVFKREPSEFWKKRRTVRRVNQEEIHRFSSQEKPRLLEPLDYETVIEELEKTYRNDPLQDLLFFPSDDFSAATVSWDIRTLYSTVPEDAEHKAENLLVKEACKFYSSQWHVVNYKYEQYSGDIRQLPRAEYKPEKLPSHSFEIDHEDADKDEDTTSHSSSKGGGGAGGTGVFKSGWLYKGNFNSTVNNTVTVRSFKKRYFQLTQLPDNSYIMNFYKDEKISKEPKGCIFLDSCTGVVQNNRLRKYAFELKMNDLTYFVLAAETESDMDEWIHTLNRILQISPEGPLQGRRSTELTDLGLDSLDNSVTCECTPEETDSSENNLHADFAKYLTETEDTVKTTRNMERLNLFSLDPDIDTLKLQKKDLLEPESVIKPFEEKAAKRIMIICKALNSNLQGCVTENENDPITNIEPFFVSVALYDLRDSRKISADFHVDLNHAAVRQMLLGASVALENGNIDTITPRQSEEPHIKGLPEEWLKFPKQAVFSVSNPHSEIVLVAKIEKVLMGNIASGAEPYIKNPDSNKYAQKILKSNRQFCSKLGKYRMPFAWAVRSVFKDNQGNVDRDSRFSPLFRQESSKISTEDLVKLVSDYRRADRISKMQTIPGSLDIAVDNVPLEHPNCVTSSFIPVKPFNMMAQTEPTVEVEEFVYDSTKYCRPYRVYKNQIYIYPKHLKYDSQKCFNKARNITVCIEFKNSDEESAKPLKCIYGKPGGPLFTSAAYTAVLHHSQNPDFSDEVKIELPTQLHEKHHILFSFYHVTCDINAKANAKKKEALETSVGYAWLPLMKHDQIASQEYNIPIATSLPPNYLSFQDSASGKHGGSDIKWVDGGKPLFKVSTFVVSTVNTQDPHVNAFFQECQKREKDMSQSPTSNFIRSCKNLLNVEKIHAIMSFLPIILNQLFKVLVQNEEDEITTTVTRVLTDIVAKCHEEQLDHSVQSYIKFVFKTRACKERTVHEELAKNVTGLLKSNDSTTVKHVLKHSWFFFAIILKSMAQHLIDTNKIQLPRPQRFPESYQNELDNLVMVLSDHVIWKYKDALEETRRANHSVARFLKRCFTFMDRGYVFKMVNNYISMFSSGDLKTLCQYKFDFLQEVCQHEHFIPLCLPIRSANIPDPLTPSESTQELHASDMPEYSVTNEFCRKHFLIGILLREVGFALQEDQDVRHLALAVLKNLMAKHSFDDRYREPRKQAQIASLYMPLYGMLLDNMPRIYLKDLYPFTVNTSNQGSRDDLSTNGGFQSQTAIKHANSVDTSFSKDVLNSIAAFSSIAISTVNHADSRASLASLDSNPSTNEKSSEKTDNCEKIPRPLSLIGSTLRFDKLDQAETRSLLMCFLHIMKTISYETLIAYWQRAPSPEVSDFFSILDVCLQNFRYLGKRNIIRKIAAAFKFVQSTQNNGTLKGSNPSCQTSGLLSQWMHSTSSHEGHKQHRSQTLPIIRGKNALSNPKLLQMLDNTMTSNSNEIDIVHHVDTEANIATEVCLTILDLLSLFTQTHQRQLQQCDCQNSLMKRVFDTYMLFFQVNQSATALKHVFASLRLFVCKFPSAFFQGPADLCGSFCYEVLKCCNHRSRSTQTEASALLYFFMRKNFEFNKQKSIVRSHLQLIKAVSQLIADAGIGGSRFQHSLAITNNFANGDKQMKNSNFPAEVKDLTKRIRTVLMATAQMKEHEKDPEMLVDLQYSLANSYASTPELRRTWLESMAKIHARNGDLSEAAMCYIHIAALIAEYLKRKGYWKVEKICTASLLSEDTHPCDSNSLLTTPSGGSMFSMGWPAFLSITPNIKEEGAMKEDSGMQDTPYNENILVEQLYMCVEFLWKSERYELIADVNKPIIAVFEKQRDFKKLSDLYYDIHRSYLKVAEVVNSEKRLFGRYYRVAFYGQGFFEEEEGKEYIYKEPKLTGLSEISQRLLKLYADKFGADNVKIIQDSNKVNPKDLDPKYAYIQVTYVTPFFEEKEIEDRKTDFEMHHNINRFVFETPFTLSGKKHGGVAEQCKRRTILTTSHLFPYVKKRIQVISQSSTELNPIEVAIDEMSKKVSELNQLCTMEEVDMIRLQLKLQGSVSVKVNAGPMAYARAFLEETNAKKYPDNQVKLLKEIFRQFADACGQALDVNERLIKEDQLEYQEELRSHYKDMLSELSTVMNEQITGRDDLSKRGVDQTCTRVISKATPALPTVSISSSAEV

SEQ ID NO: 13007 - protein, 697 aa, Homo sapiens
MRPVSVWQWSPWGLLLCLLCSSCLGSPSPSTGPEKKAGSQGLRFRLAGFPRKPYEGRVEIQRAGEWGTICDDDFTLQAAHILCRELGFTEATGWTHSAKYGPGTGRIWLDNLSCSGTEQSVTECASRGWGNSDCTHDEDAGVICKDQRLPGFSDSNVIEVEHHLQVEEVRIRPAVGWGRRPLPVTEGLVEVRLPDGWSQVCDKGWSAHNSHVVCGMLGFPSEKRVNAAFYRLLAQRQQHSFGLHGVACVGTEAHLSLCSLEFYRANDTARCPGGGPAVVSCVPGPVYAASSGQKKQQQSKPQGEARVRLKGGAHPGEGRVEVLKASTWGTVCDRKWDLHAASVVCRELGFGSAREALSGARMGQGMGAIHLSEVRCSGQELSLWKCPHKNITAEDCSHSQDAGVRCNLPYTGAETRETWYWDSGNITEVVMSGVRCTGTELSLDQCAHHGTHITCKRTGTRFTAGVICSETASDLLLHSALVQETAYIEDRPLHMLYCAAEENCLASSARSANWPYGHRRLLRFSSQIHNLGRADFRPKAGRHSWVWHECHGHYHSMDIFTHYDILTPNGTKVAEGHKASFCLEDTECQEDVSKRYECANFGEQGITVGCWDLYRHDIDCQWIDITDVKPGNYILQVVINPNFEVAESDFTNNAMKCNCKYDGHRIWVHNCHIGDAFSEEANRRFERYPGQTSNQII

SEQ ID NO: 13008 - protein, 341 aa, Homo sapiens
MAAMLKCVMSGSQVKVFGKAVQALSRISDEFWLDPSKKGLALRCVNSSRSAYGCVLFSPVFFQHYQWSALVKMSENELDTTLHLKCKLGMKSILPIFRCLNSLERNIEKCRIFTRSDKCKVVIQFFYRHDLSNAVHSEMFVGSDEFDFFQIGMDTEITFCFKELKGILTFSEATHAPISIYFDFPGKPLALSIDDMLVEANFILATLADEQSRASSPQSLCLSQKRKRSDLIEKKAGKNVTGQALECISKKAAPRRLYPKETLTNISALENCGSPAMKRVDGDVSEVSESSVSNTEEVPGSLCLRKCAAGKNLMEVMPNISVLSDIEQYPPLPRQPEFGVE

SEQ ID NO: 13009 - protein, 681 aa, Homo sapiens
MERGKMAEAESLETAAEHERILREIESTDTACIGPTLRSVYDGEEHGRFMEKLETRIRNHDREIEKMCNFHYQGFVDSITELLKVRGEAQKLKNQVTDTNRKLQHEGKELVIAMEELKQCRLQQRNISATVDKLMLCLPVLEMYSKLRDQMKTKRHYPALKTLEHLEHTYLPQVSHYRFCKVMVDNIPKLREEIKDVSMSDLKDFLESIRKHSDKIGETAMKQAQQQRNLDNIVLQQPRIGSKRKSKKDAYIIFDTEIESTSPKSEQDSGILDVEDEEDDEEVPGAQDLVDFSPVYRCLHIYSVLGARETFENYYRKQRRKQARLVLQPPSNMHETLDGYRKYFNQIVGFFVVEDHILHTTQGLVNRAYIDELWEMALSKTIAALRTHSSYCSDPNLVLDLKNLIVLFADTLQVYGFPVNQLFDMLLEIRDQYSETLLKKWAGIFRNILDSDNYSPIPVTSEEMYKKVVGQFPFQDIELEKQPFPKKFPFSEFVPKVYNQIKEFIYACLKFSEDLHLSSTEVDDMIRKSTNLLLTRTLSNSLQNVIKRKNIGLTELVQIIINTTHLEKSCKYLEEFITNITNVLPETVHTTKLYGTTTFKDARHAAEEEIYTNLNQKIDQFLQLADYDWMTGDLGNKASDYLVDLIAFLRSTFAVFTHLPVSGSCLLCPLYIKRFPYNLVW

SEQ ID NO: 13010 - protein, 705 aa, Homo sapiens
MEGLTLSDAEQKYYSDLFSYCDIESTKKVVVNGRVLELFRAAQLPNDVVLQIMELCGATRLGYFGRSQFYIALKLVAVAQSGFPLRVESINTVKDLPLPRFVASKNEQESRHAASYSSDSENQGSYSGVIPPPPGRGQVKKGSVSHDTVQPRTSADAQEPASPVVSPQQSPPTSPHTWRKHSRHPSGGNSERPLAGPGPFWSPFGEAQSGSSAGDAVWSGHSPPPPQENWVSFADTPPTSTLLTMHPASVQDQTTVRTVASATTAIEIRRQSSSYDDPWKITDEQRQYYVNQFKTIQPDLNGFIPGSAAKEFFTKSKLPILELSHIWELSDFDKDGALTLDEFCAAFHLVVARKNGYDLPEKLPESLMPKLIDLEDSADVGDQPGEVGYSGSPAEAPPSKSPSMPSLNQTWPELNQSSEDTAIVHPVPIRMTPSKIHMQEMELKRTGSDHTNPTSPLLVKPSDLLEENKINSSVKFASGNTVGQQQAGVVAHPPAVPPRPQPSQAPGPAVHRPVDADGLITHTSTSPQQIPEQPNFADFSQFEVFAASNVNDEQDDEAEKHPEVLPAEKASDPASSLRVAKTDSKTEEKTAASAPANVSKGTTPLAPPPKPVRRRLKSEDELRPEVDEHTQKTGVLAAVLASQPSIPRSVGKDKKAIQASIRRNKETNTVLARLNSELQQQLKDVLEERISLEVQLEQLRPFSHL

SEQ ID NO: 13011 - protein, 1028 aa, Homo sapiens
MDTPENVLQMLEAHMQSYKGNDPLGEWERYIQWVEENFPENKEYLITLLEHLMKEFLDKKKYHNDPRFISYCLKFAEYNSDLHQFFEFLYNHGIGTLSSPLYIAWAGHLEAQGELQHASAVLQRGIQNQAEPREFLQQQYRLFQTRLTETHLPAQARTSEPLHNVQVLNQMITSKSNPGNNMACISKNQGSELSGVISSACDKESNMERRVITISKSEYSVHSSLASKVDVEQVVMYCKEKLIRGESEFSFEELRAQKYNQRRKHEQWVNEDRHYMKRKEANAFEEQLLKQKMDELHKKLHQVVETSHEDLPASQERSEVNPARMGPSVGSQQELRAPCLPVTYQQTPVNMEKNPREAPPVVPPLANAISAALVSPATSQSIAPPVPLKAQTVTDSMFAVASKDAGCVNKSTHEFKPQSGAEIKEGCETHKVANTSSFHTTPNTSLGMVQATPSKVQPSPTVHTKEALGFIMNMFQAPTLPDISDDKDEWQSLDQNEDAFEAQFQKNVRSSGAWGVNKIISSLSSAFHVFEDGNKENYGLPQPKNKPTGARTFGERSVSRLPSKPKEEVPHAEEFLDDSTVWGIRCNKTLAPSPKSPGDFTSAAQLASTPFHKLPVESVHILEDKENVVAKQCTQATLDSCEENMVVPSRDGKFSPIQEKSPKQALSSHMYSASLLRLSQPAAGGVLTCEAELGVEACRLTDTDAAIAEDPPDAIAGLQAEWMQMSSLGTVDAPNFIVGNPWDDKLIFKLLSGLSKPVSSYPNTFEWQCKLPAIKPKTEFQLGSKLVYVHHLLGEGAFAQVYEATQGDLNDAKNKQKFVLKVQKPANPWEFYIGTQLMERLKPSMQHMFMKFYSAHLFQNGSVLVGELYSYGTLLDDEDDLSAGLALIDLGQSIDMKLFPKGTIFTAKCETSGFQCVEMLSNKPWNYQIDYFGVAATVYCMLFGTYMKVKNEGGECKPEGLFRRLPHLDMWNEFFHVMLNIPDCHHLPSLDLLRQKLKKVFQQHYTNKIRALRNRLIVLLLECKRSRK

SEQ ID NO: 13012 - protein, 938 aa, Homo sapiens
MTAREHSPRHGARARAMQRASTIDVAADMLGLSLAGNIQDPDEPILEFSLACSELHTPSLDRKPNSFVAVSVTTPPQAFWTKHAQTEIIEGTNNPIFLSSIAFFQDSLINQMTQVKLSVYDVKDRSQGTMYLLGSGTFIVKDLLQDRHHRLHLTLRSAESDRVGNITVIGWQMEEKSDQRPPVTRSVDTVNGRMVLPVDESLTEALGIRSKYASLRKDTLLKSVFGGAICRMYRFPTTDGNHLRILEQMAESVLSLHVPRQFVKLLLEEDAARVCELEELGELSPCWESLRRQIVTQYQTIILTYQENLTDLHQYRGPSFKASSLKADKKLEFVPTNLHIQRMRVQDDGGSDQNYDIVTIGAPAAHCQGFKSGGLRKKLHKFEETKKHFEECCTSSGCQSIIYIPQDVVRAKEIIAQINTLKTQVSYYAERLSRAAKDRSATGLERTLAILADKTRQLVTVCDCKLLANSIHGLNAARPDYIASKASPTSTEEEQVMLRNDQDTLMARWTGRNSRSSLQVDWHEEEWEKVWLNVDKSLECIIQRVDKLLQKERLHGEGCEDVFPCAGSCTSKKDCSPPPEESSPGEWSEALYPLLTTLTDCVAMMSDKAKKAMVFLLMQDSAPTIATYLSLQYRRDVVFCQTLTALICGFIIKLRNCLHDDGFLRQLYTIGLLAQFESLLSTYGEELAMLEDMSLGIMDLRNVTFKVTQATSSASADMLPVITGNRDGFNVRVPLPGPLFDALPREIQSGMLLRVQPVLFNVGINEQQTLAERFGDTSLQEVINVESLVRLNSYFEQFKEVLPEDCLPRSRSQTCLPELLRFLGQNVHARKNKNVDILWQAAEICRRLNGVRFTSCKSAKDRTAMSVTLEQCLILQHEHGMAPQVFTQALECMRSEGCRRENTMKNVGSRKYAFNSLQLKAFPKHYRPPEGTYGKVET

SEQ ID NO: 13013 - protein, 831 aa, Homo sapiens
MSKKGRSKGEKPEMETDAVQMANEELRAKLTSIQIEFQQEKSKVGKLRERLQEAKLEREQEQRRHTAYISELKAKLHEEKTKELQALREGLIRQHEQEAARTAKIKEGELQRLQATLNVLRDGAADKVKTALLTEAREEARRAFDGERLRLQQEILELKAARKQAEEALSNCMQADKTKAADLRAAYQAHQDEVHRIKRECERDIRRLMDEIKGKDRVILALEKELGVQAGQTQKLLLQKEALDEQLVQVKEAERHHSSPKRELPPGIGDMVELMGVQDQHMDERDVRRFQLKIAELNSVIRKLEDRNTLLADERNELLKRSRETEVQLKPLVEKNKRMNKKNEDLLQSIQRMEEKIKNLTRENVEMKEKLSAQASLKRHTSLNDLSLTRDEQEIEFLRLQVLEQQHVIDDLSLERERLLRSKRHRGKSLKPPKKHVVETFFGFDEESVDSETLSETSYNTDRTDRTPATPEEDLDDATAREEADLRFCQLTREYQALQRAYALLQEQVGGTLDAEREARTREQLQADLLRCQAKIEDLEKLLVEKGQDSKWVEEKQLLIRTNQDLLEKIYRLEMEENQLKNEMQDAKDQNELLEFRVLELEERERRSPAFNLQITTFPENHSSALQLFCHQEGVKDVNVSELMKKLDILGDNGNLRNEEQVAIIQAGTVLALCEKWLKQIEGTEAALTQKMLDLEKEKDLFSRQKGYLEEELDYRKQALDQAYLKIQDLEATLYTALQQEPGRRAGEALSEGQREDLQAAVEKVRRQILRQSREFDSQILRERMELLQQAQQRIRELEDKLEFQKRHLKELEEKFLFLFLFFSLAFILWP

SEQ ID NO: 13014 - protein, 532 aa, Homo sapiens
MPWRRRRNRVSALEGGREEEAPPEAAAVPPALLTSPQQTEAAAERILLRGIFEIGRDSCDVVLSERALRWRPIQPERPAGDSKYDLLCKEEFIELKDIFSVKLKRRCSVKQQRSGTLLGITLFICLKKEQNKLKNSTLDLINLSEDHCDIWFRQFKKILAGFPNRPKSLKILLNPQSHKKEATQVYYEKVEPLLKLAGIKTDVTIMEYEGHALSLLKECELQGFDGVVCVGGDGSASEVAHALLLRAQKNAGMETDRILTPVRAQLPLGLIPAGSTNVLAHSLHGVPHVITATLHIIMGHVQLVDVCTFSTAGKLLRFGFSAMFGFGGRTLALAEKYRWMSPNQRRDFAVVKALAKLKAEDCEISFLPFNSSDDVQERRAQGSPKSDCNDQWQMIQGQFLNVSIMAIPCLCSVAPRGLAPNTRLNNGSMALIIARNTSRPEFIKHLKRYASVKNQFNFPFVETYTVEEVKVHPRNNTGGYNPEEEEDETASENCFPWNVDGDLMEVASEVHIRLHPRLISLYGGSMEEMIPK

SEQ ID NO: 13015 - protein, 1951 aa, Homo sapiens
MAQALLVPPGPESFRLFTRESLAAIEKRAAEEKAKKPKKEQDNDDENKPKPNSDLEAGKNLPFIYGDIPPEMVSEPLEDLDPYYINKKTFIVMNKGKAIFRFSATSALYILTPLNPVRKIAIKILVHSLFSMLIMCTILTNCVFMTLSNPPDWTKNVEYTFTGIYTFESLIKILARGFCLEDFTFLRDPWNWLDFSVIVMAYVTEFVSLGNVSALRTFRVLRALKTISVIPGLKTIVGALIQSVKKLSDVMILTVFCLSVFALIGLQLFMGNLRNKCLQWPPSDSAFETNTTSYFNGTMDSNGTFVNVTMSTFNWKDYIGDDSHFYVLDGQKDPLLCGNGSDAGQCPEGYICVKAGRNPNYGYTSFDTFSWAFLSLFRLMTQDYWENLYQLTLRAAGKTYMIFFVLVIFLGSFYLVNLILAVVAMAYEEQNQATLEEAEQKEAEFQQMLEQLKKQQEEAQAVAAASAASRDFSGIGGLGELLESSSEASKLSSKSAKEWRNRRKKRRQREHLEGNNKGERDSFPKSESEDSVKRSSFLFSMDGNRLTSDKKFCSPHQSLLSIRGSLFSPRRNSKTSIFSFRGRAKDVGSENDFADDEHSTFEDSESRRDSLFVPHRHGERRNSNGTTTETEVRKRRLSSYQISMEMLEDSSGRQRAVSIASILTNTMEELEESRQKCPPCWYRFANVFLIWDCCDAWLKVKHLVNLIVMDPFVDLAITICIVLNTLFMAMEHYPMTEQFSSVLTVGNLVFTGIFTAEMVLKIIAMDPYYYFQEGWNIFDGIIVSLSLMELGLSNVEGLSVLRSFRLLRVFKLAKSWPTLNMLIKIIGNSVGALGNLTLVLAIIVFIFAVVGMQLFGKSYKECVCKINDDCTLPRWHMNDFFHSFLIVFRVLCGEWIETMWDCMEVAGQTMCLIVFMLVMVIGNLVVLNLFLALLLSSFSSDNLAATDDDNEMNNLQIAVGRMQKGIDYVKNKMRECFQKAFFRKPKVIEIHEGNKIDSCMSNNTGIEISKELNYLRDGNGTTSGVGTGSSVEKYVIDENDYMSFINNPSLTVTVPIAVGESDFENLNTEEFSSESELEESKEKLNATSSSEGSTVDVVLPREGEQAETEPEEDLKPEACFTEGCIKKFPFCQVSTEEGKGKIWWNLRKTCYSIVEHNWFETFIVFMILLSSGALAFEDIYIEQRKTIKTMLEYADKVFTYIFILEMLLKWVAYGFQTYFTNAWCWLDFLIVDVSLVSLVANALGYSELGAIKSLRTLRALRPLRALSRFEGMRVVVNALVGAIPSIMNVLLVCLIFWLIFSIMGVNLFAGKFYHCVNMTTGNMFDISDVNNLSDCQALGKQARWKNVKVNFDNVGAGYLALLQVATFKGWMDIMYAAVDSRDVKLQPVYEENLYMYLYFVIFIIFGSFFTLNLFIGVIIDNFNQQKKKFGGQDIFMTEEQKKYYNAMKKLGSKKPQKPIPRPANKFQGMVFDFVTRQVFDISIMILICLNMVTMMVETDDQGKYMTLVLSRINLVFIVLFTGEFVLKLVSLRHYYFTIGWNIFDFVVVILSIVGMFLAEMIEKYFVSPTLFRVIRLARIGRILRLIKGAKGIRTLLFALMMSLPALFNIGLLLFLVMFIYAIFGMSNFAYVKKEAGIDDMFNFETFGNSMICLFQITTSAGWDGLLAPILNSAPPDCDPDTIHPGSSVKGDCGNPSVGIFFFVSYIIISFLVVVNMYIAVILENFSVATEESAEPLSEDDFEMFYEVWEKFDPDATQFIEFSKLSDFAAALDPPLLIAKPNKVQLIAMDLPMVSGDRIHCLDILFAFTKRVLGESGEMDALRIQMEDRFMASNPSKVSYEPITTTLKRKQEEVSAAIIQRNFRCYLLKQRLKNISSNYNKEAIKGRIDLPIKQDMIIDKLNGNSTPEKTDGSSSTTSPPSYDSVTKPDKEKFEKDKPEKESKGKEVRENQK

SEQ ID NO: 13016 - protein, 381 aa, Homo sapiens
MSRHEGVSCDACLKGNFRGRRYKCLICYDYDLCASCYESGATTTRHTTDHPMQCILTRVDFDLYYGGEAFSVEQPQSFTCPYCGKMGYTETSLQEHVTSEHAETSTEVICPICAALPGGDPNHVTDDFAAHLTLEHRAPRDLDESSGVRHVRRMFHPGRGLGGPRARRSNMHFTSSSTGGLSSSQSSYSPSNREAMDPIAELLSQLSGVRRSAGGQLNSSGPSASQLQQLQMQLQLERQHAQAARQQLETARNATRRTNTSSVTTTITQSTATTNIANTESSQQTLQNSQFLLTRLNDPKMSETERQSMESERADRSLFVQELLLSTLVREESSSSDEDDRGEMADFGAMGCVDIMPLDVALENLNLKESNKGNEPPPPPL

SEQ ID NO: 13017 - protein, 459 aa, Homo sapiens
MALTLFDTDEYRPPVWKSYLYQLQQEAPHPRRITCTCEVENRPKYYGREFHGMISREAADQLLIVAEGSYLIRESQRQPGTYTLALRFGSQTRNFRLYYDGKHFVGEKRFESIHDLVTDGLITLYIETKAAEYIAKMTINPIYEHVGYTTLNREPAYKKHMPVLKETHDERDSTGQDGVSEKRLTSLVRRATLKENEQIPKYEKIHNFKVHTFRGPHWCEYCANFMWGLIAQGVKCADCGLNVHKQCSKMVPNDCKPDLKHVKKVYSCDLTTLVKAHTTKRPMVVDMCIREIESRGLNSEGLYRVSGFSDLIEDVKMAFDRDGEKADISVNMYEDINIITGALKLYFRDLPIPLITYDAYPKFIESAKIMDPDEQLETLHEALKLLPPAHCETLRYLMAHLKRVTLHEKENLMNAENLGIVFGPTLMRSPELDAMAALNDIRYQRLVVELLIKNEDILF

SEQ ID NO: 13018 - protein, 461 aa, Homo sapiens
MSKKGRSKGEKPEMETDAVQMANEELRAKLTSIQIEFQQEKSKMDEIKGKDRVILALEKELGVQAGQTQKLLLQKEALDEQLVQVKEAERHHSSPKRELPPGIGDMVELMGVQDQHMDERDVRRFQLKIAELNSVIRKLEDRNTLLADERNELLKRSRETEVQLKPLVEKNKRMNKKNEDLLQSIQRMEEKIKNLTRENVEMKEKLSAQASLKRHTSLNDLSLTRDEQEIEFLRLQVLEQQHVIDDLSLERERLLRSKRHRGKSLKPPKKHVVETFFGFDEESVDSETLSETSYNTDRTDRTPATPEEDLDDATAREEADLRFCQLTREYQALQRAYALLQEQVGGTLDAEREARTREQLQADLLRCQAKIEDLEKLLVEKGQDSKWVEEKQLLIRTNQDLLEKIYRLEMEENQLKNEMQDAKDQNELLEFRVLELEVRDSICCKLSNGADILFEPKLKFM

SEQ ID NO: 13019 - protein, 288 aa, Homo sapiens
MSAFEKPQIIAHIQKGFNYTVFDCKWVPCSAKFVTMGNFARGTGVIQLYEIQHGDLKLLREIEKAKPIKCGTFGATSLQQRYLATGDFGGNLHIWNLEAPEMPVYSVKGHKEIINAIDGIGGLGIGEGAPEIVTGSRDGTVKVWDPRQKDDPVANMEPVQGENKRDCWTVAFGNAYNQEERVVCAGYDNGDIKLFDLRNMALRWETNIKNGVCSLEFDRKDISMNKLVATSLEGKFHVFDMRTQHPTKGFASVSEKAHKSTVWQVRHLPQNRELFLTAGGAGGLHLWK

SEQ ID NO: 13020 - protein, 483 aa, Homo sapiens
MTTLAGAVPRMMRPGPGQNYPRSGFPLEVSTPLGQGRVNQLGGVFINGRPLPNHIRHKIVEMAHHGIRPCVISRQLRVSHGCVSKILCRYQETGSIRPGAIGGSKPKVTTPDVEKKIEEYKRENPGMFSWEIRDKLLKDAVCDRNTVPSVSSISRILRSKFGKGEEEEADLERKEAEESEKKAKHSIDGILSERASAPQSDEGSDIDSEPDLPLKRKQRRSRTTFTAEQLEELERAFERTHYPDIYTREELAQRAKLTEARVQVWFSNRRARWRKQAGANQLMAFNHLIPGGFPPTAMPTLPTYQLSETSYQPTSIPQAVSDPSSTVHRPQPLPPSTVHQSTIPSNPDSSSAYCLPSTRHGFSSYTDSFVPPSGPSNPMNPTIGNGLSPQVMGLLTNHGGVPHQPQTDYALSPLTGGLEPTTTVSASCSQRLDHMKSLDSLPTSQSYCPPTYSTTGYSMDPVTGYQYGQYGQSAFHYLKPDIA

SEQ ID NO: 13021 - protein, 517 aa, Homo sapiens
MDSSGWRGVLSSSPPFRLRSAKFSGIALEDLRRALKTRLQMVCVFVMNRMNSQNSGFTQRRRMALGIVILLLVDVIWVASSELTSYVFTQYNKPFFSTFAKTSMFVLYLLGFIIWKPWRQQCTRGLRGKHAAFFADAEGYFAACTTDTTMNSSLSEPLYVPVKFHDLPSEKPESTNIDTEKTPKKSRVRFSNIMEIRQLPSSHALEAKLSRMSYPVKEQESILKTVGKLTATQVAKISFFFCFVWFLANLSYQEALSDTQVAIVNILSSTSGLFTLILAAVFPSNSGDRFTLSKLLAVILSIGGVVLVNLAGSEKPAGRDTVGSIWSLAGAMLYAVYIVMIKRKVDREDKLDIPMFFGFVGLFNLLLLWPGFFLLHYTGFEDFEFPNKVVLMCIIINGLIGTVLSEFLWLWGCFLTSSLIGTLALSLTIPLSIIADMCMQKVQFSWLFFAGAIPVFFSFFIVTLLCHYNNWDPVMVGIRRIFAFICRKHRIQRVPEDSEQCESLISMHSVSQEDGAS

SEQ ID NO: 13022 - protein, 2564 aa, Homo sapiens
MKQLQPQPPPKMGDFYDPEHPTPEEEENEAKIENVQKTGFIKGPMFKGVASSRFLPKGTKTKVNLEEQGRQKVSFSFSLTKKTLQNRFLTALGNEKQSDTPNPPAVPLQVDSTPKMKMEIGDTLSTAEESSPPKSRVELGKIHFKKHLLHVTSRPLLATTTAVASPPTHAAPLPAVIAESTTVDSPPSSPPPPPPPAQATTLSSPAPVTEPVALPHTPITVLMAAPVPLPVDVAVRSLKEPPIIIVPESLEADTKQDTISNSLEEHVTQILNEQADISSKKEDSHIGKDEEIPDSSKISLSCKKTGSKKKSSQSEGIFLGSESDEDSVRTSSSQRSHDLKFSASIEKERDFKKSSAPLKSEDLGKPSRSKTDRDDKYFSYSKLERDTRYVSSRCRSERERRRSRSHSRSERGSRTNLSYSRSERSHYYDSDRRYHRSSPYRERTRYSRPYTDNRARESSDSEEEYKKTYSRRTSSHSSSYRDLRTSSYSKSDRDCKTETSYLEMERRGKYSSKLERESKRTSENEAIKRCCSPPNELGFRRGSSYSKHDSSASRYKSTLSKPIPKSDKFKNSFCCTELNEEIKQSHSFSLQTPCSKGSELRMINKNPEREKAGSPAPSNRLNDSPTLKKLDELPIFKSEFITHDSHDSIKELDSLSKVKNDQLRSFCPIELNINGSPGAESDLATFCTSKTDAVLMTSDDSVTGSELSPLVKACMLSSNGFQNISRCKEKDLDDTCMLHKKSESPFRETEPLVSPHQDKLMSMPVMTVDYSKTVVKEPVDTRVSCCKTKDSDIYCTLNDSNPSLCNSEAENIEPSVMKISSNSFMNVHLESKPVICDSRNLTDHSKFACEEYKQSIGSTSSASVNHFDDLYQPIGSSGIASSLQSLPPGIKVDSLTLLKCGENTSPVLDAVLKSKKSSEFLKHAGKETIVEVGSDLPDSGKGFASRENRRNNGLSGKCLQEAQEEGNSILPERRGRPEISLDERGEGGHVHTSDDSEVVFSSCDLNLTMEDSDGVTYALKCDSSGHAPEIVSTVHEDYSGSSESSNDESDSEDTDSDDSSIPRNRLQSVVVVPKNSTLPMEETSPCSSRSSQSYRHYSDHWEDERLESRRHLYEEKFESIASKACPQTDKFFLHKGTEKNPEISFTQSSRKQIDNRLPELSHPQSDGVDSTSHTDVKSDPLGHPNSEETVKAKIPSRQQEELPIYSSDFEDVPNKSWQQTTFQNRPDSRLGKTELSFSSSCEIPHVDGLHSSEELRNLGWDFSQEKPSTTYQQPDSSYGACGGHKYQQNAEQYGGTRDYWQGNGYWDPRSGRPPGTGVVYDRTQGQVPDSLTDDREEEENWDQQDGSHFSDQSDKFLLSLQKDKGSVQAPEISSNSIKDTLAVNEKKDFSKNLEKNDIKDRGPLKKRRQEIESDSESDGELQDRKKVRVEVEQGETSVPPGSALVGPSCVMDDFRDPQRWKECAKQGKMPCYFDLIEENVYLTERKKNKSHRDIKRMQCECTPLSKDERAQGEIACGEDCLNRLLMIECSSRCPNGDYCSNRRFQRKQHADVEVILTEKKGWGLRAAKDLPSNTFVLEYCGEVLDHKEFKARVKEYARNKNIHYYFMALKNDEIIDATQKGNCSRFMNHSCEPNCETQKWTVNGQLRVGFFTTKLVPSGSELTFDYQFQRYGKEAQKCFCGSANCRGYLGGENRVSIRAAGGKMKKERSRKKDSVDGELEALMENGEGLSDKNQVLSLSRLMVRIETLEQKLTCLELIQNTHSQSCLKSFLERHGLSLLWIWMAELGDGRESNQKLQEEIIKTLEHLPIPTKNMLEESKVLPIIQRWSQTKTAVPPLSEGDGYSSENTSRAHTPLNTPDPSTKLSTEADTDTPKKLMFRRLKIISENSMDSAISDATSELEGKDGKEDLDQLENVPVEEEEELQSQQLLPQQLPECKVDSETNIEASKLPTSEPEADAEIEPKESNGTKLEEPINEETPSQDEEEGVSDVESERSQEQPDKTVDISDLATKLLDSWKDLKEVYRIPKKSQTEKENTTTERGRDAVGFRDQTPAPKTPNRSRERDPDKQTQNKEKRKRRSSLSPPSSAYERGTKRPDDRYDTPTSKKKVRIKDRNKLSTEERRKLFEQEVAQREAQKQQQQMQNLGMTSPLPYDSLGYNAPHHPFAGYPPGYPMQAYVDPSNPNAGKVLLPTPSMDPVCSPAPYDHAQPLVGHSTEPLSAPPPVPVVPHVAAPVEVSSSQYVAQSDGVVHQDSSVAVLPVPAPGPVQGQNYSVWDSNQQSVSVQQQYSPAQSQATIYYQGQTCPTVYGVTSPYSQTTPPIVQSYAQPSLQYIQGQQIFTAHPQGVVVQPAAAVTTIVAPGQPQPLQPSEMVVTNNLLDLPPPSPPKPKTIVLPPNWKTARDPEGKIYYYHVITRQTQWDPPTWESPGDDASLEHEAEMDLGTPTYDENPMKASKKPKTAEADTSSELAKKSKEVFRKEMSQFIVQCLNPYRKPDCKVGRITTTEDFKHLARKLTHGVMNKELKYCKNPEDLECNENVKHKTKEYIKKYMQKFGAVYKPKEDTELE

SEQ ID NO: 13023 - protein, 1189 aa, Homo sapiens; identical to SEQ ID NO: 6271

SEQ ID NO: 13024 - protein, 1321 aa, Homo sapiens
MAAETQTLNFGPEWLRALSSGGSITSPPLSPALPKYKLADYRYGREEMLALFLKDNKIPSDLLDKEFLPILQEEPLPPLALVPFTEEEQRNFSMSVNSAAVLRLTGRGGGGTVVGAPRGRSSSRGRGRGRGECGFYQRSFDEVEGVFGRGGGREMHRSQSWEERGDRRFEKPGRKDVGKKNGYYCMYSPVLLLGQPLCQGRPNFEEGGPTSVGRKHEFIRSESENWRIFREEQNGEDEDGGWRLAGSRRDGERWRPHSPDGPRSAGWREHMERRRRFEFDFRDRDDERGYRRVRSGSGSIDDDRDSLPEWCLEDAEEEMGTFDSSGAFLSLKKVQKEPIPEEQEMDFRPVDEGEECSDSEGSHNEEAKEPDKTNKKEGEKTDRVGVEASEETPQTSSSSARPGTPSDHQSQEASQFERKDEPKTEQTEKAEEETRMENSLPAKVPSRGDEMVADVQQPLSQIPSDTASPLLILPPPVPNPSPTLRPVETPVVGAPGMGSVSTEPDDEEGLKHLEQQAEKMVAYLQDSALDDERLASKLQEHRAKGVSIPLMHEAMQKWYYKDPQGEIQGPFNNQEMAEWFQAGYFTMSLLVKRACDESFQPLGDIMKMWGRVPFSPGPAPPPHMGELDQERLTRQQELTALYQMQHLQYQQFLIQQQYAQVLAQQQKAALSSQQQQQLALLLQQFQTLKMRISDQNIIPSVTRSVSVPDTGSIWELQPTASQPTVWEGGSVWDLPLDTTTPGPALEQLQQLEKAKAAKLEQERREAEMRAKREEEERKRQEELRRQQEEILRRQQEEERKRREEEELARRKQEEALRRQREQEIALRRQREEEERQQQEEALRRLEERRREEEERRKQEELLRKQEEEAAKWAREEEEAQRRLEENRLRMEEEAARLRHEEEERKRKELEVQRQKELMRQRQQQQEALRRLQQQQQQQQLAQMKLPSSSTWGQQSNTTACQSQATLSLAEIQKLEEERERQLREEQRRQQRELMKALQQQQQQQQQKLSGWGNVSKPSGTTKSLLEIQQEEARQMQKQQQQQQQHQQPNRARNNTHSNLHTSIGNSVWGSINTGPPNQWASDLVSSIWSNADTKNSNMGFWDDAVKEVGPRNSTNKNKNNASLSKSVGVSNRQNKKVEEEEKLLKLFQGVNKAQDGFTQWCEQMLHALNTANNLDVPTFVSFLKEVESPYEVHDYIRAYLGDTSEAKEFAKQFLERRAKQKANQQRQQQQLPQQQQQQPPQQPPQQPQQQDSVWGMNHSTLHSVFQTNQSNNQQSNFEAVQSGKKKKKQKMVRADPSLLGFSVNASSERLNMGEIETLDDY

SEQ ID NO: 13025 - protein, 529 aa, Homo sapiens
MDDHVTIRKKHLQRPIFRLRCLVKQLERGDVNVVDLKKNIEYAASVLEAVYIDETRRLLDTEDELSDIQTDSVPSEVRDWLASTFTRKMGMTKKKPEEKPKFRSIVHAVQAGIFVERMYRKTYHMVGLAYPAAVIVTLKDVDKWSFDVFALNEASGEHSLKFMIYELFTRYDLINRFKIPVSCLITFAEALEVGYSKYKNPYHNLIHAADVTQTVHYIMLHTGIMHWLTELEILAMVFAAAIHDYEHTGTTNNFHIQTRSDVAILYNDRSVLENHHVSAAYRLMQEEEMNILINLSKDDWRDLRNLVIEMVLSTDMSGHFQQIKNIRNSLQQPEGIDRAKTMSLILHAADISHPAKSWKLHYRWTMALMEEFFLQGDKEAELGLPFSPLCDRKSTMVAQSQIGFIDFIVEPTFSLLTDSTEKIVIPLIEEASKAETSSYVASSSTTIVGLHIADALRRSNTKGSMSDGSYSPDYSLAAVDLKSFKNNLVDIIQQNKERWKELAAQGESDLHKNSEDLVNAEEKHDETHS

SEQ ID NO: 13026 - protein, 4532 aa, Homo sapiens
MDDLRVLWMRDRVYAAFGITDPQLFEDLLNRDDGQGEDLILHFLNQASEEEGPSALFIYRTMVPEEVEVEIDEIPVLSEEGEEEEETYSQKVESVDKVRAKRVSLRTESLGQPLNREDEEMDKEISEKLPSKRTAKHIMEKMHLHMLCTPLPEEFLDQNVVFFLRNTKEAISEATDMKEAMEIMPETLEYGIINANVLHFLKNIICQVFLPALSFNQHRTSTTVGVTSGEVSNSSEHESDLPPMPGEAVEYHSIQLIRDEFLMNVQKFASNIQRTMQQLEGEIKLEMPIISVEGEVSDLAADPETVDILEQCVINWLNQISTAVEAQLKKTPQGKGPLAEIEFWRERNATLSALHEQTKLPIVRKVLDVIKESDSMLVANLQPVFTELFKFHTEASDNVRFLSTVERYFKNITHGSGFHVVLDTIPAMMSALRMVWIISRHYNKDERMIPLMERIAWEIAERVCRVVNLRTLFKENRASAQSKTLEARNTLRLWKKAYFDTRAKIEASGREDRWEFDRKRLFERTDYMATICQDLSDVLQILEEFYNIFGPELKAVTGDPKRIDDVLCRVDGLVTPMENLTFDPFSIKSSQFWKYVMDEFKIEVLIDIINKIFVQNLENPPLYKNHPPVAGAIYWERSLFFRIKHTILRFQEVQEILDSDRGQEVKQKYLEVGRTMKEYEDRKYEQWMEVTEQVLPALMKKSLLTKSSIATEEPSTLERGAVFAINFSPALREIINETKYLEQLGFTVPELARNVALQEDKFLRYTAGIQRMLDHYHMLIGTLNDAESVLLKDHSQELLRVFRSGYKRLNWNSLGIGDYITGCKQAIGKFESLVHQIHKNADDISSRLTLIEAINLFKYPAAKSEEELPGVKEFFEHIERERASDVDHMVRWYLAIGPLLTKVEGLVVHTNTGKAPKLASYYKYWEKKIYEVLTKLILKNLQSFNSLILGNVPLFHTETILTAPEIILHPNTNEIDKMCFHCVRNCVEITKHFVRWMNGSCIECPPQKGEEEEVVIINFYNDISLNPQIIEQAVMIPQNVHRILINLMKYLQKWKRYRPLWKLDKAIVMEKFAAKKPPCVAYDEKLQFYSKIAYEVMRHPLIKDEHCIRLQLRHLANTVQENAKSWVISLGKLLNESAKEELYNLHEEMEHLAKNLRKIPNTLEDLKFVLATIAEIRSKSLVMELRYRDVQERYRTMAMYNLFPPDAEKELVDKIESIWSNLFNDSVNVEHALGDIKRTFTELTRGEIMNYRVQIEEFAKRFYSEGPGSVGDDLDKGVELLGVYERELARHEKSRQELANAEKLFDLPITMYPELLKVQKEMSGLRMIYELYEGLKVAKEEWSQTLWINLNVQILQEGIEGFLRALRKLPRPVRGLSVTYYLEAKMKAFKDSIPLLLDLKNEALRDRHWKELMEKTSVFFEMTETFTLENMFAMELHKHTDVLNEIVTAAIKEVAIEKAVKEILDTWENMKFTVVKYCKGTQERGYILGSVDEIIQSLDDNTFNLQSISGSRFVGPFLQTVHKWEKTLSLIGEVIEIWMLVQRKWMYLESIFIGGDIRSQLPEEAKKFDNIDKVFKRIMGETLKDPVIKRCCEAPNRLSDLQNVSEGLEKCQKSLNDYLDSKRNAFPRFFFISDDELLSILGSSDPLCVQEHMIKMYDNIASLRFNDGDSGEKLVSAMISAEGEVMEFRKILRAEGRVEDWMTAVLNEMRRTNRLITKEAIFRYCEDRSRVDWMLLYQGMVVLAASQVWWTWEVEDVFHKAQKGEKQAMKNYGRKMHRQIDELVTRITMPLSKNDRKKYNTVLIIDVHARDIVDSFIRGSILEAREFDWESQLRFYWDREPDELNIRQCTGTFGYGYEYMGLNGRLVITPLTDRIYLTLTQALSMYLGGAPAGPAGTGKTETTKDLAKALGLLCVVTNCGEGMDYRAVGKIFSGLAQCGAWGCFDEFNRIDASVLSVISSQIQTIRNALIHQLTTFQFEGQEISLDSRMGIFITMNPGYAGRTELPESVKALFRPVVVIVPDLQQICEIMLFSEGFLEAKTLAKKMTVLYKLAREQLSKQYHYDFGLRALKSVLVMAGELKRGSSDLREDVVLMRALRDMNLPKFVFEDVPLFLGLISDLFPGLDCPRVRYPDFNDAVEQVLEENGYAVLPIQVDKVVQMFETMLTRHTTMVVGPTRGGKSVVINTLCQAQTKLGLTTKLYILNPKAVSVIELYGILDPTTRDWTDGVLSNIFREINKPTDKKERKYILFDGDVDALWVENMNSVMDDNRLLTLANGERIRLQAHCALLFEVGDLQYASPATVSRCGMVYVDPKNLKYRPYWKKWVNQIPNKVEQYNLNSLFEKYVPYLMDVIVEGIVDGRQAEKLKTIVPQTDLNMVTQLAKMLDALLEGEIEDLDLLECYFLEALYCSLGASLLEDGRMKFDEYIKRLASLSTVDTEGVWANPGELPGQLPTLYDFHFDNKRNQWVPWSKLVPEYIHAPERKFINILVHTVDTTRTTWILEQMVKIKQPVIFVGESGTSKTATTQNFLKNLSEETNIVLMVNFSSRTTSMDIQRNLEANVEKRTKDTYGPPMGKRLLVFMDDMNMPRVDEYGTQQPIALLKLLLEKGYLYDRGKELNCKSIRDLGFIAAMGKAGGGRNEVDPRFISLFSVFNVPFPSEESLHLIYSSILKGHTSTFHESIVAVSGKLTFCTLALYKNIVQDLPPTPSKFHYIFNLRDLSRVFNGLVLTNPERFQTVAQMVRVWRNECLRVFHDRLISETDKQLVQQHIGSLVVEHFKDDVEVVMRDPILFGDFQMALHEGEPRIYEDIQDYEAAKALFQEILEEYNESNTKMNLVLFDDALEHLTRVHRIIRMDRGHALLVGVGGSGKQSLSRLAAFTASCEVFEILLSRGYSENSFREDLKSLYLKLGIENKAMIFLFTDAHVAEEGFLELINNMLTSGIVPALFSEEEKESILSQIGQEALKQGMGPAKESVWQYFVNKSANNLHIVLGMSPVGDTLRTWCRNFPGMVNNTGIDWFMPWPPQALHAVAKSFLGYNPMIPAENIENVVKHVVLVHQSVDHYSQQFLQKLRRSNYVTPKNYLDFINTYSKLLDEKTQCNIAQCKRLDGGLDKLKEATIQLDELNQKLAEQKIVLAEKSAACEALLEEIAVNTAVAEEKKKLAEEKAMEIEEQNKVIAMEKAEAETTLAEVMPILEAAKLELQKLDKSDVTEIRSFAKPPKQVQTVCECILIMKGYKELNWKTAKGVMSDPNFLRSLMEIDFDSITQSQVKNIKGLLKTLNTTTEEMEAVSKAGLGMLKFVEAVMGYCDVFREIKPKREKVARLERNFYLTKRELERIQNELAAIQKELETLGAKYEAAILEKQKLQEEAEIMERRLIAADKLISGLGSENIRWLNDLDELMHRRVKLLGDCLLCAAFLSYEGAFTWEFRDEMVNRIWQNDILEREIPLSQPFRLESLLTDDVEISRWGSQGLPPDELSVQNGILTTRASRFPLCIDPQQQALNWIKRKEEKNNLRVASFNDPDFLKQLEMSIKYGTPFLFRDVDEYIDPVIDNVLEKNIKVSQGRQFIILGDKEVDYDSNFRLYLNTKLANPRYSPSVFGKAMVINYTVTLKGLEDQLLSVLVAYERRELEEQREHLIQETSENKNLLKDLEDSLLRELATSTGNMLDNVDLVHTLEETKSKATEVSEKLKLAEKTALDIDRLRDGYRPAARRGAILFFVLSEMALVNSMYQYSLIAFLEVFRLSLKKSLPDSILMKRLRNIMDTLTFSIYNHGCTGLFERHKLLFSFNMTIKIEQAEGRVPQEELDFFLKGNISLEKSKRKKPCAWLSDQGWEDIILLSEMFSDNFGQLPDDVENNQTVWQEWYDLDSLEQFPVPLGYDNNITPFQKLLILRCFRVDRVYRAVTDYVTVTMGEKYVQPPMISFEAIFEQSTPHSPIVFILSPGSDPATDLMKLAERSGFGGNRLKFLAMGQGQEKVALQLLETAVARGQWLMLQNCHLLVKWLKDLEKSLERITKPHPDFRLWLTTDPTKGFPIGILQKSLKVVTEPPNGLKLNMRATYFKISHEMLDQCPHPAFKPLVYVLAFFHAVVQERRKFGKIGWNVYYDFNESDFQVCMEILNTYLTKAFQQRDPRIPWGSLKYLIGEVMYGGRAIDSFDRRILTIYMDEYLGDFIFDTFQPFHFFRNKEVDYKIPVGDEKEKFVEAIEALPLANTPEVFGLHPNAEIGYYTQAARDMWAHLLELQPQTGESSSGISRDDYIGQVAKEIENKMPKVFDLDQVRKRLGTGLSPTSVVLLQELERFNKLVVRMTKSLAELQRALAGEVGMSNELDDVARSLFIGHIPNIWRRLAPDTLKSLGNWMVYFLRRFSQYMLWVTESEPSVMWLSGLHIPESYLTALVQATCRKNGWPLDRSTLFTQVTKFQDADEVNERAGQGCFVSGLYLEGADWDIEKGCLIKSKPKVLVVDLPILKIIPIEAHRLKLQNTFRTPVYTTSMRRNAMGVGLVFEADLFTTRHISHWVLQGVCLTLNSD

SEQ ID NO: 13027 - protein, 538 aa, Homo sapiens
MKVLLRLICFIALLISSLEADKCKEREEKIILVSSANEIDVRPCPLNPNEHKGTITWYKDDSKTPVSTEQASRIHQHKEKLWFVPAKVEDSGHYYCVVRNSSYCLRIKISAKFVENEPNLCYNAQAIFKQKLPVAGDGGLVCPYMEFFKNENNELPKLQWYKDCKPLLLDNIHFSGVKDRLIVMNVAEKHRGNYTCHASYTYLGKQYPITRVIEFITLEENKPTRPVIVSPANETMEVDLGSQIQLICNVTGQLSDIAYWKWNGSVIDEDDPVLGEDYYSVENPANKRRSTLITVLNISEIESRFYKHPFTCFAKNTHGIDAAYIQLIYPVTNFQKHMIGICVTLTVIIVCSVFIYKIFKIDIVLWYRDSCYDFLPIKVLPEVLEKQCGYKLFIYGRDDYVGEDIVEVINENVKKSRRLIIILVRETSGFSWLGGSSEEQIAMYNALVQDGIKVVLLELEKIQDYEKMPESIKFIKQKHGAIRWSGDFTQGPQSAKTRFWKNVRYHMPVQRRSPSSKHQLLSPATKEKLQREAHVPLG

SEQ ID NO: 13028 - protein, 972 aa, Homo sapiens
MTAREHSPRHGARARAMQRASTIDVAADMLGLSLAGNIQDPDEPILEFSLACSELHTPSLDRKPNSFVAVSVTTPPQAFWTKHAQTEIIEGTNNPIFLSSIAFFQDSLINQMTQVKLSVYDVKDRSQGTMYLLGSGTFIVKDLLQDRHHRLHLTLRSAESDRVGNITVIGWQMEEKSDQRPPVTRSVDTVNGRMVLPVDESLTEALGIRSKYASLRKDTLLKSVFGGAICRMYRFPTTDGNHLRILEQMAESVLSLHVPRQFVKLLLEEDAARVCELEELGELSPCWESLRRQIVTQYQTIILTYQENLTDLHQYRGPSFKASSLKADKKLEFVPTNLHIQRMRVQDDGGSDQNYDIVTIGAPAAHCQGFKSGGLRKKLHKFEETKKHTSSGCQSIIYIPQDVVRAKEIIAQINTLKTQVSYYAERLSRAAKDRSATGLERTLAILADKTRQLVTVCDCKLLANSIHGLNAARPDYIASKASPTSTEEEQVMLRNDQDTLMARWTGRNSRSSLQVDWHEEEWEKVWLNVDKSLECIIQRVDKLLQKERLHGEGCEDVFPCAGSCTSKKGNPDSHAYWIRPEDPFCDVPSSPCPSTMPSTACHPHLTTHCSPPPEESSPGEWSEALYPLLTTLTDCVAMMSDKAKKAMVFLLMQDSAPTIATYLSLQYRRDVVFCQTLTALICGFIIKLRNCLHDDGFLRQLYTIGLLAQFESLLSTYGEELAMLEDMSLGIMDLRNVTFKVTQATSSASADMLPVITGNRDGFNVRVPLPGPLFDALPREIQSGMLLRVQPVLFNVGINEQQTLAERFGDTSLQEVINVESLVRLNSYFEQFKEVLPEDCLPRSRSQTCLPELLRFLGQNVHARKNKNVDILWQAAEICRRLNGVRFTSCKSAKDRTAMSVTLEQCLILQHEHGMAPQVFTQALECMRSEGCRRENTMKNVGSRKYAFNSLQLKAFPKHYRPPEGTYGKVET

SEQ ID NO: 13029 - protein, 286 aa, Homo sapiens
MGRKKIQISRILDQRNRQVTFTKRKFGLMKKAYELSVLCDCEIALIIFNSANRLFQYASTDMDRVLLKYTEYSEPHESRTNTDILETLKRRGIGLDGPELEPDEGPEEPGEKFRRLAGEGGDPALPRPRLYPAAPAMPSPDVVYGALPPPGCDPSGLGEALPAQSRPSPFRPAAPKAGPPEKPLQWPAEPLLHCNSRTPTGELPLPPRRPPSGGRSLGEEGPPTRGASPPTPPVSIKSERLSPAPGGPGDFPKTFPYPLLLARSLAEPLRPGPALRRLPLADGWPR

SEQ ID NO: 13030 - protein, 1610 aa, Homo sapiens
MAGLRRPQPGCYCRTAAAVNLLLGVFQVLLPCCRPGGAQGQAIEPLPNVVELWQAEEGELLLPTQGDSEEGLEEPSQEQSFSDKLFSGKGLHFQPSVLDFGIQFLGHPVAKILHAYNPSRDSEVVVNSVFAAAGHFHVPPVPCRVIPAMGKTSFRIIFLPTEEGSIESSLFINTSSYGVLSYHVSGIGTRRISTEGSAKQLPNAYFLLPKVQSIQLSQMQAETTNTSLLQVQLECSLHNKVCQQLKGCYLESDDVLRLQMSIMVTMENFSKEFEENTQHLLDHLSIVYVATDESETSDDSAVNMYILHSGNSLIWIQDIRHFSQRDALSLQFEPVLLPTSTTNFTKIASFTCKAATSCDSGIIEDVKKTTHTPTLKACLFSSVAQGYFRMDSSATQFHIETHENTSGLWSIWYRNHFDRSVVLNDVFLSKETKHMLKILNFTGPLFLPPGCWNIFSLKLAVKDIAINLFTNVFLTTNIGAIFAIPLQIYSAPTKEGSLGFEVIAHCGMHYFMGKSKAGNPNWNGSLSLDQSTWNVDSELANKLYERWKKYKNGDVCKRNVLGTTRFAHLKKSKESESFVFFLPRLIAEPGLMLNFSATALRSRMIKYFVVQNPSSWPVSLQLLPLSLYPKPEALVHLLHRWFGTDMQMINFTTGEFQLTEACPYLGTHSEESRFGILHLHLQPLEMKRVGVVFTPADYGKVTSLILIRNNLTVIDMIGVEGFGARELLKVGGRLPGAGGSLRFKVPESTLMDCRRQLKDSKQILSITKNFKVENIGPLPITVSSLKINGYNCQGYGFEVLDCHQFSLDPNTSRDISIVFTPDFTSSWVIRDLSLVTAADLEFRFTLNVTLPHHLLPLCADVVPGPSWEESFWRLTVFFVSLSLLGVILIAFQQAQYILMEFMKTRQRQNASSSSQQNNGPMDVISPHSYKSNCKNFLDTYGPSDKGRGKNCLPVNTPQSRIQNAAKRSPATYGHSQKKHKCSVYYSKHKTSTAAASSTSTTTEEKQTSPLGSSLPAAKEDICTDAMRENWISLRYASGINVNLQKNLTLPKNLLNKEENTLKNTIVFSNPSSECSMKEGIQTCMFPKETDIKTSENTAEFKERELCPLKTSKKLPENHLPRNSPQYHQPDLPEISRKNNGNNQQVPVKNEVDHCENLKKVDTKPSSEKKIHKTSREDMFSEKQDIPFVEQEDPYRKKKLQEKREGNLQNLNWSKSRTCRKNKKRGVAPVSRPPEQSDLKLVCSDFERSELSSDINVRSWCIQESTREVCKADAEIASSLPAAQREAEGYYQKPEKKCVDKFCSDSSSDCGSSSGSVRASRGSWGSWSSTSSSDGDKKPMVDAQHFLPAGDSVSQNDFPSEAPISLNLSHNICNPMTVNSLPQYAEPSCPSLPAGPTGVEEDKGLYSPGDLWPTPPVCVTSSLNCTLENGVPCVIQESAPVHNSFIDWSATCEGQFSSAYCPLELNDYNAFPEENMNYANGFPCPADVQTDFIDHNSQSTWNTPPNMPAAWGHASFISSPPYLTSTRSLSPMSGLFGSIWAPQSDVYENCCPINPTTEHSTHMENQAVVCKEYYPGFNPFRAYMNLDIWTTTANRNANFPLSRDSSYCGNV

SEQ ID NO: 13031 - protein, 1816 aa, Homo sapiens
MLSVVHFLRSFFKTPEPGAHLPGEGEIEDNQLPTSPAEQVEQGWNQQTDRDDSETLSQQSESGSDTKTDPFESASDTESLSGYLPRGVFHPLRGTPVDIEAPWEYPDVSATGPPQEQHLTSVPGLHAKEELDLSPSLEDDSCKNGWRAFATVAGEQEAGHLWDCATSLERESLLAGVPRHTGCCLQRATDSSGPEPVQGVAVQDLRGLSSVSLQKSRSESYLGIPVVWPFLLWCCELGRSWPHIHNRARALVLPSRGPLDNTAPLGTRTKKESTLGPAGDTELLWSQPHSDVPCQPPLRTSCLLRTNRHHSAPETTGDKNRASPRLNCGHMRALVRAHSIAGFSPECPEDPVGQNVVKSGTHVKEGAKNERDPRIQNIPSPAPTQLSGPIPAFQSGAPHLQGPCKPGGFRLQRASQDTPSAGLLGENQLRQDSRSCLVASCLTSELVKLSAEEVPEPAECKSEQSPESRTQEPQGTQLAPRAADERETQKHLWGISVQAGNQTSNYTSKYVLSEESKSPTRAKFPRQPSSEGTQVWSGDLMGCLEVSDSSDAPETTQKSSAIDTSKAAEEAMVLDPNYREQALQGLSEFKAATVSHCGPGAEEGEQGPGGAGGRQLEPKAGGEASRGRGALIIVAVEQKGLQASRSNAGPVPETLPRDFPKERPESPLSTGETPCESPTRGKTPAGNECELPAAPIQGAGDGALQRVAQAAELGRVLVPQAASEETPSTEEPPGERLRGESRSSGSGERGPEEAPEGGAAAARGQRPRVPALEPPQPPRGLRKGAQEPGKRPTFSKVTSFRKGRPLATESPGGVPAPTTEGRRWGSSGPEGLPRENPPAAAGRDAPPLHHGDASAWPEFVPQAAGDRTAGPAGAGHTGTSGDLGSRGPSSESCNAKRLKTTEKKLRARLALAHKTFSNFIESIVLEKENTHERSPSSPKGEKEKSRLRQGSWRAFLKSKDAGSPKKPTLVSLPLGPEVLSPAETDSHCEERAEDKEGYVFSDHWAPPLASTPLSSSLVSPEHRRKSEPTIKCTATQEGGRYLPSGIFPEKSWLASPGSPRAQQAGIAHTLPSSSACCLAYENPGTPCRPTSPKPLSPRPSAQRMGLHYPGRGSAISMVSLGSYSYVDSSSGDPERPKIPKGQTSFLLSLQTLNQDEQKEESREGGQGPRGLGTVPWLRDLPGSENHMPWEEPAGEKPSCSHSQKAFHMEPAQKPCFTTDMVTWALLCISAETVRGEAPSQPRGIPHRSPVSVDDLWLEKTQRKKLQKQAHVERRLHIGAVHKDGVKCWRKTIITSPESLNLPRRSHPLSQSAPTGLNHMGWPEHTPGTAMPDGALDTAVCADEVGSEEDLYDDLHSSSHHYSHPGGGGEQLAINELISDGSVVCAEALWDHVTMDDQELGFKAGDVIEVMDATNREWWWGRVADGEGWFPASFVRLRVNQDEPADDDAPLAGNSGAEDGGAEAQSSKDQMRTNVINEILSTERDYIKHLRDICEQADFQIYSEYCNNHPNACVELSRLTKLSKYVYFFEACRLLQKMIDISLDGFLLTPVQKICKYPLQLAELLKYTHPQHRDFKDVEAALHAMKNVAQLINERKRRLENIDKIAQWQSSIEDWEGEDLLVRSSELIYSGELTRVTQPQAKSQQRMFFLFDHQLIYCKKDLLRRDVLYYKGRLDMDGLEVVDLEDGKDRDLHVSIKNAFRLHRGATGDSHLLCTRKPEQKQRWLKAFAREREQVQLDQETGFSITELQRKQAMLNASKQQVTGKPKAVGRPCYLTRQKHPALPSNRPQQQVLVLAEPRRKPSTFWHSISRLAPFRK

SEQ ID NO: 13032 - protein, 235 aa, Homo sapiens
MSRYGRYGGETKVYVGNLGTGAGKGELERAFSYYGPLRTVWIARNPPGFAFVEFEDPRDAEDAVRGLDGKVICGSRVRVELSTGMPRRSRFDRPPARRPFDPNDRCYECGEKGHYAYDCHRYSRRRRSRSRSRSHSRSRGRRYSRSRSRSRGRRSRSASPRRSRSISLRRSRSASLRRSRSGSIKGSRSPSRSRSRSRSISRPRSSRSKSRSPSPKRSRSPSGSPRRSASPERMD

SEQ ID NO: 13033 - protein, 266 aa, Homo sapiens
MARASSGNGSEEAWGALRAPQQQLCPGVNNQPYLCESGHCCGETGCCTYYYELWWFWLLWTVLILFSCCCAFRHRRAKLRLQQQQRQREINLLAYHGACHGAGPFPTGSLLDLRFLSTFKPPAYEDVVHRPGTPPPPYTVAPGRPLTASSEQTCCSSSSSCPAHFEGTNVEGVSSHQSAPPHQEGEPGAGVTPASTPPSCRYRRLTGDSGIELCPCPASGEGEPVKEVRVSATLPDLEDYSPCALPPESVPQIFPMGLSSSEGDIP

SEQ ID NO: 13034 - protein, 516 aa, Homo sapiens
MAAAGHFAGAIFQGREVVTHKTFHRYTVRAKRGTAQGLRDARGGPSHSAGANLRRYNEATLYKDVRDLLAGPSWAKALEEAGTILLRAPRSGRSLFFGGKGAPLQRGDPRLWDIPLATRRPTFQELQRVLHKLTTLHVYEEDPREAVRLHSPQTHWKTVREERKKPTEEEIRKICRDEKEALGQNEESPKQGSGSEGEDGFQVELELVELTVGTLDLCESEVLPKRRRRKRNKKEKSRDQEAGAHRTLLQQTQEEEPSTQSSQAVAAPLGPLLDEAKAPGQPELWNALLAACRAGDVGVLKLQLAPSPADPRVLSLLSAPLGSGGFTLLHAAAAAGRGSVVRLLLEAGADPTVQDSRARPPYTVAADKSTRNEFRRFMEKNPDAYDYNKAQVPGPLTPEMEARQATRKREQKAARRQREEQQQRQQEQEEREREEQRRFAALSDREKRALAAERRLAAQLGAPTSPIPDSAIVNTRRCWSCGASLQGLTPFHYLDFSFCSTRCLQDHRRQAGRPSS

SEQ ID NO: 13035 - protein, 215 aa, Homo sapiens
MTTLAGAVPRMMRPGPGQNYPRSGFPLEVSTPLGQGRVNQLGGVFINGRPLPNHIRHKIVEMAHHGIRPCVISRQLRVSHGCVSKILCRYQETGSIRPGAIGGSKPKQVTTPDVEKKIEEYKRENPGMFSWEIRDKLLKDAVCDRNTVPSVSSISRILRSKFGKGEEEEADLERKEAEESEKKAKHSIDGILSERGKRWRLGRRTCWVTWRASAS

SEQ ID NO: 13036 - protein, 904 aa, Homo sapiens
MLSSWQGGPRPRQLLLWLLILAAWETGSGQLHYSVPEEAKHGTFVGRIAQDLGLELAELVPRLFRVASKRHGDLLEVNLQNGILFVNSRIDREELCGRSAECSIHLEVIVDRPLQVFHVEVKVRDINDNPPIFPESKKRIIIAESRPPETRFPLDGASDADIGVNSALTYRLDPNDYFTLDAQNSLEQMSSLSLVLRKTLDREEIQEHSLLLTASDGGKPELTGTVQLLITILDVNDNAPEFYQSVYKVTVLENAFNGTLVIKLNATDPDDGTNGDIVYSFRRPVWPAVVYAFTINPNNGEIRTKGKLDFEEKKLYEISVEAVDKGNIPMAGHCTLLVEVLDVNDNAPEVTITSLSLPIREDTQPSAIIALISVSDRDSGSNGQVTCTLTPHVPFKLVSTYKNYYSLVLDSALDRESVSAYELVVTARDGGSPSLWATASVSVGVADVNDNAPAFAQPEYTVFVKENNPPGCHIFTVSAQDADAQENALVSYSLVERRVGERALSSYVSVHAESGKVYALQPLDHEELELLQFQVSARDSGVPPLGSNVTLQVFVLDENDNAPALLTPGAGSAGGTVSELMPRSVGAGHVVAKVRAVDADSGYNAWLSYELQLAAVGARIPFRVGLYTGEISTTRPLDEVDAPHHRLLVLVKDHGEPALTATATVLLSLVESGQAPQASSRASAGAVGPEAALVDVNVYLIIAICAVSSLLVLTLLLYTALRCSAPPTEGACAPGKPTLVCSSAAGSWSYSQQRRPRVCSGEGPHKTDLMAFSPSLPPCLGSAEGTGQREEDSECLKEPRQPNPDWRYSASLRAGMHSSVHLEEAGILRAGPGGPDQQWPTVSSATPEPEAGEVSPPVGAGVNSNSWTFKYGPGNPKQSGPEPKKQTQVSFLLRRKGEASQPRQ

SEQ ID NO: 13037 - protein, 511 aa, Homo sapiens
MKNYEQALQDASAACQNEPLLIKGHQVKAQALSGLGRSKEVLKEFLYCLALNPECNSVKKEAQKVMCEVLFSATANVHENLTSSIQSRLKAQGHSHMNAQALLEEGDAGSSENSSEKSDMLGNTNSSVLYFILGLHFEEDKKALESILPTAPSAGLKRQFPDDVEDAPDLNAPGKIPKKDLSLQRSPNSETEESQGLSLDVTDFECALCMRLLFEPVTTPCGHTFCLKCLERCLDHAPHCPLCKDKLSELLASRNFNITVLAEELIFRYLPDELSDRKRIYDEEMSELSNLTRDVPIFVCAMAFPTVPCPLHVFEPRYRLMIRRCMETGTKRFGMCLSAEHAGLSEYGCMLEIKDVRTFPDGSSVVDAIGISRFRVLSHRHRDGYNTADIEYLEDEKVEGPEYEELAALHDSVHQQSVSWFASLQDRMKEQILSHFGVMPDREPEPQSNPSGPAWSWWILAVLPLERKAQLAILGMTSLKERLLAIRRILVIITRKMNSRQELANARERNN

SEQ ID NO: 13038 - protein, 168 aa, Homo sapiens
MWQPATERLQVTYLGKVSTTGMQFLSGCTEKPVIELWKKHTLAREDVFPANALLEIRPFQVWLHHLDHKGEATVHMDTFQVARIAYCTADHNVSPNIFAWVYREINDDLSYQMDCHAVECESKLEAKKLAHAMMEAFRKTFHSMKSDGRIHSNSSSEEVSQELESDDG

SEQ ID NO: 13039 - protein, 681 aa, Homo sapiens
MGIELLCLFFLFLGRNDHVQGGCALGGAETCEDCLLIGPQCAWCAQENFTHPSGVGERCDTPANLLAKGCQLNFIENPVSQVEILKNKPLSVGRQKNSSDIVQIAPQSLILKLRPGGAQTLQVHVRQTEDYPVDLYYLMDLSASMDDDLNTIKELGSRLSKEMSKLTSNFRLGFGSFVEKPVSPFVKTTPEEIANPCSSIPYFCLPTFGFKHILPLTNDAERFNEIVKNQKISANIDTPEGGFDAIMQAAVCKEKIGWRNDSLHLLVFVSDADSHFGMDSKLAGIVIPNDGLCHLDSKNEYSMSTVLEYPTIGQLIDKLVQNNVLLIFAVTQEQVHLYENYAKLIPGATVGLLQKDSGNILQLIISAYEELRSEVELEVLGDTEGLNLSFTAICNNGTLFQHQKKCSHMKVGDTASFSVTVNIPHCERRSRHIIIKPVGLGDALELLVSPECNCDCQKEVEVNSSKCHHGNGSFQCGVCACHPGHMGPRCECGEDMLSTDSCKEAPDHPSCSGRGDCYCGQCICHLSPYGNIYGPYCQCDNFSCVRHKGLLCGDFSKDGSVSCSLQGENECLITFLITTDNEGKTIIHSINEKDCPKPPNIPMIMLGVSLAILLIGVVLLCIWKLLVSFHDRKEVAKFEAERSKAKWQTGTNPLYRGSTSTFKNVTYKHREKQKVDLSTDC

SEQ ID NO: 13040 - protein, 1251 aa, Homo sapiens
MDSFDLALLQEWDLESLWGEDILNQRNDSLVVEFQSSASRCRSVYEPDRNALRRKERERRNQETQQDDGTFNSSYSLFSEPYKTNKGDELSNRIQNTLGNYDEMKDFLTDRSNQSHLVGVPKPGVPQTPVNKIDEHFVADSRAQNQPSSICSTTTSTPAAVPVQQSKRGTMGWQKAGHPPSDGQQRATQQGSLRTLLGDGVGRQQPRAKQVCNVEVGLQTQERPPAMAAKHSSSGHCVQNFPPSLASKPSLVQQKPTAYVRPMDGQDQAPDESPKLKSSSETSVHCTSYRGVPASKPEPARAKAKLSKFSIPKQGEESRSGETNSCVEEIIREMTWLPPLSAIQAPGKVEPTKFPFPNKDSQLVSSGHNNPKKGDAEPESPDNGTSNTSMLEDDLKLSSDEEENEQQAAQRTALRALSDSAVVQQPNCRTSVPSSKGSSSSSSSGSSSSSSDSESSSGSDSETESSSSESEGSKPPHFSSPEAEPASSNKWQLDKWLNKVNPHKPPILIQNESHGSESNQYYNPVKEDVQDCGKVPDVCQPSLREKEIKSTCKEEQRPRTANKAPGSKGVKQKSPPAAVAVAVSAAAPPPAVPCAPAENAPAPARRSAGKKPTRRTERTSAGDGANCHRPEEPAAADALGTSVVVPPEPTKTRPCGNNRASHRKELRSSVTCEKRRTRGLSRIVPKSKEFIETESSSSSSSSDSDLESEQEEYPLSKAQTVAASASSGNDQRLKEAAANGGSGPRAPVGSINARTTSDIAKELEEQFYTLVPFGRNELLSPLKDSDEIRSLWVKIDLTLLSRIPEHLPQEPGVLSAPATKDSESAPPSHTSDTPAEKALPKSKRKRKCDNEDDYREIKKSQGEKDSSSRLATSTSNTLSANHCNMNINSVAIPINKNEKMLRSPISPLSDASKHKYTSEDLTSSSRPNGNSLFTSASSSKKPKADSQLQPHGGDLTKAAHNNSENIPLHKSRPQTKPWSPGSNGHRDCKRQKLVFDDMPRSADYFMQEAKRMKHKADAMVEKFGKALNYAEAALSFIECGNAMEQGPMESKSPYTMYSETVELIRYAMRLKTHSGPNATPEDKQLAALCYRCLALLYWRMFRLKRDHAVKYSKALIDYFKNSSKAAQAPSPWGASGKSTGTPSPMSPNPSPASSVGSQGSLSNASALSPSTIVSIPQRIHQMAANHVSITNSILHSYDYWEMADNLAKENREFFNDLDLLMGPVTLHSSMEHLVQYSQQGLHWLRNSAHLS

SEQ ID NO: 13041 - protein, 140 aa, Homo sapiens
MKGSKSFVLQKMFSCSKNPERAALYFVSGVCIGLVLTLAALVIRISCHTDCRRRPGKKFLQDRESSSDSSDSEDGSEDTVSDLSVRRHRRFERTLNKNVFTSAEELERAQRLEERERIIREIWMNGQPEVPGTRSLNRYY

SEQ ID NO: 13042 - protein, 1401 aa, Homo sapiens
MADTDLFMECEEEELEPWQKISDVIEDSVVEDYNSVDKTTTVSVSQQPVSAPVPIAAHASVAGHLSTSTTVSSSGAQNSDSTKKTLVTLIANNNAGNPLVQQGGQPLILTQNPAPGLGTMVTQPVLRPVQVMQNANHVTSSPVASQPIFITTQGFPVRNVRPVQNAMNQVGIVLNVQQGQTVRPITLVPAPGTQFVKPTVGVPQVFSQMTPVRPGSTMPVRPTTNTFTTVIPATLTIRSTVPQSQSQQTKSTPSTSTTPTATQPTSLGQLAVQSPGQSNQTTNPKLVSIASFVTVKRPGVTGENSNEVAKLVNTLNTIPSLGQSPGPVVVSNNSSAHGSQRTSGPESSMKVTSSIPVFDLQDGGRKICPRCNAQFRVTEALRGHMCYCCPEMVEYQKKGKSLDSEPSVPSAAKPPSPEKTAPVASTPSSTPIPALSPPTKVPEPNENVGDAVQTKLIMLVDDFYYGRDGGKVAQLTNFPKVATSFRCPHCTKRLKNNIRFMNHMKHHVELDQQNGEVDGHTICQHCYRQFSTPFQLQCHLENVHSPYESTTKCKICEWAFESEPLFLQHMKDTHKPGEMPYVCQVCQYRSSLYSEVDVHFRMIHEDTRHLLCPYCLKVFKNGNAFQQHYMRHQKRNVYHCNKCRLQFLFAKDKIEHKLQHHKTFRKPKQLEGLKPGTKVTIRASRGQPRTVPVSSNDTPPSALQEAAPLTSSMDPLPVFLYPPVQRSIQKRAVRKMSVMGRQTCLECSFEIPDFPNHFPTYVHCSLCRYSTCCSRAYANHMINNHVPRKSPKYLALFKNSVSGIKLACTSCTFVTSVGDAMAKHLVFNPSHRSSSILPRGLTWIAHSRHGQTRDRVHDRNVKNMYPPPSFPTNKAATVKSAGATPAEPEELLTPLAPALPSPASTATPPPTPTHPQALALPPLATEGAECLNVDDQDEGSPVTQEPELASGGGGSGGVGKKEQLSVKKLRVVLFALCCNTEQAAEHFRNPQRRIRRWLRRFQASQGENLEGKYLSFEAEEKLAEWVLTQREQQLPVNEETLFQKATKIGRSLEGGFKISYEWAVRFMLRHHLTPHARRAVAHTLPKDVAENAGLFIDFVQRQIHNQDLPLSMIVAIDEISLFLDTEVLSSDDRKENALQTVGTGEPWCDVVLAILADGTVLPTLVFYRGQMDQPANMPDSILLEAKESGYSDDEIMELWSTRVWQKHTACQRSKGMLVMDCHRTHLSEEVLAMLSASSTLPAVVPAGCSSKIQPLDVCIKRTVKNFLHKKWKEQAREMADTACDSDVLLQLVLVWLGEVLGVIGDCPELVQRSFLVASVLPGPDGNINSPTRNADMQEELIASLEEQLKLSGEHSESSTPRPRSSPEETIEPESLHQLFEGESETESFYGFEEADLDLMEI

SEQ ID NO: 13043 - protein, 3549 aa, Homo sapiens
MFPMQKGSLNLLRQKWESCDYQRSECHPRDSHCTIFQPQESKLLAPEGEVVSAPQSLDPTSLPYSTGEEMWSSKPEEKDSVDKSNNTREYGRPEVLKEDSLSSRRRIERFSIALDELRSVFEAPKSGNKPAEYGGKEVEIERSLCSPAFKSHPGSQLEDSVKDSDKKGKETSFDKMSPESGHSRIFEATAGPNKPESGFAEDSAARGEGVSDLHEVVSLKERMARYQAAVSRGDCRSFSANMMEESEMCAVPGGLAKVKKQFEDEITSSRNTFAQYQYQHQNRSEQEAIHSSQVGTSRSSQEMARNEQEGSKVQKIDVHGTEMVSHLEKHTEEVNQASQFHQYVQETVIDTPEDEEIPKVSTKLLKEQFEKSAQEKILYSDKEMTTPAKQIKTESEYEETFKPSSVVSTSSTSCVSTSQRKETSTTRYSDHSVTSSTLAQINATSSGMTEEFPPPPPDVLQTSVDVTAFSQSPELPSPPRRLPVPKDVYSKQRNLYELNRLYKHIHPELRKNLEKDYISEVSEIVSSQMNSGSSVSADVQQARYVFENTNDSSQKDLNSEREYLEWDEILKGEVQSIRWIFENQPLDSINNGSPDEGDISRGIADQEIIAGGDVKYTTWMFETQPIDTLGAYSSDTVENAEKIPELARGDVCTARWMFETRPLDSMNKMHQSQEESAVTISKDITGGDVKTVRYMFETQHLDQLGQLHSVDEVHLLQLRSELKEIKGNVKRSIKCFETQPLYVIRDGSGQMLEIKTVHREDVEKGDVRTARWMFETQPLDTINKDITEIKVVRGISMEENVKGGVSKAKWLFETQPLEKIKESEEVIIEKEKIIGTDVSRKCWMFETQPLDILKEVPDADSLQREEIIGGDVQTTKHLFETLPIEALKDSPDIGKLQKITASEEEKGDVRHQKWIFETQPLEDIRKDKKEYTRTVKLEEVDRGDVKNYTHIFESNNLIKFDASHKIEVEGVTRGAVELNKSLFETTPLYAIQDPLGKYHQVKTVQQEEIVRGDVRSCRWLFETRPIDQFDESIHKFQIIRGISAQEIQTGNVKSAKWLFETQPLDSIKYFSDVEETESKTEQTRDIVKGDVKTCKWLFETQPMESLYEKVSLMTSSEEIHKGDVKTCTWLFETQPLDTIKDDSETAVKLQTVKQEEIQGGDVRTACFLFETENLDSIQGEEVKEIKPVEMDIQAGDVSSMRYKFENQSLDSISSSSEEVLKKIKTLKTEDIQKGNVLNCRWLFENQPIDKIKESQEGDECVKTVTDIQGGDVRKGCFIFETFSLDEIKEESDYISTKKTITEEVIQGDVKSYRMLFETQPLYAIQDREGSYHEVTTVKKEEVIHGDVRGTRWLFETKPLDSINKSETVYVIKSVTQEDIQKGDVSSVRYRFETQPLDQISEESHNIMPSIDHIQGGNVKTSRQFFESENFDKNNYIRTVSVNEIQKGNVKTSTWLFETHTMDELRGEGLEYENIKTVTQEDVQKGDVKQAVWLFENRTFDSIMEAHKGITKMTKEEIPPSDVKTTTWLFETTPLHEFNETRVEKIEIIGKSIKETLEDLYSQKVIQAPGIIIEADEIGDVRMAKYKLMNQASPEIQKEEIIRADLRNIMVNLLSKRDCTEREILISEEEKGNVNLTKTQLLNRSTEFHAEKEEIVKGDVQQAIKNLFSEERSVKKGILIQEDEKGDINMTIYCLLHENDGDTIEREEVIGGDVKRTIHNLLSSTSNNKISERAKIDASERGNVQFFTTCIEAGALDYLKQLHTESNETLTAKKQEGEKEIIGGDVEGTKLLLKKRQSLVERTVSETDIIPGDVHNTVKVFMTEPQSTFGKIPKEEIIKGDLTSTLNSLSQAVNQKTVTKTEEIIKGNMLATLKSLKESSHRWKESKQPDAIPGDIEKAIECLEKATNTKTEILKKELLKDDLETSLRSLKEAQRSFKEVHKEGVIKKDAKAVMAGSSGEQKTDIHQVAVQRNKNSLLQPKPGPFEPAAKWQGGADTLSQTMGKSCHGNLVEERTEVNLPKAPKGTVKIVIDREQNNDALEKSLRRLSNSHHKSNVLESGDKTGVWTDTTGEQHLRDEYMSRQLTSTVSVKNNLTTKESDRAVRELKKDDVFNSIQSAGKTVGKQQTYELRNDHQKMEGFHIKSPKKTKNIKILTDTQSSKPSPTQHPVSMPVGGTYDLSGDFQKQTLLKQETKYSNKDIKKKNINLQPMWQLLPVEQDTSNVTEMKVSEKSHNTFKATNKKRETDVHLKSQDFLMKTNTSTGLKMAMERSLNPINFNPENNVKESECPLPPPSPPPPPPSNASSEIEFPLPPPPPLMMFPEKNGFLPSLSTEKIKAEFESFPGLPLPPPPVDEKSERESSSMFLPPPPPPTPSQKPAHLLSSSAPEKHSGDFMQQYSQKEASNSQNSQAKIITGKTGVLPPPTLPKPKLPKHIKDNKNDFSPKVELATSLSDMECKITTSKDQKKVMVMTSSEHTETKQNVISKSLDERKQLSIDSANCLSHTVPGTSAPRKKQIAPLIKSHSFPESSGQQNPKPYMRKFKTPLMIAEEKYRQQKEEIEKQKQESSYYNIVKTQSQNQHITEVEKEMPLQKTNEEVSLSGIDSECTVVQPSPGSQSNARILGVCSDNQLSTTSPETVAAKRLHHVLAASEDKDKMKKEVLQSSRDIMQSKSACEIKQSHQECSTQQTQQKKYLEQLHLPQSKPISPNFKVKTIKLPTLDHTLNETDHSYESHKQQSEIDVQTFTKKQYLKTKKTEASTECSHKQSLAERHYQLPKKEKRVTVQLPTESIQKNQEDKLKMVPRKQREFSGSDRGKLPGSEEKNQGPSMIGRKEERLITERKHEHLKNKSAPKVVKQKVIDAHLDSQTQNFQQTQIQTAESKAEHKKLPQPYNSLQEEKCLEVKGIQEKQVFSNTKDSKQEITQNKSFFSSVKESQRDDGKGALNIVEFLRKREELQQILSRVKQFEAEPNKSGLKTFQTLLNTIPGWLISEDKREYAVHIAMENNLEKVKEEITHIKTQAEDMLVSYENIIQTAMMSSKTGKPGNKPTSLDETSSKVSNVHVSNNKNSEQKENKIAKEKTVQHQVAAHHEATVRSHVKTHQEIKLDDSNIPPPSLKTRPPSPTFITIESTARRTENPTKNELSQSPKKDSYVEPPPRRPMSQKSEIHRANTSPSPPRSRSEQLVRLKDTTAKLSKGAIPCPAATPVPIVEKRSEIIMSPATLRRQIKIETRGRDSPPTITIPVNINHAASGSFRESVDAQEEIRKVEKRATYVHKDGLNSTDHMVPDTESYDAVEIIRKVAVPPRLSEHTQRYEAANRTVQMAENFVNDPENEINRWFREFEHGPVSEAKSNRRVYAKGETNHNIQQESRTFCKEEFGLTSLGNTSFTDFSCKHPRELREKIPVKQPRICSETRSLSEHFSGMDAFESQIVESKMKTSSSHSSEAGKSGCDFKHAPPTYEDVIAGHILDISDSPKEVRKNFQKTWQESGRVFKGLGYATADASATEMRTTFQEESAFISEAAAPRQGNMYTLSKDSLSNGVPSGRQAEFS

SEQ ID NO: 13044 - protein, 1253 aa, Homo sapiens
MAQSKRHVYSRTPSGSRMSAEASARPLRVGSRVEVIGKGHRGTVAYVGATLFATGKWVGVILDEAKGKNDGTVQGRKYFTCDEGHGIFVRQSQIQVFEDGADTTSPETPDSSASKVLKREGTDTTAKTSKLPTRPASTGVAGASSSLGPSGSASAGELSSSEPSTPAQTPLAAPIIPTPVLTSPGAVPPLPSPSKEEEGLRAQVRDLEEKLETLRLKRAEDKAKLKELEKHKIQLEQVQEWKSKMQEQQADLQRRLKEARKEAKEALEAKERYMEEMADTADAIEMATLDKEMAEERAESLQQEVEALKERVDELTTDLEILKAEIEEKGSDGAASSYQLKQLEEQNARLKDALVRMRDLSSSEKQEHVKLQKLMEKKNQELEVVRQQRERLQEELSQAESTIDELKEQVDAALGAEEMVEMLTDRNLNLEEKVRELRETVGDLEAMNEMNDELQENARETELELREQLDMAGARVREAQKRVEAAQETVADYQQTIKKYRQLTAHLQDVNRELTNQQEASVERQQQPPPETFDFKIKFAETKAHAKAIEMELRQMEVAQANRHMSLLTAFMPDSFLRPGGDHDCVLVLLLMPRLICKAELIRKQAQEKFELSENCSERPGLRGAAGEQLSFAAGLVYSLSLLQATLHRYEHALSQCSVDVYKKVGSLYPEMSAHERSLDFLIELLHKDQLDETVNVEPLTKAIKYYQHLYSIHLAEQPEDCTMQLADHIKFTQSALDCMSVEVGRLRAFLQGGQEATDIALLLRDLETSCSDIRQFCKKIRRRMPGTDAPGIPAALAFGPQVSDTLLDCRKHLTWVVAVLQEVAAAAAQLIAPLAENEGLLVAALEELAFKASEQIYGTPSSSPYECLRQSCNILISTMNKLATAMQEGEYDAERPPSKPPPVELRAAALRAEITDAEGLGLKLEDRETVIKELKKSLKIKGEELSEANVRLSLLEKKLDSAAKDADERIEKVQTRLEETQALLRKKEKEFEETMDALQADIDQLEAEKAELKQRLNSQSKRTIEGLRGPPPSGIATLVSGIAGGAIPGQAPGSVPGPGLVKDSPLLLQQISAMRLHISQLQHENSILKGAQMKASLASLPPLHVAKLSHEGPGSELPAGALYRKTSQLLETLNQLSTHTHVVDITRTSPAAKSPSAQLMEQVAQLKSLSDTVEKLKDEVLKETVSQRPGATVPTDFATFPSSAFLRAKEEQQDDTVYMGKVTFSCAAGFGQRHRLVLTQEQLHQLHSRLIS

SEQ ID NO: 13045 - protein, 486 aa, Homo sapiens
MRYSLSPDNHLEDGIMNMANFLRGFEEKGIKNDRPEDQLSKEKKKILFSFCEVCNIQLNSAAQAQVHSNGKSHRKRVKQLSDGQPPPPAQASPSSNSSTGSTCHTTTLPALVRTPTLMMQPSLDIKPFMSFPVDSSSAVGLFPNFNTMDPVQKAVINHTFGVSIPPKKKQVISCNVCQLRFNSDSQAEAHYKGSKHAKKVKALDATKNKPKMVPSKDSAKANPSCSITPITGNNSDKSEDKGKLKASSSSQPSSSESGSFLLKSGTTPLPPGAATSPSKSTNGAPGTVVESEEEKAKKLLYCSLCKVAVNSLSQLEAHNTGSKHKTMVEARNGAGPIKSYPRPGSRLKMQNGSKGSGLQNKTFHCEICDVHVNSEIQLKQHISSRRHKDRVAGKPLKPKYSPYNKLQRSPSILAAKLAFQKDMMKPLAPAFLSSPLAAAAAVSSALSLPPRPSASLFQAPAIPPALLRPGHGPIRATPASILFAPY

SEQ ID NO: 13046 - protein, 969 aa, Homo sapiens
MKYLLNFIGQGPATYGPFCAERLRRTYANGVRAEPPTWLELQAVKSKKHIPIQVILATGESLTVPVDSASTSREMCMHIAHKQGLSDHLGFSLQVAVYDKFWSLGSGRDHMMDAIARCEQMAQERGESQRQSPWRIYFRKEFFTPWHDSREDPVSTELIYRQVLRGVWSGEYSFEKEEELVELLARHCYVQLGASAESKAVQELLPSCIPHKLYRTKPPDRWASLVTAACAKAPYTQKQVTPLAVREQVVDAARLQWPLLFSRLFEVITLSGPRLPKTQLILAVNWKGLCFLDQQEKMLLELSFPEVMGLATNREAQGGQRLLLSTMHEEYEFVSPSSVAIAELVALFLEGLKERSIFAMALQDRKATDDTTLLAFKKGDLLVLTKKQGLLASENWTLGQNDRTGKTGLVPMACLYTIPTVTKPSAQLLSLLAMSPEKRKLAAQEGQFTEPRPEEPPKEKLHTLEEFSYEFFRAPEKDMVSMAVLPLARARGHLWAYSCEPLRQPLLKRVHANVDLWDIACQIFVAILRYMGDYPSRQAWPTLELTDQIFTLALQHPALQDEVYCQILKQLTHNSNRHSEERGWQLLWLCTGLFPPSKGLLPHAQKFIDTRRGKLLAPDCSRRIQKVLRTGPRKQPPHQVEVEAAEQNVSRICHKIYFPNDTSEMLEVVANTRVRDVCDSIATRLQLASWEGCSLFIKISDKVISQKEGDFFFDSLREVSDWVKKNKPQKEGAPVTLPYQVYFMRKLWLNISPGKDVNADTILHYHQELPKYLRGFHKCSREDAIHLAGLIYKAQFNNDRSQLASVPKILRELVPENLTRLMSSEEWKKSILLAYDKHKDKTVEEAKVAFLKWICRWPTFGSAFFEVKQTSEPSYPDVILIAINRHGVLLIHPKTKDLLTTYPFTKISSWSSGSTYFHMALGSLGRGSRLLCETSLGYKMDDLLTSYVQQLLSAMNKQRGSKAPALAST

SEQ ID NO: 13047 - protein, 1214 aa, Homo sapiens
MKQPIMADGPRCKRRKQANPRRKNVVNYDNVVDTGSETDEEDKLHIAEDDGIANPLDQETSPASVPNHESSPHVSQALLPREEEEDEIREGGVEHPWHNNEILQASVDGPEEMKEDYDTMGPEATIQTAINNGTVKNANCTSDFEEYFAKRKLEERDGHAVSIEEYLQRSDTAIIYPEAPEELSRLGTPEANGQEENDLPPGTPDAFAQLLTCPYCDRGYKRLTSLKEHIKYRHEKNEENFSCPLCSYTFAYRTQLERHMVTHKPGTDQHQMLTQGAGNRKFKCTECGKAFKYKHHLKEHLRIHSGEKPYECPNCKKRFSHSGSYSSHISSKKCIGLISVNGRMRNNIKTGSSPNSVSSSPTNSAITQLRNKLENGKPLSMSEQTGLLKIKTEPLDFNDYKVLMATHGFSGTSPFMNGGLGATSPLGVHPSAQSPMQHLGVGMEAPLLGFPTMNSNLSEVQKVLQIVDNTVSRQKMDCKAEEISKLKGYHMKDPCSQPEEQGVTSPNIPPVGLPVVSHNGATKSIIDYTLEKVNEAKACLQSLTTDSRRQISNIKKEKLRTLIDLVTDDKMIENHNISTPFSCQFCKESFPGPIPLHQHERYLCKMNEEIKAVLQPHENIVPNKAGVFVDNKALLLSSVLSEKGMTSPINPYKDHMSVLKAYYAMNMEPNSDELLKISIAVGLPQEFVKEWFEQRKVYQYSNSRSPSLERSSKPLAPNSNPPTKDSLLPRSPVKPMDSITSPSIAELHNSVTNCDPPLRLTKPSHFTNIKPVEKLDHSRSNTPSPLNLSSTSSKNSHSSSYTPNSFSSEELQAEPLDLSLPKQMKEPKSIIATKNKTKASSISLDHNSVSSSSENSDEPLNLTFIKKEFSNSNNLDNKSTNPVFSMNPFSAKPLYTALPPQSAFPPATFMPPVQTSIPGLRPYPGLDQMSFLPHMAYTYPTGAATFADMQQRRKYQRKQGFQGELLDGAQDYMSGLDDMTDSDSCLSRKKIKKTESGMYACDLCDKTFQKSSSLLRHKYEHTGKRPHQCQICKKAFKHKHHLIEHSRLHSGEKPYQCDKCGKRFSHSGSYSQHMNHRYSYCKREAEEREAAEREAREKGHLEPTELLMNRAYLQSITPQGYSDSEERESMPRDGESEKEHEKEGEDGYGKLGRQDGDEEFEEEEEESENKSMDTDPETIRDEEETGDHSMDDSSEDGKMETKSDHEEDNMEDGM

SEQ ID NO: 13048 - protein, 1155 aa, Homo sapiens
MWLKPEEVLLKNALKLWVTQKSSCYFILQRRRGHGEGGGRLTGRLVGALDAVLDSNARVAPFRILLQVPGSQVYSPIACGELLNGSDVYWAIATGATLEEINQHWDWLEQNLLHTLSVFDNKDDIASFVKGKVKALIAEETSSRLAEQEEEPEKFREALVKFEARFNFPEAEKLVTYYSCCCWKGRVPRQGWLYLSINHLCFYSFFLGKELKLVVPWVDIQKLERTSNVFLTDTIRITTQNKERDFSMFLNLDEVFKVMEQLADVTLRRLLDNEVFDLDPDLQEPSQITKRDLEARAQNEFFRAFFRLPRKEKLHAVVDCSLWTPFSRCHTTGRMFASDSYICFASREDGCCKIILPLREVVSIEKMEDTSLLPHPIIVSIRSKVAFQFIELRDRDSLVEALLARLKQVHANHPVHYDTSADDDMASLVFHSTSMCSDHRFGDLEMMSSQNSEESEKEKSPLMHPDALVTAFQQSGSQSPDSRMSREQIKISLWNDHFVEYGRTVCMFRTEKIRKLVAMGIPESLRGRLWLLFSDAVTDLASHPGYYGNLVEESLGKCCLVTEEIERDLHRSLPEHPAFQNETGIAALRRVLTAYAHRNPKIGYCQSMNILTSVLLLYTKEEEAFWLLVAVCERMLPDYFNHRVIGAQVDQSVFEELIKGHLPELAEHMNDLSALASVSLSWFLTLFLSIMPLESAVNVVDCFFYDGIKAIFQLGLAVLEANAEDLCSSKDDGQALMILSRFLDHIKNEDSPGPPVGSHHAFFSDDQEPYPVTDISDLIRDSYEKFGDQSVEQIEHLRYKHRIRVLQGHEDTTKQNVLRVVIPEVSILPEDLEELYDLFKREHMMSCYWEQPRPMASRHDPSRPYAEQYRIDARQFAHLFQLVSPWTCGAHTEILAERTFRLLDDNMDQLIEFKAFVSCLDIMYNGEMNEKIKLLYRLHIPPALTENDRDSQSPLRNPLLSTSRPLVFGKPNGDAVDYQKQLKQMIKDLAKEKDKTEKELPKMSQREFIQFCKTLYSMFHEDPEENDLYQAIATVTTLLLQIGEVGQRGSSSGSCSQECGEELRASAPSPEDSVFADTGKTPQDSQAFPEAAERDWTVSLEHILASLLTEQSLVNFFEKPLDMKSKLENAKINQYNLKTFEMSHQSQSELKLSNL

SEQ ID NO: 13049 - protein, 193 aa, Homo sapiens
MEPPGDWGPPPWRSTPKTDVLRLVLYLTFLGAPCYAPALPSCKEDEYPVGSECCPKCSPGYRVKEACGELTGTVCEPCPPGTYIAHLNGLSKCLQCQMCDPAMGLRASRNCSRTENAVCGCSPGHFCIVQDGDHCAACRAYATSSPGQRVQKGGTESQDTLCQNCPPGTFSPNGTLEECQHQTNRAWKSQTDL

SEQ ID NO: 13050 - protein, 118 aa, Homo sapiens
MATEIGSPPRFFHMPRFQHQAPRQLFYKRPDFAQQQAMQQLTFDGKRMRKAVNRKTIDYNPSVIKYLENRIWQRDQRDMRAIQPDAGYYNDLVPPIGMLNNPMNAVTTKFVRTSTNKV

SEQ ID NO: 13051 - protein, 638 aa, Homo sapiens
MSLGQSACLFLSIARSRSVMTGEQMAAFHPSSTPNPLERPIKMGWLKKQRSIVKNWQQRYFVLRAQQLYYYKDEEDTKPQGCMYLPGCTIKEIATNPEEAGKFVFEIIPASWDQNRMGQDSYVLMASSQAEMEEWVKFLRRVAGTPCGVFGQRLDETVAYEQKFGPHLVPILVEKCAEFILEHGRNEEGIFRLPGQDNLVKQLRDAFDAGERPSFDRDTDVHTVASLLKLYLRDLPEPVVPWSQYEGFLLCGQLTNADEAKAQQELMKQLSILPRDNYSLLSYICRFLHEIQLNCAVNKMSVDNLATVIGVNLIRSKVEDPAVIMRGTPQIQRVMTMMIRDHEVLFPKSKDIPLSPPAQKNDPKKAPVARSSVGWDATEDLRISRTDSFSSMTSDSDTTSPTGQQPSDAFPEDSSKVPREKPGDWKMQSRKRTQTLPNRKCFLTSAFQGANSSKMEIFKNEFWSPSSEAKAGEGHRRTMSQDLRQLSDSQRTSTYDNVPSLPGSPGEEASALSSQACDSKGDTLASPNSETGPGKKNSGEEEIDSLQRMVQELRKEIETQKQMYEEQIKNLEKENYDVWAKVVRLNEELEKEKKKSAALEISLRNMERSREDVEKRNKALEEEVKEFVKSMKEPKTEA

SEQ ID NO: 13052 - protein, 905 aa, Homo sapiens
MVRSGARPGQVLSSGRHTGPAKLTNGKKATYLRKIPRFNADSGYSIHSDSESQAETVHGLDGCASLLRDILRNEDSGSETAYLENRSNSRPLESKRYGSKKKRHEKHTIPLVVQKETSSSDNKKQIPNEASARSERDTSDLEQNWSLQDHYRMYSPIIYQALCEHVQTQMSLMNDLTSKNIPNGIPAVPCHAPSHSESQATPHSSYGLCTSTPVWSLQRPPCPPKVHSEVQTDGNSQFASQGKTVSATCTDVLRNSFNTSPGVPCSLPKTDISAIPTLQQLGLVNGILPQQGIHKETDLLKCIQTYLSLFRSHGKETHLDSQTHRSPTQSQPAFLATNEEKCAREQIREATSERKDLNIHVRDTKTVKDVQKAKNVNKTAEKVRIIKYLLGELKALVAEQEDSEIQRLITEMEACISVLPTVSGNTDIQVEIALAMQPLRSENAQLRRQLRILNQQLREQQKTQKPSGAVDCNLELFSLQSLNMSLQNQLEESLKSQELLQSKNEELLKVIENQKDENKKFSSIFKDKDQTILENKQQYDIEITRIKIELEEALVNVKSSQFKLETAEKENQILGITLRQRDAEVTRLRELTRTLQTSMAKLLSDLSVDSARCKPGNNLTKSLLNIHDKQLQHDPAPAHTSIMSYLNKLETNYSFTHSEPLSTIKNEETIEPDKTYENVLSSRGPQNSNTRGMEEASAPGIISALSKQDSDEGSETMALIEDEHNLDNTIYIPFARSTPEKKSPLSKRLSPQPQIRAATTQLVSNSGLAVSGKENKLCTPVICSSSTKEAEDAPEKLSRASDMKDTQLLKKIKEAIGKIPAATKEPEEQTACHGPSGCLSNSLQVKGNTVCDGSVFTSDLMSDWSISSFSTFTSRDEQDFRNGLAALDANIARLQKSLRTGLLEK

SEQ ID NO: 13053 - protein, 1795 aa, Homo sapiens
MSQFQVPLAVQPDLPGLYDFPQRQVMVGSFPGSGLSMAGSESQLRGGGDGRKKRKRCGTCEPCRRLENCGACTSCTNRRTHQICKLRKCEVLKKKVGLLKEVEIKAGEGAGPWGQGAAVKTGSELSPVDGPVPGQMDSGPVYHGDSRQLSASGVPVNGAREPAGPSLLGTGGPWRVDQKPDWEAAPGPAHTARLEDAHDLVAFSAVAEAVSSYGALSTRLYETFNREMSREAGNNSRGPRPGPEGCSAGSEDLDTLQTALALARHGMKPPNCNCDGPECPDYLEWLEGKIKSVVMEGGEERPRLPGPLPPGEAGLPAPSTRPLLSSEVPQISPQEGLPLSQSALSIAKEKNISLQTAIAIEALTQLSSALPQPSHSTPQASCPLPEALSPPAPFRSPQSYLRAPSWPVVPPEEHSSFAPDSSAFPPATPRTEFPEAWGTDTPPATPRSSWPMPRPSPDPMAELEQLLGSASDYIQSVFKRPEALPTKPKVKVEAPSSSPAPAPSPVLQREAPTPSSEPDTHQKAQTALQQHLHHKRSLFLEQVHDTSFPAPSEPSAPGWWPPPSSPVPRLPDRPPKEKKKKLPTPAGGPVGTEKAAPGIKPSVRKPIQIKKSRPREAQPLFPPVRQIVLEGLRSPASQEVQAHPPAPLPASQGSAVPLPPEPSLALFAPSPSRDSLLPPTQEMRSPSPMTALQPGSTGPLPPADDKLEELIRQFEAEFGDSFGLPGPPSVPIQDPENQQTCLPAPESPFATRSPKQIKIESSGAVTVLSTTCFHSEEGGQEATPTKAENPLTPTLSGFLESPLKYLDTPTKSLLDTPAKRAQAEFPTCDCVEQIVEKDEGPYYTHLGSGPTVASIRELMEERYGEKGKAIRIEKVIYTGKEGKSSRGCPIAKWVIRRHTLEEKLLCLVRHRAGHHCQNAVIVILILAWEGIPRSLGDTLYQELTDTLRKYGNPTSRRCGLNDDRTCACQGKDPNTCGASFSFGCSWSMYFNGCKYARSKTPRKFRLAGDNPKEEEVLRKSFQDLATEVAPLYKRLAPQAYQNQVTNEEIAIDCRLGLKEGRPFAGVTACMDFCAHAHKDQHNLYNGCTVVCTLTKEDNRCVGKIPEDEQLHVLPLYKMANTDEFGSEENQNAKVGSGAIQVLTAFPREVRRLPEPAKSCRQRQLEARKAAAEKKKIQKEKLSTPEKIKQEALELAGITSDPGLSLKGGLSQQGLKPSLKVEPQNHFSSFKYSGNAVVESYSVLGNCRPSDPYSMNSVYSYHSYYAQPSLTSVNGFHSKYALPSFSYYGFPSSNPVFPSQFLGPGAWGHSGSSGSFEKKPDLHALHNSLSPAYGGAEFAELPSQAVPTDAHHPTPHHQQPAYPGPKEYLLPKAPLLHSVSRDPSPFAQSSNCYNRSIKQEPVDPLTQAEPVPRDAGKMGKTPLSEVSQNGGPSHLWGQYSGGPSMSPKRTNGVGGSWGVFSSGESPAIVPDKLSSFGASCLAPSHFTDGQWGLFPGEGQQAASHSGGRLRGKPWSPCKFGNSTSALAGPSLTEKPWALGAGDFNSALKGSPGFQDKLWNPMKGEEGRIPAAGASQLDRAWQSFGLPLGSSEKLFGALKSEEKLWDPFSLEEGPAEEPPSKGAVKEEKGGGGAEEEEEELWSDSEHNFLDENIGGVAVAPAHGSILIECARRELHATTPLKKPNRCHPTRISLVFYQHKNLNQPNHGLALWEAKMKQLAERARARQEEAARLGLGQQEAKLYGKKRKWGGTVVAEPQQKEKKGVVPTRQALAVPTDSAVTVSSYAYTKVTGPYSRWI

SEQ ID NO: 13054 - protein, 1044 aa, Homo sapiens
MGLLLPDYRWFTTVDILADNCEKEPWIILFYFCGTPQSQIQRTHQEKIQIQLTQSFEKEEKPSKDEAEKEKASDKLPRKMLSRDSSQEYTDSTGIDLHEFLVNTLKNNPRDRMMLLKLEQEILDFIGNNESPRKKFPPMTSYHRMLLHRVAAYFGLDHNVDQSGKSVIVNKTSNTRIPDQKFNEHIKDDKGEDFQKRYILKRDNSSFDKDDNQMRIRLKDDRRSKSIEEREEEYQRARDRIFSQDSLCSQENYIIDKRLQDEDASSTQQRRQIFRVNKDASGRSTNSHQSSTENELKYSEPRPWSSTDSDSSLRNLKPAVTKASSFSGISVLTRGDSSGSSKSIGRLSKTGSESSGSVGSSTGSLSHIQQPLPGTALSQSSHGAPVVYPTVSTHSSLSFDGGLNGQVASPSTSFFLLPLEAAGIPPGSILINPQTGQPFINPDGSPVVYNPPMTQQPVRSQVPGPPQPPLPAPPQQPAANHIFSQQDNLGSQFSHMSLARQPSADGSDPHAAMFQSTVVLQSPQQSGYIMTAAPPPHPPPPPPPPPPPPPLPPGQPVPTAGYPASGHPVSQPVLQQQGYIQQPSPQMPACYCAPGHYHSSQPQYRPVPSVHYNSHLNQPLPQPAQQTGYQVIPNQQQNYQGIVGVQQPQSQSLVSGQPNSIGNQIQGVVIPYTSVPTYQVSLPQGSQGIPHQTYQQPVMFPNQSNQGSMPTTGMPVYYSVIPPGQQNNLSSSVGYLQHPGSEQVQFPRTTSPCSSQQLQGHQCTAGPPPPPGGGMVMMQLSVPNNPQSCAHSPPQWKQNKYYCDHQRGQKCVEFSSVDNIVQHSPQLSSPIISPAQSPAPAQLSTLKTVRPSGPPLSIMPQFSRPFVPGQGDSRYPLLGQPLQYNPPAVLHGHIPNQQGQPGSRHGNRGRRQAKKAASTDLGAGETVVGKVLEITELPDGITRMEAEKLFGELFKIGAKIRWLRDPQSQPRRHPLCCGSGDNTANPERSKPSDLASTYTVLATFPSISAAQNALKKQINSVNKFKLRTSKKHYDFHILERASSQ

SEQ ID NO: 13055 - protein, 2119 aa, Homo sapiens
MLCCLLVRASNLPSAKKDRRSDPVASLTFRGVKKRTKVIKNSVNPVWNEGFEWDLKGIPLDQGSELHVVVKDHETMGRNRFLGEAKVPLREVLATPSLSASFNAPLLDTKKQPTGASLVLQVSYTPLPGAVPLFPPPTPLEPSPTLPDLDVVAGGGQSRAETWSLLSDSTMDTRYSGKKWPAPTDTGGEEDTEDQGLTGDEAEPFLDQSGGPGAPTTPRKLPSRPPPHYPGIKRKRSAPTSRKLLSDKPQDFQIRVQVIEGRQLPGVNIKPVVKVTAAGQTKRTRIHKGNSPLFNETLFFNLFDSPGELFDEPIFITVVDSRSLRTDALLGEFRMDVGTIYREPRHAYLRKWLLLSDPDDFSAGARGYLKTSLCVLGPGDEAPLERKDPSEDKEDIESNLLRPTGVALRGAHFCLKVFRAEDLPQMDDAVMDNVKQIFGFESNKKNLVDPFVEVSFAGKMLCSKILEKTANPQWNQNITLPAMFPSMCEKMRIRIIDWDRLTHNDIVATTYLSMSKISAPGGEIEVDDYLGFLPTFGPCYINLYGSPREFTGFPDPYTELNTGKGEGVAYRGRLLLSLETKLVEHSEQKVEDLPADDILRVEKYLRRRKYSLFAAFYSATMLQDVDDAIQFEVSIGNYGNKFDMTCLPLASTTQYSRAVFDGCHYYYLPWGNVKPVVVLSSYWEDISHRIETQNQLLGIADRLEAGLEQVHLALKAQCSTEDVDSLVAQLTDELIAGCSQPLGDIHETPSATHLDQYLYQLRTHHLSQITEAALALKLGHSELPAALEQAEDWLLRLRALAEEPQNSLPDIVIWMLQGDKRVAYQRVPAHQVLFSRRGANYCGKNCGKLQTIFLKYPMEKVPGARMPVQIRVKLWFGLSVDEKEFNQFAEGKLSVFAETYENETKLALVGNWGTTGLTYPKFSDVTGKIKLPKDSFRPSAGWTWAGDWFVCPEKTLLHDMDAGHLSFVEEVFENQTRLPGGQWIYMSDNYTDVNGEKVLPKDDIECPLGWKWEDEEWSTDLNRAVDEQGWEYSITIPPERKPKHWVPAEKMYYTHRRRRWVRLRRRDLSQMEALKRHRQAEAEGEGWEYASLFGWKFHLEYRKTDAFRRRRWRRRMEPLEKTGPAAVFALEGALGGVMDDKSEDSMSVSTLSFGVNRPTISCIFDYGNRYHLRCYMYQARDLAAMDKDSFSDPYAIVSFLHQSQKTVVVKNTLNPTWDQTLIFYEIEIFGEPATVAEQPPSIVVELYDHDTYGADEFMGRCICQPSLERMPRLAWFPLTRGSQPSGELLASFELIQREKPAIHHIPGFEVQETSRILDESEDTDLPYPPPQREANIYMVPQNIKPALQRTAIEILAWGLRNMKSYQLANISSPSLVVECGGQTVQSCVIRNLRKNPNFDICTLFMEVMLPREELYCPPITVKVIDNRQFGRRPVVGQCTIRSLESFLCDPYSAESPSPQGGPDDVSLLSPGEDVLIDIDDKEPLIPIQLADGLSSLAPTNTASPPSSPHEEEFIDWWSKFFASIGEREKCGSYLEKDFDTLKVYDTQLENVEAFEGLSDFCNTFKLYRGKTQEETEDPSVIGEFKGLFKIYPLPEDPAIPMPPRQFHQLAAQGPQECLVRIYIVRAFGLQPKDPNGKCDPYIKISIGKKSVSDQDNYIPCTLEPVFGKMFELTCTLPLEKDLKITLYDYDLLSKDEKIGETVVDLENRLLSKFGARCGLPQTYCVSGPNQWRDQLRPSQLLHLFCQQHRVKAPVYRTDRVMFQDKEYSIEEIEAGRIPNPHLGPVEERLALHVLQQQGLVPEHVESRPLYSPLQPDIEQGKLQMWVDLFPKALGRPGPPFNITPRRARRFFLRCIIWNTRDVILDDLSLTGEKMSDIYVKGWMIGFEEHKQKTDVHYRSLGGEGNFNWRFIFPFDYLPAEQVCTIAKKDAFWRLDKTESKIPARVVFQIWDNDKFSFDDFLGSLQLDLNRMPKPAKTAKKCSLDQLDDAFHPEWFVSLFEQKTVKGWWPCVAEEGEKKILAGKLEMTLEIVAESEHEERPAGQGRDEPNMNPKLEDPRRPDTSFLWFTSPYKTMKFILWRRFRWAIILFIILFILLLFLAIFIYAFPNYAAMKLVKPFS

SEQ ID NO: 13056 - protein, 637 aa, Homo sapiens
MSDKSELKAELERKKQRLAQIREEKKRKEEERKKKETDQKKEAVAPVQEESDLEKKRREAEALLQSMGLTPESPIVFSEYWVPPPMSPSSKSVSTPSEAGSQDSGDGAVGSRTLHWDTDPSVLQLHSDSDLGRGPIKLGMAKITQVDFPPREIVTYTKETQTPVMAQPKEDEEEDDDVVAPKPPIEPEEEKTLKKDEENDSKAPPHELTEEEKQQILHSEEFLSFFDHSTRIVERALSEQINIFFDYSGRDLEDKEGEIQAGAKLSLNRQFFDERWSKHRVVSCLDWSSQYPELLVASYNNNEDAPHEPDGVALVWNMKYKKTTPEYVFHCQSAVMSATFAKFHPNLVVGGTYSGQIVLWDNRSNKRTPVQRTPLSAAAHTHPVYCVNVVGTQNAHNLISISTDGKICSWSLDMLSHPQDSMELVHKQSKAVAVTSMSFPVGDVNNFVVGSEEGSVYTACRHGSKAGISEMFEGHQGPITGIHCHAAVGAVDFSHLFVTSSFDWTVKLWTTKNNKPLYSFEDNADYVYDVMWSPTHPALFACVDGMGRLDLWNLNNDTEVPTASISVEGNPALNRVRWTHSGREIAVGDSEGQIVIYDVGEIAVPRNDEWARFGRTLAEINANRADAEEEAATRIPA

SEQ ID NO: 13057 - protein, 455 aa, Homo sapiens
MDETQGPLAMTVHLLANSGHGSLLQRTLDQLLDCICPEVRLFQVSERASPVKYCEKSHSKRSRFPGMSVLLFLHESPGEDRLFRVLDSLQHSPWQCYPTQDTRGRLCPYFFANQEFYSLDSQLPIWGVRQVHCGSEILRVTLYCSFDNYEDAIRLYEMILQREATLQKSNFCFFVLYASKSFALQLSLKQLPPGMSVDPKESSVLQFKVQEIGQLVPLLPNPCMPISSTRWQTQDYDGNKILLQVQLNPELGVKNGILGAGMLPLGSRLTSVSAKRTSEPRSQRNQGKRSQGHSLELPEPSGSPTSDRCAGTSWKSPGRSFQVSSPAMGAHLHLSSHHLESGARMKVLNRENSFQKLEAETNVDTGLTIINSEPRQTYFGGFPRDLQTSQPPFCLPASSLGVATSKNNSVLKERVSPLPLAGQRDLGTRKTISECLLHLQVQGEEKEEDEEEFFI

SEQ ID NO: 13058 - protein, 1091 aa, Homo sapiens
MAAAGQLCLLYLSAGLLSRLGAAFNLDTREDNVIRKYGDPGSLFGFSLAMHWQLQPEDKRLLLVGAPRAEALPLQRANRTGGLYSCDITARGPCTRIEFDNDADPTSESKEDQWMGVTVQSQGPGGKVVTCAHRYEKRQHVNTKQESRDIFGRCYVLSQNLRIEDDMDGGDWSFCDGRLRGHEKFGSCQQGVAATFTKDFHYIVFGAPGTYNWKGIVRVEQKNNTFFDMNIFEDGPYEVGGETEHDESLVPVPANSYLGFSLDSGKGIVSKDEITFVSGAPRANHSGAVVLLKRDMKSAHLLPEHIFDGEGLASSFGYDVAVVDLNKDGWQDIVIGAPQYFDRDGEVGGAVYVYMNQQGRWNNVKPIRLNGTKDSMFGIAVKNIGDINQDGYPDIAVGAPYDDLGKVFIYHGSANGINTKPTQVLKGISPYFGYSIAGNMDLDRNSYPDVAVGSLSDSVTIFRSRPVINIQKTITVTPNRIDLRQKTACGAPSGICLQVKSCFEYTANPAGYNPSISIVGTLEAEKERRKSGLSSRVQFRNQGSEPKYTQELTLKRQKQKVCMEETLWLQDNIRDKLRPIPITASVEIQEPSSRRRVNSLPEVLPILNSDEPKTAHIDVHFLKEGCGDDNVCNSNLKLEYKFCTREGNQDKFSYLPIQKGVPELVLKDQKDIALEITVTNSPSNPRNPTKDGDDAHEAKLIATFPDTLTYSAYRELRAFPEKQLSCVANQNGSQADCELGNPFKRNSNVTFYLVLSTTEVTFDTPDLDINLKLETTSNQDNLAPITAKAKVVIELLLSVSGVAKPSQVYFGGTVVGEQAMKSEDEVGSLIEYEFRVINLGKPLTNLGTATLNIQWPKEISNGKWLLYLVKVESKGLEKVTCEPQKEINSLNLTESHNSRKKREITEKQIDDNRKFSLFAERKYQTLNCSVNVNCVNIRCPLRGLDSKASLILRSRLWNSTFLEEYSKLNYLDILMRAFIDVTAAAENIRLPNAGTQVRVTVFPSKTVAQYSGVPWWIILVAILAGILMLALLVFILWKCGFFKRSRYDDSVPRYHAVRIRKEEREIKDEKYIDNLEKKQWITKWNENESYS

SEQ ID NO: 13059 - protein, 1069 aa, Homo sapiens
MYLLDGSGEPASPPADAMPRGTPPRKTVYRISVTMVRKEQLAAPGSGGPDPRPVRRPRPARSPDAPGRLEEEAEEAEGAEEPEGPRPRAWDFRTFRTRSTGQLELGRLRPCARGLEPADLAGSAPAEEEGRGSPASGSPDVEGARAAPLRRSLSFRHWSGPEAPQGRTLGGGRRHSSSGSLAWAPCDEAAAGTTLEPATATQPASEKRNTLDVGEVLSKNDALSDLERWERSKSKNRTLDNSDLQRLERARAAAGAGAASEHRLLRFFSGIFARRDGGPGGGPSPRSGASRPRGYFSLRRAPAEAHSSSAESIDGSPRRDAFVNSQEWTLSRSVPELKVGIVGNLASGKSALVHRYLTGTYVQEESPEGGRFKKEIVVDGQSYLLLIRDEGGPPEAQFAMWVDAVIFVFSLEDEISFQTVYHYYSRMANYRNTSEIPLVLVGTQDAISSANPRVIDDARARKLSNDLKRCTYYETCATYGLNVERVFQDVAQKIVATRKKQQLSIGPCKSLPNSPSHSSVCSAQVSAVHISQTSNGGGSLSDYSSSVPSTPSTSQKELRIDVPPTANTPTPVRKQSKRRSNLFTSRKGSDPDKEKKGLESRADSIGSGRAIPIKQGMLLKRSGKSLNKEWKKKYVTLCDNGVLTYHPSLHDYMQNVHGKEIDLLRTTVKVPGKRPPRATSACAPISSPKTNGLSKDMSSLHISPNSDTGLGDSVCSSPSISSTTSPKLDPPPSPHANRKKHRRKKSTSNFKADGLSGTAEEQEENFEFIIVSLTGQTWHFEATTYEERDAWVQAIESQILASLQSCESSKNKSRLTSQSEAMALQSIRNMRGNSHCVDCETQNPNWASLNLGALMCIECSGIHRNLGTHLSRVRSLDLDDWPVELIKVMSSIGNELANSVWEESSQGRTKPSVDSTREEKERWIRAKYEQKLFLAPLPCTELSLGQHLLRATADEDLRTAILLLAHGSRDEVNETCGEGDGRTALHLACRKGNVVLAQLLIWYGVDVTARDAHGNTALAYARQASSQECIDVLLQYGCPDERFVLMATPNLSRRNNNRNNSSGRVPTII

SEQ ID NO: 13060 - protein, 1044 aa, Homo sapiens
MVLSLTGLIAFSFLQATLALNPEDPNVCSHWESYAVTVQESYAHPFDQIYYTRCTDILNWFKCTRHRISYKTAYRRGLRTMYRRRSQCCPGYYESGDFCIPLCTEECVHGRCVSPDTCHCEPGWGGPDCSSGCDSDHWGPHCSNRCQCQNGALCNPITGACVCAAGFRGWRCEELCAPGTHGKGCQLPCQCRHGASCDPRAGECLCAPGYTGVYCEELCPPGSHGAHCELRCPCQNGGTCHHITGECACPPGWTGAVCAQPCPPGTFGQNCSQDCPCHHGGQCDHVTGQCHCTAGYMGDRCQEECPFGSFGFQCSQHCDCHNGGQCSPTTGACECEPGYKGPRCQERLCPEGLHGPGCTLPCPCDADNTISCHPVTGACTCQPGWSGHHCNESCPVGYYGDGCQLPCTCQNGADCHSITGGCTCAPGFMGEVCAVSCAAGTYGPNCSSICSCNNGGTCSPVDGSCTCKEGWQGLDCTLPCPSGTWGLNCNESCTCANGAACSPIDGSCSCTPGWLGDTCELPCPDGTFGLNCSEHCDCSHADGCDPVTGHCCCLAGWTGIRCDSTCPPGRWGPNCSVSCSCENGGSCSPEDGSCECAPGFRGPLCQRICPPGFYGHGCAQPCPLCVHSSRPCHHISGICECLPGFSGALCNQVCAGGYFGQDCAQLCSCANNGTCSPIDGSCQCFPGWIGKDCSQACPPGFWGPACFHACSCHNGASCSAEDGACHCTPGWTGLFCTQRCPAAFFGKDCGRVCQCQNGASCDHISGKCTCRTGFTGQHCEQRCAPGTFGYGCQQLCECMNNSTCDHVTGTCYCSPGFKGIRCDQAALMMEELNPYTKISPALGAERHSVGAVTGIMLLLFLIVVLLGLFAWHRRRQKEKGRDLAPRVSYTPAMRMTSTDYSLSGACGMDRRQNTYIMDKGFKDYMKESVCSSSTCSLNSSENPYATIKDPPILTCKLPESSYVEMKSPVHMGSPYTDVPSLSTSNKNIYEVEPTVSVVQEGCGHNSSYIQNAYDLPRNSHIPGHYDLLPVRQSPANGPSQDKQS

SEQ ID NO: 13061 - protein, 646 aa, Homo sapiens
MSLKLPRNWDFNLKVEAAKIARSRSVMTGEQMAAFHPSSTPNPLERPIKMGWLKKQRSIVKNWQQRYFVLRAQQLYYYKDEEDTKPQGCMYLPGCTIKEIATNPEEAGKFVFEIIPASWDQNRMGQDSYVLMASSQAEMEEWVKFLRRVAGTPCGAVFGQRLDETVAYEQKFGPHLVPILVEKCAEFILEHGRNEEGIFRLPGQDNLVKQLRDAFDAGERPSFDRDTDVHTVASLLKLYLRDLPEPVVPWSQYEGFLLCGQLTNADEAKAQQELMKQLSILPRDNYSLLSYICRFLHEIQLNCAVNKMSVDNLATVIGVNLIRSKVEDPAVIMRGTPQIQRVMTMMIRDHEVLFPKSKDIPLSPPAQKNDPKKAPVARSSVGWDATEDLRISRTDSFSSMTSDSDTTSPTGQQPSDAFPEDSSKVPREKPGDWKMQSRKRTQTLPNRKCFLTSAFQGANSSKMEIFKNEFWSPSSEAKAGEGHRRTMSQDLRQLSDSQRTSTYDNVPSLPGSPGEEASALSSQACDSKGDTLASPNSETGPGKKNSGEEEIDSLQRMVQELRKEIETQKQMYEEQIKNLEKENYDVWAKVVRLNEELEKEKKKSAALEISLRNMERSREDVEKRNKALEEEVKEFVKSMKEPKTEA

SEQ ID NO: 13062 - protein, 591 aa, Homo sapiens
IRREQCKTEEKLDLLTSKCAHLCMDSVKTSDDEVGSPKEESRKFTNFQSPNIDPTEENDLDDSLSVKNGDSSNDFVTCNDINEDDFGDFGDFGSASGSTPPFVTGTQDSMSDATFEESSEHFPHFSEPGDDFGEFGDINAVSCQEETILTKSDLKQTSDNLSEECQLARKSSGTGTEPVAKLKNGQEGEIGHFDSVPNIQDDCNGFQDSDDFADFSSAGPSQVVDWNAFEDEQKDSCSWAAFGDQQATESHHRKEAWQSHRTDENIDTPGTPKTHSVPSATSKGAVASGHLQESATSVQTALLNRLERIFEACFPSILVPDAEEEVTSLKHLLETSTLPIKTREALPESGELLDVWTELQDIHDAHGLRYQWGGSHSNKKLLSSLGIDTRNILFTGNKKQPVIVPMYAAGLGMLEPTKEPLKPLSAAEKIASIGQTATMSPDMNTCTSDQFQESLPPVQFDWSSSGLTNPLDASGGSTLLNLDFFGPVDDSSSSSSTTIPGVDPELYELTTSKLEISTSSLKVTDAFARLMSTVEKTSTSTSRKPKREEHLSEEAIKVIAGLPDLTFMHAKVLMFPATLTPSTSSQEKADG

SEQ ID NO: 13063 - protein, 768 aa, Homo sapiens
MTTEDHLLRTASQHSDSSGFAEDSTDCLSLNHLQVQESLQAMGSSADSCDSETTVTSLGEDLATPTAQDQPYFNESEEESLVPLQKGLEKAAAVADKRKSGSQDFPQCNTIENTGTKQSTCSPGDHIIEITEVEEDLFPAETVELLREASAESDVGKSSESEFTQYTTHHILKSLASIEAKCSDMSSENTTGPPSSMDRVNTALQRAQMKVCSLSNQRMGRSLLKSKDLLKQRYLFAKAGYPLRRSQSLPTTLLSPVRVVSSVNVRLSPGKETRCSPPSFTYKYTPEEEQELEKRVMEHDGQSLVKSTIFISPSSVKKEEAPQSEAPRVEECHHGRTPTCSRLAPPPMSQSTCSLHSIHSEWQERPLCEHTRTLSTHSVPNISGATCSAFASPFGCPYSHRHATYPYRVCSVNPPSAIEMQLRRVLHDIRNSLQNLSQYPMMRGPDPAAAPYSTQKSSVLPLYENTFQELQVMRRSLNLFRTQMMDLELAMLRQQTMVYHHMTEEERFEVDQLQGLRNSVRMELQDLELQLEERLLGLEEQLRAVRMPSPFRSSALMGMCGSRSADNLSCPSPLNVMEPVTELMQEQSYLKSELGLGLGEMGFEIPPGESSESVFSQATSESSSVCSGPSHANRRTGVPSTASVGKSKTPLVARKKVFRASVALTPTAPSRTGSVQTPPDLESSEEVDAAEGAPEVVGPKSEVEEGHGKLPSMPAAEEMHKNVEQDELQQVIREIKESIVGEIRREIVSGLLAAVSSSKASNSKQDYH

SEQ ID NO: 13064 - protein, 220 aa, Homo sapiens
MNVFRILGDLSHLLAMILLLGKIWRSKCCKGISGKSQILFALVFTTRYLDLFTNFISIYNTVMKVVFLLCAYVTVYMIYGKFRKTFDSENDTFRLEFLLVPVIGLSFLENYSFTLLEILWTFSIYLESVAILPQLFMISKTGEAETITTHYLFFLGLYRALYLANWIRRYQTENFYDQIAVVSGVVQTIFYCDFFYLYVTKGRSWDDSNADTGLRSYSSI

SEQ ID NO: 13065 - protein, 672 aa, Homo sapiens
MQNGFSRTLKSGDGITFGVFGSKFRIEYEPLVACSSCLDVSGKTALNQAILQLGGFTVNNWTEECTHLVMVSVKVTIKTICALICGRPIVKPEYFTEFLKAVESKKQPPQIESFYPPLDEPSIGSKNVDLSGRQERKQIFKGKTFIFLNAKQHKKLSSAVVFGGGEARLITEENEEEHNFFLAPGTCVVDTGITNSQTLIPDCQKKWIQSIMDMLQRQGLRPIPEAEIGLAVIFMTTKNYCDPQGHPSTGLKTTTPGPSLSQGVSVDEKLMPSAPVNTTTYVADTESEQADTWDLSERPKEIKVSKMEQKFRMLSQDAPTVKESCKTSSNNNSMVSNTLAKMRIPNYQLSPTKLPSINKSKDRASQQQQTNSIRNYFQPSTKKRERDEENQEMSSCKSARIETSCSLLEQTQPATPSLWKNKEQHLSENEPVDTNSDNNLFTDTDLKSIVKNSASKSHAAEKLRSNKKREMDDVAIEDEVLEQLFKDTKPELEIDVKVQKQEEDVNVRKRPRMDIETNDTFSDEAVPESSKISQENEIGKKRELKEDSLWSAKEISNNDKLQDDSEMLPKKLLLTEFRSLVIKNSTSRNPSGINDDYGQLKNFKKFKKVTYPGAGKLPHIIGGSDLIAHHARKNTELEEWLRQEMEVQNQHAKEESLADDLFRYNPYLKRRR

SEQ ID NO: 13066 - protein, 865 aa, Homo sapiens
MGKKIKKEVEPPPKDVFDPLMIESKKAATVVLMLNSPEEEILAKACEAIYKFALKGEENKTTLLELGAVEPLTKLLTHEDKIVRRNATMIFGILASNNDVKKLLRELDVMNSVIAQLAPEEEVVIHEFASLCLANMSAEYTSKVQIFEHGGLEPLIRLLSSPDPDVKKNSMECIYNLVQDFQCRAKLQELNAIPPILDLLKSEYPVIQLLALKTLGVIANDKESRTMLRDNQGLDHLIKILETKELNDLHIEALAVIANCLEDMDTMVQIQQTGGLKKLLSFAENSTIPDIQKNAAKAITKAAYDPENRKLFHEQEVEKCLVALLGSENDGTKIAASQAISAMCENSGSKDFFNNQGIPQLIQLLKSDNEEVREAAALALANLTTCNPANANAAAEADGIDPLINLLSSKRDGAIANAATVLTNMAMQEPLRLNIQNHDIMHAIISPLRSANTVVQSKAALAVTATACDVEARTELRNSGGLEPLVELLRSKNDEVRKHASWAVMVCAGDELTANELCRLGALDILEEVNVSGTRKNKFSEAAYNKLLNNNLSLKYSQTGYLSSSNIINDGFYDYGRINPGTKLLPLKELCLQEPSDLRAVLLINSKSYVSPPSSMEDKSDVGYGRSISSSSSLRRSSKEKNNAGFGSPIEDKSEPASGRNTVLSKSATKEKGWRKSKGKKEEEKVKEEEEVMVVPKFVGEGSSDKEWCPPSDPDFSMYVYEVTKSILPITNIKEQIEDLAKYVAEKMGGKIPKEKLPDFSWELHISELKFQLKSNVIPIGHVKKGIFYHRALLFKALADRIGIGCSLVRGEYGRAWNEVMLQNDSRKGVIGGLPAPEMYVIDLMFHPGGLMKLRSREADLYRFI

SEQ ID NO: 13067 - protein, 784 aa, Homo sapiens
METAIWRRSYISLISSERPVHNWRGKSVQKKQAESKSQIKLHTQSAPFGLCPKDMMLTQAPSSVVRSRNSRNHTVNSGGSCLSASTVAIPAINDSSAAMSACSTISAQPASSMDTQMHSPKKQERVNKRVIWGIEVAEELHWKGWELGKETTRNLVLKNRSLKLQKMKYRPPKTKFFFTVIPQPIFLSPGITLTLPIVFRPLEAKEYMDQLWFEKAEGMFCVGLRATLPCHRLICRPPSLQLPMCAVGDTTEAFFCLDNVGDLPTFFTWEFSSPFQMLPATGLLEPGQASQIKVTFQPLTAVIYEVQATCWYGAGSRQRSSIQLQAVAKCAQLLVSIKHKCPEDQDAEGFQKLLYFGSVAVGCTSERQIRLHNPSAVNAPFRIEISPDELAEDQAFSCPTAHGIVLPGEKKCVSVFFHPKTLDTRTVDYCSIMPSGCASKTLLKVVGFCRGPAVSLQHYCVNFSWVNLGERSEQPLWIENQSDCTAHFQFAIDCLESVFTIRPAFGTLVGKARMTLHCAFQPTHPIICFRRVACLIHHQDPLFLDLMGTCHSDSTKPAILKPQHLTWYRTHLARGLTLYPPDILDAMLKEKKLAQDQNGALMIPIQDLEDMPAPQYPYIPPMTEFFFDGTSDITIFPPPISVEPVEVDFGACPGPEAPNPVPLCLMNHTKGKIMVVWTRRSDCPFWVTPESCDVPPLKSMAMRLHFQPPHPNCLYTVELEAFAIYKVCARNEREECGVSARSLSGLVGWQEVTEGSFRLHPLRARLSLGWTVTPMSLSPPKLLA

SEQ ID NO: 13068 - protein, 590 aa, Homo sapiens
MEGKRQLEKRDFGKRLSLDSSLVEYMDSNKYIEHLLTQLEEQHRSLWREKLAVARLQREVAQRTSEGAMHEKLIHELEEERHLRLQSEKRLQEVTLESERNRIQMRSLQQQFSRMEETVRNLLQSQGSPEQKKEETVNIMVYQEKLSEEERKHKEALEDLHMVVDEDSRSESSSTDEGKEKTKLLLERLKALEAENSALALENENQREQYERCLDEVANQVVQALLTQKDLREECVKLKTRVFDLEQQNRTLSILFQQRVRPTSDLLLQKLHSRLLDLSSGDLLSEVERNRSLTQSRTDAEVHEHQLNTKSALKCPGLGAVIPGHLCPRNSYSSSSELSLSSTCSEYSSGSSYTWHDGKNLRKRVKEANENLQEDEDDAVADSVFQSHIIESNCQMRTLDSGIGTFPLPDSGNRSTGRYLCQPDSPEDAEPLLPLQSALSAVSSMRAQTLEREVPSSTDGQRPADSAIVHSTSDPIMTARGMRPLQSRLPKPASSGKVSSQKQNEAEPRPQTCSSFGYAEDPMASQPLPDWGSEVAATGTQDKAPRMCTYSASGGSNSDSDLDYGDNGFGAGRGQLVKALKSAAPEIETT

SEQ ID NO: 13069 - protein, 502 aa, Homo sapiens
MAEDKSKRDSIEMSMKGCQTNNGFVHNEDILEQTPDPGSSTDNLKHSTRGILGSQEPDFKGVQPYAGMPKEVLFQFSGQARYRIPREILFWLTVASVLVLIAATIAIIALSPKCLDWWQEGPMYQIYPRSFKDSNKDGNGDLKGIQDKLDYITALNIKTVWITSFYKSSLKDFRYGVEDFREVDPIFGTMEDFENLVAAIHDKGLKLIIDFIPNHTSDKHIWFQLSRTRTGKYTDYYIWHDCTHENGKTIPPNNWLSVYGNSSWHFDEVRNQCYFHQFMKEQPDLNFRNPDVQEEIKEILRFWLTKGVDGFSLDAVKFLLEAKHLRDEIQVNKTQIPDTVTQYSELYHDFTTTQVGMHDIVRSFRQTMDQYSTEPGRYRFMGTEAYAESIDRTVMYYGLPFIQEADFPFNNYLSMLDTVSGNSVYEVITSWMENMPEGKWPNWMIGGPDSSRLTSRLGNQYVNVMNMLLFTLPGTPITYYGEEIGMGNIVAANLNESYDIVS

SEQ ID NO: 13070 - protein, 668 aa, Homo sapiens
MMVESASETIRSAPSGQNGVGSLSGQADGSSGGATGTTASGTGREVTTGADSNGEMSPAELLHFQQQQALQVARQFLLQQASGLSSPGNNDSKQSASAVQVPVSVAMMSPQMLTPQQMQQILSPPQLQALLQQQQALMLQQLQEYYKKQQEQLHLQLLTQQQAGKPQPKEALGNKQLAFQQQLLQMQQLQQQHLLNLQRQGLVSLQPNQASGPLQTLPQAAVCPTDLPQLWKGEGAPGQPAEDSVKQEGLDLTGTAATATSFAAPPKVSPPLSHHTLPNGQPTVLTSRRDSSSHEETPGSHPLYGHGECKWPGCETLCEDLGQFIKHLNTEHALDDRSTAQCRVQMQVVQQLEIQLAKESERLQAMMAHLHMRPSEPKPFSQPVTVSAADSFPDGLVHPPTSAAAPVTPLRPPGLGSASLHGGGPARRRSSDKFCSPISSELAQNHEFYKNADVRPPFTYASLIRQAILETPDRQLTLNEIYNWFTRMFAYFRRNTATWKNAVRHNLSLHKCFVRVENVKGAVWTVDEREYQKRRPPKMTGSPTLVKNMISGLSYGALNASYQAALAESSFPLLNSPGMLNPGSASSLLPLSHDDVGAPVEPLPSNGSSSPPRLSPPQYSHQVQVKEEPAEAEEDRQPGPPLGAPNPSASGPPEDRDLEEELPGEELS

SEQ ID NO: 13071 - protein, 557 aa, Homo sapiens
MGNSFCYTAVYCMINTGTQMDLEVKGVAATSRSQIQPFFGRKKPLQQRWTSESWTNQNSCPPVVPRLDLGSLVDSDDEDNFSYIPLSTANLPNSSSTLGWVTPCQTPYTQYHLNKLDQNIIPENLPAPTDKCKLKYQQCKTEIKEGYKQYSQRNAENTKSNVTHKQSPRNKIDEKCVQDEEANTDDLTTLDRKAILQQGYADNSCDKQQRARKLDAEIVAAEKKKQIVAEQVMIDHLSRAVISDPEQNLAIEQKESDHILPDSKMTPLRFRKRTLHETKIRTHSTLTENVLSHKLQFDGRIVSRNGRDACRELIGFFFTHDQSLTIYEYRQFGKNRTNVLPFIQKSIYSHQCGRRKGKQYRLGDFYVGATLTFLSSDHLSLPESIKENTLLKLRITNIDQIALDSLKTASMEQEDDIIIQETNDRLVFKAIQDVLKEKLHKRGVRILTGLGKYFQQLDKEGNGLLDKADFKQALKVFHLEVSEKDFESAWLILNDNGNGKVDYGEFKRGIIGEMNEYRKSYVRKAFMKLDFNKSGSVPIINIRKCYCAKKHSQVISG

SEQ ID NO: 13072 - protein, 262 aa, Homo sapiens
MKGGFTGGDEYQKHFLPRDYLATYYSFDGSPSPEAEMLKFNLECLHKTFGPGLQGDTLIDIGSGPTIYQVLAACDSFQDITLSDFTDRNREELEKWLKKEPGAYDWTPAVKFACELEGNSGRWEEKEEKLRAAVKRVLKCDVHLGNPLAPAVLPLADCVLTLLAMECACCSLDAYRAALCNLASLLKPGGHLVTTVTLRLPSYMVGKREFSCVALEKEEVEQAVLDAGFDIEQLLHSPQSYSVTNAANNGVCFIVARKKPGP

SEQ ID NO: 13073 - protein, 1159 aa, Homo sapiens
MCGPAMFPAGPPWPRVRVVQVLWALLAVLLASWRLWAIKDFQECTWQVVLNEFKRVGESGVSDSFFEQEPVDTVSSLFHMLVDSPIDPSEKYLGFPYYLKINYSCEEKPSEDLVRMGHLTGLKPLVLVTFQSPVNFYRWKIEQLQIQMEAAPFRSKEPCMAEEVCSMSWYTPMPIKKGSVVMRVDISSNGLGTFIPDKRFQMNINGFLKRDRDNNIQFTVGEELFNLMPQYFVGVSSRPLWHTVDQSPVLILGGIPNEKYVLMTDTSFKDFSLVELSIDSCWVGSFYCPHSGFTATIYDTIATESTLFIRQNQLVYYFTGTYTTLYERNRGSGSWIRVLASECIKKLCPVYFHSNGSEYIMALTTGKHEGYVHFGTIRDGQVSFEMLPRQWSVCEQIGVTTCSIIWSEYIAGEYTLLLLVESGYGNASKRFQVVSYNTASDDLELLYHIPEFIPEARGLEFLMILGTESYTSTAMAPKGIFCNPYNNLIFIWGNFLLQSSNKENFIYLADFPKELSIKYMARSFRGAVAIVTETEEIWYLLEGSYRVYQLFPSKGWQVHISLKLMQQSSLYASNETMLTLFYEDSKLYQLVYLMNNQKGQLVKRLVPVEQLLMYQQHTSHYDLERKGGYLMLSFIDFCPFSVMRLRSLPSPQRYTRQERYRARPPRVLERSGFHNENSLAIYQGLVYYLLWLHSVYDKPYADPVHDPTWRWWANNKQDQDYYFFLASNWRSAGGVSIEMDSYEKIYNLESAYELPERIFLDKGTEYSFAIFLSAQGHSFRTQSELGTAFQLHSQVDVGVVLADPGCIEASVKQEVLINRNSVLFSITLKDKKLCYDQGISGHHLMETSMTVNVVGSSGLCFQETHLGPHMQGNLMVPVFIGCPPGKRLAFDITYTLEYSRLKNKHYFDCVNVNPEMPCFLFRDIFYPFFLIQDLVTGDSGSFQGSYVLLVVGGGPTLDSLKDYSEDEIYRFNSPLDKTNSLIWTTRTTRTTKDSAFHIMSHESPGIEWLCLENAPCYDNVPQGIFAPEFFFKVLVSNRGVDTSTYCNYQLTFLLHIHGLPLSPKRALFIIMVSASVFVGLVIFYIAFCLLWPLVVKGCTMIRWKINNLIASESYYTYASISGISSMPSLRHSRMGSMFSSRMTEDRAEPKEAVERQLMT

SEQ ID NO: 13074 - protein, 914 aa, Homo sapiens
MSLSHWPYFRLVLNFRPQVICLPQPPKVLGYRLEPPHLTLACTLEGMYNIIEEILERDINGTLLSQATCELCDGNENSFMVVNALGDRCVRCEPTFVNTSRSCACSEPNILTGGLCFSSTGNFPLRRISAARYGEVGMSLTSEWFAKYLQSSAAACWVYANLTSCQALGNMCVMNMNSYDFATFDACGLFQFIFENTAGLSTVHSISFWRQNLPWLFYGDQLGLAPQVLSSTSLPTNFSFKGENQNTKLKFVAASYDIRGNFLKWQTLEGGVLQLCPDTETRLNAAYSFGTTYQQNCEIPISKILIDFPTPIFYDVYLEYTDENQHQYILAVPVLNLNLQHNKIFVNQDSNSGKWLLTRRIFLVDAVSGRENDLGTQPRVIRVATQISLSVHLVPNTINGNIYPPLITIAYSDIDIKDANSQSVKVSFSVTYEMDHGEAHVQTDIALGVLGGLAVLASLLKTAGWKRRIGSPMIDLQTVVKFLVYYAGDLANVFFIITVGTGLYWLIFFKAQKSVSVLLPMPIQEERFVTYVGCAFALKALQFLHKLISQITIDVFFIDWERPKGKVLKAVEGEGGVRSATVPVSIWRTYFVANEWNEIQTVRKINSLFQVLTVLFFLEVVGFKNLALMDSSSSLSRNPPSYIAPYSCILRYAVSAALWLAIGIIQVVFFAVFYERFIEDKIRQFVDLCSMSNISVFLLSHKCFGYYIHGRSVHGHADTNMEEMNMNLKREAENLCSQRGLVPNTDGQTFEIAISNQMRQHYDRIHETLIRKNGPARLLSSSASTFEQSIKAYHMMNKFLGSFIDHVHKEMDYFIKDKLLLERILGMEFMEPMEKSIFYNDEGYSFSSVLYYGNEATLLIFDLLFFCVVDLACQNFILASFLTYLQQEIFRYIRNTVGQKNLASKTLVDQRFLI

SEQ ID NO: 13075 - protein, 475 aa, Homo sapiens
MINTGTQMDLEVKGVAATSRSQIQPFFGRKKPLQQRWTSESWTNQNSCPPVVPRLDLGSLVDSDDEDQNIIPENLPAPTDKCKLKYQQCKTEIKEGYKQYSQRNAENTKSNVTHKQSPRNKIDEKCVQDEEANTDDLTTLDRKAILQQGYADNSCDKQQRARKLDAEIVAAEKKKQIVAEQVMIDHLSRAVISDPEQNLAIEQKESDHILPDSKMTPLRFRKRTLHETKIRTHSTLTENVLSHKLQFDGRIVSRTNVLPFIQKSIYSHQCGRRKGKQYRLGDFYVGATLTFLSSDHLSLPESIKENTLLKLRITNIDQIALDSLKTASMEQEDDIIIQETNDRLVFKAIQDVLKEKLHKRGVRILTGLGKYFQQLDKEGNGLLDKADFKQALKVFHLEVSEKDFESAWLILNDNGNGKVDYGEFKRGIIGEMNEYRKSYVRKAFMKLDFNKSGSVPIINIRKCYCAKKHSQVISG

SEQ ID NO: 13076 - protein, 965 aa, Homo sapiens
MASSHSSSPVPQGSSSDVFFKIEVDPSKHIRPVPSLPDVCPKEPTVTDQHRWTVYHSKVNLPAALNDPRLAKRESDFFTKTWGLDFVDTEVIPSFYLPQISKEHFTVYQQEISQREKIHERCKNICPPKDTFERTLLHTHDKSRTDLEQVPKIFMKPDFALDDSLTFNSVLPWSHFNTAGGKGNRDAASSKLLQEKLSHYLDIVEVNIAHQISLRSEAFFHAMTSQHELQDYLRKTSQAVKMLRDKIAQIDKVMCEGSLHILRLALTRNNCVKVYNKLKLMATVHQTQPTVQVLLSTSEFVGALDLIATTQEVLQQELQGIHSFRHLGSQLCELEKLIDKMMIAEFSTYSHSDLNRPLEDDCQVLEEERLISLVFGLLKQRKLNFLEIYGEKMVITAKNIIKQCVINKVSQTEEIDTDVVVKLADQMRMLNFPQWFDLLKDIFSKFTIFLQRVKATLNIIHSVVLSVLDKNQRTRELEEISQQKNAAKDNSLDTEVAYLIHEGMFISDAFGEGELTPIAVDTTSQRNASPNSEPCSSDSVSEPECTTDSSSSKEHTSSSAIPGGVDIMVSEDMKLTDSELGKLANNIQELLYSASDICHDRAVKFLMSRAKDGFLEKLNSMEFITLSRLMETFILDTEQICGRKSTSLLGALQSQAIKFVNRFHEERKTKLSLLLDNERWKQADVPAEFQDLVDSLSDGKIALPEKKSGATEERKPAEVLIVEGQQYAVVGTVLLLIRIILEYCQCVDNIPSVTTDMLTRLSDLLKYFNSRSCQLVLGAGALQVVGLKTITTKNLALSSRCLQLIVHYIPVIRAHFEARLPPKQYSMLRHFDHITKDYHDHIAEISAKLVAIMDSLFDKLLSKYEVKAPVPSACFRNICKQMTKMHEAIFDLLPEEQTQMLFLRINASYKLHLKKQLSHLNVINDGGPQNGLVTADVAFYTGNLQALKGLKDLDLNMAEIWEQKR

SEQ ID NO: 13077 - protein, 716 aa, Homo sapiens
MARYQAAVSRGDCRSFSANMMEESEMCAVPGGLAKVKKQFEDEITSSRNTFAQYQYQHQNRSEQEAIHSSQVGTSRSSQEMARNEQEGSKVQKIDVHGTEMVSHLEKHTEEVNQASQFHQYVQETVIDTPEDEEIPKVSTKLLKEQFEKSAQEKILYSDKEMTTPAKQIKKLLLQDKEICILCQKTVYPMECLVADKQNFHKSCFRCHHCNSKLSLGNYASLHGQIYCKPHFKQLFKSKGNYDEGFGHKQHKDRWNCKNQSRSVDFIPNEEPNMCKNIAENTLVPGDRNEHLDAGNSEGQRNDLRKLGERGKLKVIWPPSKEIPKKTLPFEEELKMSKPKWPPEMTTLLSPEFKSESLLEDVRTPENKGQRQDHFPFLQPYLQSTHVCQKEDVIGIKEMKMPEGRKDEKKEGRKNVQDRPSEAEDTKSNRKSAMDLNDNNNVIVQSAEKEKNEKTNQTNGAEVLQVTNTDDEMMPENHKENLNKNNNNNYVAVSYLNNCRQKTSILEFLDLLPLSSEANDTANEYEIEKLENTSRISELLGIFESEKTYSRNVLAMALKKQTDRAAAGSPVQPAPKPSLSRGLMVKGGSSIISPDTNLLNIKGSHSKSKNLHFFFSNTVKITAFSKKNENIFNCDLIDSVDQIKNMPCLDLREFGKDVKPWHVETTEAARNNENTGFDALSHECTAKPLFPRVEVQSEQLTVEEQIKRNRCYSDTE

SEQ ID NO: 13078 - protein, 303 aa, Homo sapiens
MGAFLDKPKTEKHNAHGAGNGLRYGLSSMQGWRVEMEDAHTAVVGIPHGLEDWSFFAVYDGHAGSRVANYCSTHLLEHITTNEDFRAAGKSGSALELSVENVKNGIRTGFLKIDEYMRNFSDLRNGMDRSGSTAVGVMISPKHIYFINCGDSRAVLYRNGQVCFSTQDHKPCNPREKERIQNAGGSVMIQRVNGSLAVSRALGDYDYKCVDGKGPTEQLVSPEPEVSDEAVKKDSELDKHLESRVEEIMEKSGEEGMPDLAHVMRILSAENIPNLPPGGGLAGKRNVIEAVYSRLNPHRESDG

SEQ ID NO: 13079 - protein, 1015 aa, Homo sapiens
MVQPIIHLGYVVYSLLYLGYKPVQHVTALNTVSSCHKMVSMDLNSASTVVLQVLTQATSQDTAVLKPAEEQLKQWETQPGFYSVLLNIFTNHTLDINVRWLAVLYFKHGIDRYWRRVAPHALSEEEKTTLRAGLITNFNEPINQIATQIAVLIAKVARLDCPRQWPELIPTLIESVKVQDDLRQHRALLTFYHVTKTLASKRLAADRKLFYDLASGIYNFACSLWNHHTDTFLQEVSSGNEAAILSSLERTLLSLKVLRKLTVNGFVEPHKNMEVMGFLHGIFERLKQFLECSRSIGTDNVCRDRLEKTIILFTKVLLDFLDQHPFSFTPLIQRSLEFSVSYVFTEVGEGVTFERFIVQCMNLIKMIVKNYAYKPSKNFEDSSPETLEAHKIKMAFFTYPTLTEICRRLVSHYFLLTEEELTMWEEDPEGFTVEETGGDSWKYSLRPCTEVLFIDIFHEYNQTLTPVLLEMMQTLQGPTNVEDMNALLIKDAVYNAVGLAAYELFDSVDFDQWFKNQLLPELQVIHNRYKPLRRRVIWLIGQWISVKFKSDLRPMLYEAICNLLQDQDLVVRIETATTLKLTVDDFEFRTDQFLPYLETMFTLLFQLLQQVTECDTKMHVLHVLSCVIERVNMQIRPYVGCLVQYLPLLWKQSEEHNMLRCAILTTLIHLVQGLGADSKNLYPFLLPVIQLSTDVSQPPHVYLLEDGLELWLVTLENSPCITPELLRIFQNMSPLLELSSENLRTCFKIINGYIFLSSTEFLQTYAVGLCQSFCELLKEITTEGQVQVLKVVENALKVNPILGPQMFQPILPYVFKGIIEGERYPVVMSTYLGVMGRVLLQNTSFFSSLLNEMAHKFNQEMDQLLGNMIEMWVDRMDNITQPERRKLSALALLSLLPSDNSVIQDKFCGIINISVEGLHDVMTEDPETGTYKDCMLMSHLEEPKVTEDEEPPTEQDKRKKMLALKDPVHTVSLQQFIYEKLKAQQEMLGEQGFQSLMETVDTEIVTQLQEFLQGF

SEQ ID NO: 13080 - protein, 553 aa, Homo sapiens
MPCVQAQYGSSPQGASPASQSYSYHSSGEYSSDFLTPEFVKFSMDLTNTEITATTSLPSFSTFMDNYSTGYDVKPPCLYQMPLSGQQSSIKVEDIQMHNYQQHSHLPPQSEEMMPHSGSVYYKPSSPPTPTTPGFQVQHSPMWDDPGSLHNFHQNYVATTHMIEQRKTPVSRLSLFSFKQSPPGTPVSSCQMRFDGPLHVPMNPEPAGSHHVVDGQTFAVPNPIRKPASMGFPGLQIGHASQLLDTQVPSPPSRGSPSNEGLCAVCGDNAACQHYGVRTCEGCKGFFKRTVQKNAKYVCLANKNCPVDKRRRNRCQYCRFQKCLAVGMVKEVVRTDSLKGRRGRLPSKPKSPQEPSPPSPPVSLISALVRAHVDSNPAMTSLDYSRFQANPDYQMSGDDTQHIQQFYDLLTGSMEIIRGWAEKIPGFADLPKADQDLLFESAFLELFVLRLAYRSNPVEEYEHRHFCLLLHCCPGYGHRETRAQGTQESGRTAKQDCKLSQRPRDFQQWGVEPPQLFVQTVGEAPRTSYPLHTGATAHFLPEIGRLGATASNN

SEQ ID NO: 13081 - protein, 916 aa, Homo sapiens
MMLIQKAKSRCTELEKEIEELRSKPVTEGTGDIIKALTERLDALLLEKAETEQQCLSLKKENIKMKQEVEDSVTKMGDAHKELEQSHINYVKEIENLKNELMAVRSKYSEDKANLQKQLEEAMNTQLELSEQLKFQNNSEDNVKKLQEEIEKIRPGFEEQILYLQKQLDATTDEKKETVTQLQNIIEANSQHYQKNINSLQEELLQLKAIHQEEVKELMCQIEASAKEHEAEINKLNELKENLVKQCEASEKNIQKKYECELENLRKATSNANQDNQICSILLQENTFVEQVVNEKVKHLEDTLKELESQHSILKDEVTYMNNLKLKLEMDAQHIKDEFFHEREDLEFKINELLLAKEEQGCVIEKLKSELAGLNKQFCYTVEQHNREVQSLKEQHQKEISELNETFLSDSEKEKLTLMFEIQGLKEQCENLQQEKQEAILNYESLREIMEILQTELGESAGKISQEFESMKQQQASDVHELQQKLRTAFTEKDALLETVNRLQGENEKLLSQQELVPELENTIKNLQEKNGVYLLSLSQRDTMLKELEGKINSLTEEKDDFINKLKNSHEEMDNFHKKCEREERLILELGKKVEQTIQYNSELEQKVNELTGGLEETLKEKDQNDQKLEKLMVQMKVLSEDKEVLSAEVKSLYEENNKLSSEKKQLSRDLEVFLSQKEDVILKEHITQLEKKLQLMVEEQDNLNKLLENEQVQKLFVKTQLYGFLKEMGSEVSEDSEEKDVVNVLQAVGESLAKINEEKCNLAFQRDEKVLELEKEIKCLQEESVVQCEELKSLLRDYEQEKVLLRKELEEIQSEKEALQSDLLEMKNANEKTRLENQNLLIQVEEVSQTCSKSEIHNEKEKCFIKEHENLKPLLEQKELRDRRAELILLKDSLAKSPSVKNDPLSSVKELEEKI

SEQ ID NO: 13082 - protein, 445 aa, Homo sapiens
MMFTEDQGVDDRLLYDIVFKHFKRNKVEISNAIKKTFPFLEGLRDRDLITNKMFEDSQDSCRNLVPVQRVVYNVLSELEKTFNLPVLEALFSDVNMQEYPDLIHIYKGFENVIHDKLPLQESEEEEREERSGLQLSLEQGTGENSFRSLTWPPSGSPSHAGTTPPENGLSEHPCETEQINAKRKDTTSDKDDSLGSQQTNEQCAQKAEPTESCEQIAVQVNNGDAGREMPCPLPCDEESPEAELHNHGIQINSCSVRLVDIKKEKPFSNSKVECQAQARTHHNQASDIIVISSEDSEGSTDVDEPLEVFISAPRSEPVINNDNPLESNDEKEGQEATCSRPQIVPEPMDFRKLSTFRESFKKRVIGQDHDFSESSEEEAPAEASSGALRSKHGEKAPMTSRSTSTWRIPSRKRRFSSSDFSDLSNGEELQETCSSSLRRGSGKED

SEQ ID NO: 13083 - protein, 144 aa, Homo sapiens
MLGGTDCRTFLTSHINLKKTLCDVILMVQERKIPAHRVVLAAASHFFNLMFTTNMLESKSFEVELKDAEPDIIEQLVEFAYTARISVNSNNVQSLLDAANQYQIEPVKKMCVDFLKEQVDASNCLGEAEKVDQSLPECGMLFTV

SEQ ID NO: 13084 - protein, 393 aa, Homo sapiens
MVPSSPRALFLLLLILACPEPRASQNCLSKQQLLSAIRQLQQLLKGQETRFAEGIRHMKSRLAALQNSVGRVGPDALPVSCPALNTPADGRKFGSKYLVDHEVHFTCNPGFRLVGPSSVVCLPNGTWTGEQPHCRGISECSSQPCQNGGTCVEGVNQYRCICPPGRTGNRCQHQAQTDVNECELYGQEGRPRLCMHACVNTPGSYRCTCPGGYRTLADGKSCEDVDECVGLQPVCPQGTTCINTGGSFQCVSPECPEGSGNVSYVKTSPFQCERNPCPMDSRPCRHLPKTISFHYLSLPSNLKTPITLFRMATASAPGRAGPNSLRFGIVGGNSRGHFVMQRSDRQTGDLILVQNLEGPQTLEVDVDMSEYLDRSFQANHVSKVTIFVSPYDF

SEQ ID NO: 13085 - protein, 908 aa, Homo sapiens
MKSSVAQIKPSSGHDRRENLNSYQRNSSPEDRYEEQERSPRDRDYFDYSRSDYEHSRRGRSYDSSMESRNRDREKRRERERDTDRKRSRKSPSPGRRNPETSVTQSSSAQDEPATKKKKDELDPLLTRTGGAYIPPAKLRMMQEQITDKNSLAYQRMSWEALKKSINGLINKVNISNISIIIQELLQENIVRGRGLLSRSVLQAQSASPIFTHVYAALVAIINSKFPQIGELILKRLILNFRKGYRRNDKQLCLTASKFVAHLINQNVAHEVLCLEMLTLLLERPTDDSVEVAIGFLKECGLKLTQVSPRGINAIFERLRNILHESEIDKRVQYMIEVMFAVRKDGFKDHPIILEGLDLVEEDDQFTHMLPLEDDYNPEDVLNVFKMDPNFMENEEKYKAIKKEILDEGDTDSNTDQDAGSSEEDEEEEEEEGEEDEEGQKVTIHDKTEINLVSFRRTIYLAIQSSLDFEECAHKLLKMEFPESQTKELCNMILDCCAQQRTYEKFFGLLAGRFCMLKKEYMESFEGIFKEQYDTIHRLETNKLRNVAKMFAHLLYTDSLPWSVLECIKLSEETTTSSSRIFVKIFFQELCEYMGLPKLNARLKDETLQPFFEGLLPRDNPRNTRFAINFFTSIGLGGLTDELREHLKNTPKVIVAQKPDVEQNKSSPSSSSSASSSSESDSSDSDSDSSDSSSESSSEESDSSSISSHSSASANDVRKKGHGKTRSKEVDKLIRNQQTNDRKQKERRQEHGHQETRTERERRSEKHRDQNSSGSNWRDPITKYTSDKDVPSERNNYSRVANDRDQEMHIDLENKHGDPKKKRGERRNSFSENEKHTHRIKDSENFRRKDRSKSKEMNRKHSGSRSDEDRYQNGAERRWEKSSRYSEQSRESKKNQDRRREKSPAKQK

SEQ ID NO: 13086 - protein, 1156 aa, Homo sapiens
MEKRETFVQAVSKELVGEFLQFVQLDKEASDPFSLNELLDELSRKQKEELWQRLKNLLTDVLLESPVDGWQVVEAQGEDNMETEHGSKMRKSIEIIYAITSVILASVSVINESENYEALLECVIILNGILYALPESERKLQSSIQDLCVTWWEKGLPAKEDTGKTAFVMLLRRSLETKTGADVCRLWRIHQALYCFDYDLEESGEIKDMLLECFININYIKKEEGRRFLSCLFNWNINFIKMIHGTIKNQLQGLQKSLMVYIAEIYFRAWKKASGKILEAIENDCIQDFMFHGIHLPRRSPVHSKVREVLSYFHHQKKVRQGVEEMLYRLYKPILWRGLKARNSEVRSNAALLFVEAFPIRDPNLHAIEMDSEIQKQFEELYSLLEDPYPMVRSTGILGVCKITSKYWEMMPPTILIDLLKKVTGELAFDTSSADVRCSVFKCLPMILDNKLSHPLLEQLLPALRYSLHDNSEKVRVAFVDMLLKIKAVRAAKFWKICPMEHILVRLETDSRPVSRRLVSLIFNSFLPVNQPEEVWCERCVTLVQMNHAAARRFYQYAHEHTACTNIAKLIHVIRHCLNACIQRAVREPPEDEEEEDGREKENVTVLDKTLSVNDVACMAGLLEIIVILWKSIDRSMENNKEAKLYTINKFASVLPEYLKVFKDDRCKIPLFMLMSFMPASAVPPFSCGVISTLRSREEGAVDKSYCTLLDCLCSWGQVGHILELVDNWLPTEHAQAKSNTASKGRVQIHDTRPVKPELALVYIEYLLTHPKNRECLLSAPRKKLNHLLKALETSKADLESLLQTPGGKPRGFSEAAAPRAFGLHCRLSIHLQHKFCSEGKVYLSMLEDTGFWLESKILSFIQDQEEDYLKLHRVIYQQIIQTYLTVCKDVVMVGLGDHQFQMQLLQRSLGIMQTVKGFFYVSLLLDILKEITGSSLIQKTDSDEEVAMLLDTVQKVFQKMLECIARSFRKQPEEGLRLLYSVQRPLHEFITAVQSRHTDTPVHRGVLSTLIAGPVVEISHQLRKVSDVEELTPPEHLSDLPPFSRCLIGIIIKSSNVVRSFLDELKACVASNDIEGIVCLTAAVHIILVINAGKHKSSKVREVAATVHRKLKTFMEITLEEDSIERYEDLLCCPGWALTPGLLDSIYPSASVPIG

SEQ ID NO: 13087 - protein, 312 aa, Homo sapiens
MSGAGVAAGTRPPSSPTPGSRRRRQRPSVGVQSLRPQSPQLRQSDPQKRNLDLEKSLQFLQQQHSEMLAKLHEEIEHLKRENKDLHYKLIMNQTSQKKDSLSMSSFQSVKSISNSGKARPQPGSFNKQDSKADVSQKADLEEEPLLHNSKLDKVPGVQGQARKEKAEASNAGAACMGNSQHQGRQMGAGAHPPMILPLPLRKPTTLRQCEVLIRELWNTNLLQTQELRHLKSLLEGSQRPQAAPEEASFPRDQEATHFPKVSTKSLSKKCLSPPVAERAILPALKQTPKNNFAERQKRLQAMQKRRLHRSVL

SEQ ID NO: 13088 - protein, 1100 aa, Homo sapiens
MRMSDTVTVKDETATMKDLEAEVKDTTRVENLIKSENYGKILVEKNEHCIENNIDLQRPLQSFGQTGKRSKSSSKLKLVRSLAVCEESPPPPAPEISQENQEKIQIQLTQSFEKEEKPSKDEAEKEKASDKLPRKMLSRDSSQEYTDSTGIDLHEFLVNTLKNNPRDRMMLLKLEQEILDFIGNNESPRKKFPPMTSYHRMLLHRVAAYFGLDHNVDQSGKSVIVNKTSNTRIPDQKFNEHIKDDKGEDFQKRYILKRDNSSFDKDDNQMRIRLKDDRRSKSIEEREEEYQRARDRIFSQDSLCSQENYIIDKRLQDEDASSTQQRRQIFRVNKDASGRSTNSHQSSTENELKYSEPRPWSSTDSDSSLRNLKPAVTKASSFSGISVLTRGDSSGSSKSIGRLSKTGSESSGSVGSSTGSLSHIQQPLPGTALSQSSHGAPVVYPTVSTHSSLSFDGGLNGQVASPSTSFFLLPLEAAGIPPGSILINPQTGQPFINPDGSPVVYNPPMTQQPVRSQVPGPPQPPLPAPPQQPAANHIFSQQDNLGSQFSHMSLARQPSADGSDPHAAMFQSTVVLQSPQQSGYIMTAAPPPHPPPPPPPPPPPPPLPPGQPVPTAGYPASGHPVSQPVLQQQGYIQQPSPQMPACYCAPGHYHSSQPQYRPVPSVHYNSHLNQPLPQPAQQTGYQVIPNQQQNYQGIVGVQQPQSQSLVSGQPNSIGNQIQGVVIPYTSVPTYQVSLPQGSQGIPHQTYQQPVMFPNQSNQGSMPTTGMPVYYSVIPPGQQNNLSSSVGYLQHPGSEQVQFPRTTSPCSSQQLQGHQCTAGPPPPPGGGMVMMQLSVPNNPQSCAHSPPQWKQNKYYCDHQRGQKCVEFSSVDNIVQHSPQLSSPIISPAQSPAPAQLSTLKTVRPSGPPLSIMPQFSRPFVPGQGDSRYPLLGQPLQYNPPAVLHGHIPNQQGQPGSRHGNRGRRQAKKAASTDLGAGETVVGKVLEITELPDGITRMEAEKLFGELFKIGAKIRWLRDPQSQPRRHPLCCGSGDNTANPERSKPSDLASTYTVLATFPSISAAQNALKKQINSVNKFKLRTSKKHYDFHILERASSQ

SEQ ID NO: 13089 - protein, 420 aa, Homo sapiens
MVSKALLRLVSAVNRRRMKLLLGIALLAYVASVWGNFVNMRSIQENGELKIESKIEEMVEPLREKIRDLEKSFTQKYPPVKFLSEKDRKRILITGGAGFVGSHLTDKLMMDGHEVTVVDNFFTGRKRNVEHWIGHENFELINHDVVEPLYIEVDQIYHLASPASPPNYMYNPIKTLKTNTIGTLNMLGLAKRVGARLLLASTSEVYGDPEVHPQSEDYWGHVNPIGPRACYDEGKRVAETMCYAYMKQEGVEVRVARIFNTFGPRMHMNDGRVVSNFILQALQGEPLTVYGSGSQTRAFQYVSDLVNGLVALMNSNVSSPVNLGNPEEHTILEFAQLIKNLVGSGSEIQFLSEAQDDPQKRKPDIKKAKLMLGWEPVVPLEEGLNKAIHYFRKELEYQANNQYIPKPKPARIKKGRTRHS

SEQ ID NO: 13090 - protein, 285 aa, Homo sapiens
MLSSCVRPVPTTVRFVDSLICNSSRSFMDLKALLSSLNDFASLSFAESWDNVGLLVEPSPPHTVNTLFLTNDLTEEVMEEVLQKKADLILSYHPPIFRPMKRITWNTWKERLVIRALENRVGIYSPHTAYDAAPQGVNNWLAKGLGACTSRPIHPSKAPNYPTEGNHRVEFNVNYTQDLDKVMSAVKGIDGVSVTSFSARTGNEEQTRINLNCTQKALMQVVDFLSRNKQLYQKTEILSLEKSLKSKSWPCVLVLGAAFCRVLRLTFTSQVRCPIMILWMLLPKE

SEQ ID NO: 13091 - protein, 395 aa, Homo sapiens
MHPDSPNTGAHWMRQEISFGKLKLTNNKGASNNNGQMVVLQSLHKYQPRLHVVEVNEDGTEDTSQPGRVQTFTFPETQFIAVTAYQNTDITQLKIDHNPFAKGFRDNYDTIYTGCDMDRLTPSPNDSPRSQIVPGARYAMAGSFLQDQFVSNYAKARFHPGAGAGPGPGTDRSVPHTNGLLSPQQAEDPGAPSPQRWFVTPANNRLDFAASAYDTATDFAGNAATLLSYAAAGVKALPLQAAGCTGRPLGYYADPSGWGARSPPQYCGTKSGSVLPCWPNSAAAAARMAGANPYLGEEAEGLAAERSPLPPGAAEDAKPKDLSDSSWIETPSSIKSIDSSDSGIYEQAKRRRISPADTPVSESSSPLKSEVLAQRDCEKNCAKDISGYYGFYSHS

SEQ ID NO: 13092 - protein, 159 aa, Homo sapiens
MTQPTRPSVTCDQGSSTIGGTAAQATTSSSATSGSNYQRDRLGRRPEIGVGGQPQICFPRPRSAQQPVLFSLMNSSEAAMKKTLPKSHLSRVIIHDNRITQRIYEMEVSALEKTKKKISHYYEHLKKKFMTEQLRKLGRWREESVNSNRYLTFGIPPPV

SEQ ID NO: 13093 - protein, 767 aa, Homo sapiens
MNIMNTEQSQNSIVSRIKVFEGQTNIETSGLPKKPEITPRSLPPKPTVSSGKPSVAPKPAANRASGEWDSGTENRLKVTSKEGLTPYPPLQEAGSIPVTKPELPKKPNPGLIRSVNPEIPGRGPLAESSDSGKKVPTPAPRPLLLKKSVSSENPTYPSAPLKPVTVPPRLAGASQAKAYKSLGEGPPANPPVPVLQSKPLVDIDLISFDDDVLPTPSGNLAEESVGSEMVLDPFQLPAKTEPIKERAVQPAPTRKPTVIRIPAKPGKCLHEDPQSPPPLPAEKPIGNTFSTVSGKLSNVERTRNLESNHPGQTGGFVRVPPRLPPRPVNGKTIPTQQPPTKVPPERPPPPKLSATRRSNKKLPFNRSSSDMDLQKKQSNLATGLSKAKSQVFKNQDPVLPPRPKPGHPLYSKYMRGDVLVMLKQTENNYLECQKGEDTGRVHLSQMKIITPLDEHLRSRPNDPSHAQKPVDSGAPHAVVLHDFPAEQVDDLNLTSGEIVYLLEKIDTDWYRGNCRNQIGIFPANYVKVIIDIPEGGNGKRECVSSHCVKGSRCVARFEYIGEQKDELSFSEGEIIILKEYVNEEWARGEVRGRTGIFPLNFVEPVEDYPTSGANVLSTKVPLKTKKEDSGSNSQVNSLPAEWCEALHSFTAETSDDLSFKRGDRIQILERLDSDWCRGRLQDREGIFPAVFVRPCPAEAKSMLAIVPKGRKAKALYDFRGENEDELSFKAGDIITELESVDDDWMSGELMGKSGIFPKNYIQFLQIS

SEQ ID NO: 13094 - protein, 535 aa, Homo sapiens
MGSSATEIEELENTTFKYLTGEQTEKMWQRLKGILRCLVKQLERGDVNVVDLKKNIEYAASVLEAVYIDETRRLLDTEDELSDIQTDSVPSEVRDWLASTFTRKMGMTKKKPEEKPKFRSIVHAVQAGIFVERMYRKTYHMVGLAYPAAVIVTLKDVDKWSFDVFALNEASGEHSLKFMIYELFTRYDLINRFKIPVSCLITFAEALEVGYSKYKNPYHNLIHAADVTQTVHYIMLHTGIMHWLTELEILAMVFAAAIHDYEHTGTTNNFHIQTRSDVAILYNDRSVLENHHVSAAYRLMQEEEMNILINLSKDDWRDLRNLVIEMVLSTDMSGHFQQIKNIRNSLQQPEGIDRAKTMSLILHAADISHPAKSWKLHYRWTMALMEEFFLQGDKEAELGLPFSPLCDRKSTMVAQSQIGFIDFIVEPTFSLLTDSTEKIVIPLIEEASKAETSSYVASSSTTIVGLHIADALRRSNTKGSMSDGSYSPDYSLAAVDLKSFKNNLVDIIQQNKERWKELAAQEARTSSQKCEFIHQ

SEQ ID NO: 13095 - protein, 746 aa, Homo sapiens
MSVILLTPDELTNSSETRLSLEDLFRKDFVLHDPEARWINDTDVVYKSENGHVIKLNIETNATTLLLENTTFVTFKASRHSVSPDLKYVLLAYDVKQIFHYSYTASYVIYNIHTREVWELNPPEVEDSVLQYAAWGVQGQQLIYIFENNIYYQPDIKSSSLRLTSSGKEEIIFNGIADWLYEEELLHSHIAHWWSPDGERLAFLMINDSLVPTMVIPRFTGALYPKGKQYPYPKAGQVNPTIKLYVVNLYGPTHTLELMPPDSFKSREYYITMVKWVSNTKTVVRWLNRAQNISILTVCETTTGACSKKYEMTSDTWLSQQNEEPVFSRDGSKFFMTVPVKQGGRGEFHHVAMFLIQSKSEQITVRHLTSGNWEVIKILAYDETTQKIYFLSTESSPRGRQLYSASTEGLLNRQCISCNFMKEQCTYFDASFSPMNQHFLLFCEGPRVPVVSLHSTDNPAKYFILESNSMLKEAILKKKIGKPEIKILHIDDYELPLQLSLPKDFMDRNQYALLLIMDEEPGGQLVTDKFHIDWDSVLIDMDNVIVARFDGRGSGFQGLKILQEIHRRLGSVEVKDQITAVKFLLKLPYIDSKRLSIFGKGYGGYIASMILKSDEKLFKCGSVVAPITDLKLYASAFSERYLGMPSKEESTYQAASVLHNVHGLKEENILIIHGTADTKVHFQHSAELIKHLIKAGVNYTMQVYPDEGHNVSEKSKYHLYSTILKFFSDCLKEEISVLPQEPEEDE

SEQ ID NO: 13096 - protein, 4557 aa, Homo sapiens
MDIIMGHCVGTRPPACCLILLLFKLLATVSQGLPGTGPLGFHFTHSIYNATVYENSAARTYVNSQSRMGITLIDLSWDIKYRIVSGDEEGFFKAEEVIIADFCFLRIRTKGGNSAILNREIQDNYLLIVKGSVRGEDLEAWTKVNIQVLDMNDLRPLFSPTTYSVTIAESTPLRTSVAQVTATDADIGSNGEFYYYFKNKVDLFSVHPTSGVISLSGRLNYDEKNRYDLEILAVDRGMKLYGNNGVSSTAKLYVHIERINEHAPTIHVVTHVPFSLEKEPTYAVVTVDDLDDGANGEIESVSIVAGDPLDQFFLAKEGKWLNEYKIKERKQIDWESFPYGYNLTLQAKDKGSPQKCSALKAVYIGNPTRDTVPIRFEKEVYDVSISEFSPPGVVVAIVKLSPEPIDVEYKLSPGEDAVYFKINPRSGLIVTARPLNTVKKEVYKLEVTNKEGDLKAQVTISIEDANDHTPEFQQPLYDAYVNESVPVGTSVLTVSASDKDKGENGYITYSIASLNLLPFVINQFTGVISTTEELDFESSPEIYRFIVRASDWGSPYRHESEVNVTIRIGNVNDNSPLFEKVACQGVISYDFPVGGHITAVSAIDIDELELVKYKIISGNELGFFYLNPDSGVLQLKKSLTNSGIKNGNFALRITATDGENLADPMSINISVLHGKVSSKSFSCRETRVAQKLAEKLLIKAKANGKLNLEDGFLDFYSINRQGPYFDKSFPSDVAVKEDLPVGANILKIKAYDADSGFNGKVLFTISDGNTDSCFNIDMETGQLKVLMPMDREHTDLYLLNITIYDLGNPQKSSWRLLTINVEDANDNSPVFIQDSYSVNILESSGIGTEIIQVEARDKDLGSNGEVTYSVLTDTQQFAINSSTGIVYVADQLDRESKANYSLKIEARDKAESGQQLFSVVTLKVFLDDVNDCSPAFIPSSYSVKVLEDLPVGTVIAWLETHDPDLGLGGQVRYSLVNDYNGRFEIDKASGAIRLSKELDYEKQQFYNLTVRAKDKGRPVSLSSVSFVEVEVVDVNENLHTPYFPDFAVVGSVKENSRIGTSVLQVTARDEDSGRDGEIQYSIRDGSGLGRFSIDDESGVITAADILDRETMGSYWLTVYATDRGVVPLYSTIEVYIEVEDVNDNAPLTSEPIYYPVVMENSPKDVSVIQIQAEDPDSSSNEKLTYRITSGNPQNFFAINIKTGLITTTSRKLDREQQAEHFLEVTVTDGGPSPKQSTIWVVVQVLDENDNKPQFPEKVYQIKLPERDRKKRGEPIYRAFAFDRDEGPNAEISYSIVDGNDDGKFFIDPKTGMVSSRKQFTAGSYDILTIKAVDNGRPQKSSTARLHIEWIKKPPPSPIPLTFDEPFYNFTVMESDRVTEIVGVVSVQPANTPLWFDIVGGNFDSAFDAEKGVGTIVIAKPLDAEQRSIYNMSVEVTDGTNVAVTQVFIKVLDNNDNGPEFSQPNYDVTISEDVLPDTEILQIEATDRDEKHKLSYTVHSSIDSISMRKFRIDPSTGVLYTAERLDHEAQDKHILNIMVRDQEFPYRRNLARVIVNVEDANDHSPYFTNPLYEASVFESAALGSAVLQVTALDKDKGENAELIYTIEAGNTGNMFKIEPVLGIITICKEPDMTTMGQFVLSIKVTDQGSPPMSATAIVRISVTMSDNSHPKFIHKDYQAEVNENVDIGTSVILISAISQSTLIYEVKDGDINGIFTINPYSGVITTQKALDYERTSSYQLIIQATNMAGMASNATVNIQIVDENDNAPVFLFSQYSGSLSEAAPINSIVRSLDNSPLVIRATDADSNRNALLVYQIVESTAKKFFTVDSSTGAIRTIANLDHETIAHFHFHVHVRDSGSPQLTAESPVEVNIEVTDVNDNPPVFTQAVFETILLLPTYVGVEVLKVSATDPDSEVPPELTYSLMEGSLDHFLIDSNSGVLTIKNNNLSKDHYMLIVKVSDGKFYSTSMVTIMVKEAMDSGLHFTQSFYSTSISENNTNITKVAIVNAVGNRLNEPLKYSILNPGNKFKIKSTSGVIQTTGVPFDREEQELYELVVEASRELDHLRVARVVVRVNIEDINDNSPVFVGLPYYAAVQVDAEPGTLIYQVTAIDKDKGPNGEVTYVLQDDYGHFEINPNSGNVILKEAFNSDLSNIEYGVTILAKDGGKPSLSTSVELPITIVNKAMPVFDKPFYTASVNEDIRMNTPILSINATSPEGQGIIYIIIDGDPFKQFNIDFDTGVLKVVSPLDYEVTSAYKLTIRASDALTGARAEVTVDLLVNDVNDNPPIFDQPTYNTTLSEASLIGTPVLQVVSIDADSENNKMVHYQIVQDTYNSTDYFHIDSSSGLILTARMLDHELVQHCTLKVRSIDSGFPSLSSEVLVHIYISDVNDNPPVFNQLIYESYVSELAPRGHFVTCVQASDADSSDFDRLEYSILSGNDRTSFLMDSKSGVITLSNHRKQRMEPLYSLNVSVSDGLFTSTAQVHIRVLGANLYSPAFSQSTYVAEVRENVAAGTKVIHVRATDGDPGTYGQISYAIINDFAKDRFLIDSNGQVITTERLDRENPLEGDVSIFVRALDGGGRTTFCTVRVIVVDENDNAPQFMTVEYRASVRADVGRGHLVTQVQAIDPDDGANSRITYSLYSEASVSVADLLEIDPDNGWMVTKGNFNQLKNTVLSFFVKAVDGGIPVKHSLIPVYIHVLPPETFLPSFTQSQYSFTIAEDTAIGSTVDTLRILPSQNVWFSTVNGERPENNKGGIFVIEQETGTIKLDKRLDRETSPAFHFKVAATIPLDKVDIVFTVDVDIKVLDLNDNKPVFETSSYDTIIMEGMPVGTKLTQVRAIDMDWGANGQVTYSLHSDSQPEKVMEAFNIDSNTGWISTLKDLDHETDPTFTFSVVASDLGEAFSLSSTALVSVRVTDINDNAPVFAQEVYRGNVKESDPPGEVVAVLSTWDRDTSDVNRQVSYHITGGNPRGRFALGLVQSEWKVYVKRPLDREEQDIYFLNITATDGLFVTQAMVEVSVSDVNDNSPVCDQVAYTALLPEDIPSNKIILKVSAKDADIGSNGYIRYSLYGSGNSEFFLDPESGELKTLALLDRERIPVYSLMAKATDGGGRFCQSNIHLILEDVNDNPPVFSSDHYNTCVYENTATKALLTRVQAVDPDIGINRKVVYSLADSAGGVFSIDSSSGIIILEQPLDREQQSSYNISVRATDQSPGQSLSSLTTVTITVLDINDNPPVFERRDYLVTVPEDTSPGTQVLAVFATSKDIGTNAEITYLIRSGNEQGKFKINPKTGGISVSEVLDYELCKRFYLVVEAKDGGTPALSAVATVNINLTDVNDNPPKFSQDVYSAVISEDALVGDSVILLIAEDVDSQPNGQIHFSIVNGDRDNEFTVDPVLGLVKVKKKLDRERVSGYSLLVQAVDSGIPAMSSTATVNIDISDVNDNSPVFTPANYTAVIQENKPVGTSILQLVVTDRDSFHNGPPFSFSILSGNEEEEFVLDPHGILRSAVVFQHTESLEYVLCVQAKDSGKPQQVSHTYIRVRVIEESTHKPTAIPLEIFIVTMEDDFPGGVIGKIHATDQDMYDVLTFALKSEQKSLFKVNSHDGKIIALGGLDSGKYVLNVSVSDGRFQVPIDVVVHVEQLVHEMLQNTVTIRFENVSPEDFVGLHMHGFRRTLRNAVLTQKQDSLRIISIQPVAGTNQLDMLFAVEMHSSEFYKPAYLIQKLSNARRHLENIMRISAILEKNCSGLDCQEQHCEQGLSLDSHALMTYSTARISFVCPRFYRNVRCTCNGGLCPGSNDPCVEKPCPGDMQCVSYEASRRPFLCQCPPGKLGECSGHTSLSFAGNSYIKYRLSENSKEEDFKLALRLRTLQSNGIIMYTRANPCIILKIVDGKLWFQLDCGSGPGILGISGRAVNDGSWHSVFLELNRNFTSLSLDDSYVERRRAPLYFQTLSTESSIYFGALVQADNIRSLTDTRVTQVLSGFQGCLDSVILNNNELPLQNKRSSFAEVVGLTELKLGCVLYPDACKRSPCQHGGSCTGLPSGGYQCTCLSQFTGRNCESEITACFPNPCRNGGSCDPIGNTFICNCKAGLTGVTCEEDINECEREECENGGSCVNVFGSFLCNCTPGYVGQYCGLRPVVVPNIQAGHSYVGKEELIGIAVVLFVIFILVVLFIVFRKKVFRKNYSRNNITLVQDPATAALLNKSNGIPFRNLRGSGDGRNVYQEVGPPQVPVRPMAYTPCFQSDSRSNLDKIVDGLGGEHQEMTTFHPESPRILTARRGVVVCSVAPNLPAVSPCRSDCDSIRKNGWDAGTENKGVDDPGEVTCFAGSNKGSNSEVQSLSSFQSDSGDDNAYHWDTSDWMPGARLSDIEEVPNYENQDGGSAHQGSTRELESDYYLGGYDIDSEYPPPHEEEFLSQDQLPPPLPEDFPDQYEALPPSQPVSLASTLSPDCRRRPQFHPSQYLPPHPFPNETDLVGPPASCEFSTFAVSMNQGTEPTGPADSVSLSLHNSRGTSSSDVSANCGFDDSEVAMSDYESVGELSLASLHIPFVETQHQTQV

SEQ ID NO: 13097 - protein, 646 aa, Homo sapiens
MSKKGRSKGEKPEMETDAVQMANEELRAKLTSIQIEFQQEKSKMDEIKGKDRVILALEKELGVQAGQTQKLLLQKEALDEQLVQVKEAERHHSSPKRELPPGIGDMVELMGVQDQHMDERDVRRFQLKIAELNSVIRKLEDRNTLLADERNELLKRSRETEVQLKPLVEKNKRMNKKNEDLLQSIQRMEEKIKNLTRENVEMKEKLSAQASLKRHTSLNDLSLTRDEQEIEFLRLQVLEQQHVIDDLSLKHVVETFFGFDEESVDSETLSETSYNTDRTDRTPATPEEDLDDATAREEADLRFCQLTREYQALQRAYALLQEQVGGTLDAEREARTREQLQADLLRCQAKIEDLEKLLVEKGQDSKWVEEKQLLIRTNQDLLEKIYRLEMEENQLKNEMQDAKDQNELLEFRVLELEERERRSPAFNLQITTFPENHSSALQLFCHQEGVKDVNVSELMKKLDILGDNGNLRNEEQVAIIQAGTVLALCEKWLKQIEGTEAALTQKMLDLEKEKDLFSRQKGYLEEELDYRKQALDQAYLKIQDLEATLYTALQQEPGRRAGEALSEGQREDLQAAVEKVRRQILRQSREFDSQILRERMELLQQAQQRIRELEDKLEFQKRHLKELEEKFLFLFLFFSLAFILWP

SEQ ID NO: 13098 - protein, 284 aa, Homo sapiens
MTDVPATFTQAECNGDKPPENGQQTITKISEELTDVDSPLPHYRVEPSLEGALTKGSQEERRKLQGNMLLNSSMEDKMLKENPEEKLFIVHKAITDLSLQETSADEMTFREGHQWEKIPLSGSNQEIRRQKERITEQPLKEEEDEDRKNKGHQAAEIEWLGFRKPSQADMLHSKHDEEQKVWDEEIDDDDDDNCNNDEDEVRVIEFKKKHEEVSQFKEEGDASEDSPLSSASSQAVTPDEQPTLGKKSDISRNAYSRYNTISYRKIRKGNTKQRIDEFESMMHL

SEQ ID NO: 13099 - protein, 891 aa, Homo sapiens
MALVENVTTLQKSQDLLEAEGEKKTMIKKIMRQIQEEPLDSLSSSVRKQAMEILTQLSHTQPTLGMRERSELVNVCVHSVFSLPSVQAMQEKDEAKAETIQALYHQTLEALQTLLKALFIEDPTPAGLKSILEALGPWMNSGKAHERARAVNTNVSVLNHMLLTLPFFMPLGFPALGLLLGRLILHIGDPDEEIGCEALDGIIILYTILELQKRARDKEETNKKELYESNKHFLGPYNPVSPCQNILRVIEEFGDFLGPQQIKDLLLAALEGLKGSSEAPGKDSREMMQLASEVMLSSVLEWYRHRALEVIPEIMQGIYMQLSHIQEPRARQVALLPVSLLASSFMTEVVVALLMCPLPLNSNGAEMWRQLILCKPSCDVRDLLDLLLGSLKEKPVTKEGRASIVPLAAASGLCELLSVNSCMGRVRRIYPQLLLALLIQVHYHIGLNLPGCVAPPKDTKKGAQPSPFVPVRWVVKVVKTLLLRMGCSYETTFLEDQGGWELMEQVESHHRGVALLARAMVQYSCQELCRILYLLIPLLERGDEKHRITATAFFVELLQMEQVRRIPEEYSLGRMAEGLSHHDPIMKVLSIRGLVILARRSEKTAKVKALLPSMVKGLKNMDGMLVVEAVHNLKAVFKGRDQKLMDSAVYVEMLQILLPHFSDAREVVRSSCINLYGKVVQKLRAPRTQAMEEQLVSTLVPLLLTMQEGNSKVSQKCVKTLLRCSYFMAWELPKRAYSRKPWDNQQQTVAKICKCLVNTHRDSAFIFLSQSLEYAKNSRASLRKCSVMFIGSLVPCMESIMTEDRLNEVKAALDNLRHDPEASVCIYAAQVQDHILASCWQNSWLPHGNSWVCYSATTHRWSPSCENLPTSHQRRSWIMQALGSWKMSLKK

SEQ ID NO: 13100 - protein, 140 aa, Homo sapiens
MAAAPPSYCFVAFPPRAKDGLVVFGKNSARPRDEVQEVVYFSAADHEPESKVECTYISIDQVPRTYAIMISRPAWLWGAEMGANEHGVCIANEAINTREPAAEIEALLGMDLVRNGQGELDIPVRRSWAPRERFSYKTRN

SEQ ID NO: 13101 - protein, 1119 aa, Homo sapiens
MCGPAMFPAGPPWPRVRVVQVLWALLAVLLASWRLWAIKDFQECTWQVVLNEFKRVGESGVSDSFFEQEPVDTVSSLFHMLVDSPIDPSEKYLGFPYYLKINYSCEEKPSEDLVRMGHLTGLKPLVLVTFQSPVNFYRWKIEQLQIQMEAAPFRSKEPCMAEEVCSMSWYTPMPIKKGSVVMRVDISSNGLGTFIPDKRFQMNINGFLKRDRDNNIQFTVGEELFNLMPQYFVGVSSRPLWHTVDQSPVLILGGIPNEKYVLMTDTSFKDFSLVELSIDSCWVGSFYCPHSGFTATIYDTIATESTLFIRQNQLVYYFTGTYTTLYERNRGSGSWIRVLASECIKKLCPVYFHSNGSEYIMALTTGKHEGYVHFGTIRDGQVSFEMLPRQWSVCEQIGASDDLELLYHIPEFIPEARGLEFLMILGTESYTSTAMAPKGIFCNPYNNLIFIWGNFLLQSSNKENFIYLADFPKELSIKYMARSFRGAVAIVTETEEIWYLLEGSYRVYQLFPSKGWQVHISLKLMQQSSLYASNETMLTLFYEDSKLYQLVYLMNNQKGQLVKRLVPVEQLLMYQQHTSHYDLERKGGYLMLSFIDFCPFSVMRLRSLPSPQRYTRQERYRARPPRVLERSGFHNENSLAIYQGLVYYLLWLHSVYDKPYADPVHDPTWRWWANNKQDQDYYFFLASNWRSAGGVSIEMDSYEKIYNLESAYELPERIFLDKGTEYSFAIFLSAQGHSFRTQSELGTAFQLHSQVDVGVVLADPGCIEASVKQEVLINRNSVLFSITLKDKKLCYDQGISGHHLMETSMTVNVVGSSGLCFQETHLGPHMQGNLMVPVFIGCPPGKRLAFDITYTLEYSRLKNKHYFDCVNVNPEMPCFLFRDIFYPFFLIQDLVTGDSGSFQGSYVLLVVGGGPTLDSLKDYSEDEIYRFNSPLDKTNSLIWTTRTTRTTKDSAFHIMSHESPGIEWLCLENAPCYDNVPQGIFAPEFFFKVLVSNRGVDTSTYCNYQLTFLLHIHGLPLSPKRALFIIMVSASVFVGLVIFYIAFCLLWPLVVKGCTMIRWKINNLIASESYYTYASISGISSMPSLRHSRMGSMFSSRMTEDRAEPKEAVERQLMT

SEQ ID NO: 13102 - protein, 196 aa, Homo sapiens
MILAHCNLCCPTSSNSPGSVSQVAGITGVHHHTRLVFVFLGEMGFHHVGQAGLELLTSEFKEAFSLFDKDGDGTITTKELGTVMRSLGQNPTEAELQDMINEVDADGNGTIDFPEFLTMMARKMKDTDSEEEIREAFRVFDKDGNGYISAAELRHVMTNLGEKLTDEEVDEMIREADIDGDGQVNYEEFVQMMTAK

SEQ ID NO: 13103 - protein, 218 aa, Homo sapiens
MTGRDSLSDGRTSSRALVPGGSPRGSRPRGFAITDLLGLEAELPAPAGPGQGSGCEGPAVAPCPGPGLDGSSLARGALPLGLGLLCGFGTQPPAAARAPCLLLADVPFLPPRGPEPAAPLAPSRPPPALGRQKRSDSVSTSDEDSQSEDRNDLKASPTLGKRKKRRHRTVFTAHQLEELEKAFSEAHYPDVYAREMLAVKTELPEDRIQRVRHWAAEK

SEQ ID NO: 13104 - protein, 1293 aa, Homo sapiens
MAAETQTLNFGPEWLRALSSGGSITSPPLSPALPKYKLADYRYGREEMLALFLKDNKIPSDLLDKEFLPILQEEPLPPLALVPFTEEEQRNFSMSVNSAAVLRLTGRGGGGTVVGAPRGRSSSRGRGRGRGECGFYQRSFDEVEGVFGRGGGREMHRSQSWEERGDRRFEKPGRKDVGRPNFEEGGPTSVGRKHEFIRSESENWRIFREEQNGEDEDGGWRLAGSRRDGERWRPHSPGWREHMERRRRFEFDFRDRDDERGYRRVRSGSGSIDDDRDSLPEWCLEDAEEEMGTFDSSGAFLSLKKVQKEPIPEEQEMDFRPVDEGEECSDSEGSHNEEAKEPDKTNKKEGEKTDRVGVEASEETPQTSSSSARPGTPSDHQSQEASQFERKDEPKTEQTEKAEEETRMENSLPAKVPSRGDEMVADVQQPLSQIPSDTASPLLILPPPVPNPSPTLRPVETPVVGAPGMGSVSTEPDDEEGLKHLEQQAEKMVAYLQDSALDDERLASKLQEHRAKGVSIPLMHEAMQKWYYKDPQGEIQGPFNNQEMAEWFQAGYFTMSLLVKRACDESFQPLGDIMKMWGRVPFSPGPAPPPHMGELDQERLTRQQELTALYQMQHLQYQQFLIQQQYAQVLAQQQKAALSSQQQQQLALLLQQFQTLKMRISDQNIIPSVTRSVSVPDTGSIWELQPTASQPTVWEGGSVWDLPLDTTTPGPALEQLQQLEKAKAAKLEQERREAEMRAKREEEERKRQEELRRQQEEILRRQQEEERKRREEEELARRKQEEALRRQREQEIALRRQREEEERQQQEEALRRLEERRREEEERRKQEELLRKQEEEAAKWAREEEEAQRRLEENRLRMEEEAARLRHEEEERKRKELEVQRQKELMRQRQQQQEALRRLQQQQQQQQLAQMKLPSSSTWGQQSNTTACQSQATLSLAEIQKLEEERERQLREEQRRQQRELMKALQQQQQQQQQKLSGWGNVSKPSGTTKSLLEIQQEEARQMQKQQQQQQQHQQPNRARNNTHSNLHTSIGNSVWGSINTGPPNQWASDLVSSIWSNADTKNSNMGFWDDAVKEVGPRNSTNKNKNNASLSKSVGVSNRQNKKVEEEEKLLKLFQGVNKAQDGFTQWCEQMLHALNTANNLDVPTFVSFLKEVESPYEVHDYIRAYLGDTSEAKEFAKQFLERRAKQKANQQRQQQQLPQQQQQQPPQQPPQQPQQQDSVWGMNHSTLHSVFQTNQSNNQQSNFEAVQSGKKKKKQKMVRADPSLLGFSVNASSERLNMGEIETLDDY

SEQ ID NO: 13105 - protein, 505 aa, Homo sapiens
MSPWSWFLLQTLCLLPTGAASRRGAPGTANCELKPQQSELNSFLWTIKRDPPSYFFGTIHVPYTRVWDFIPDNSKEAFLQSSIVYFELDLTDPYTISALTSCQMLPQGENLQDVLPRDIYCRLKRHLEYVKLMMPLWMTPDQRGKGLYADYLFNAIAGNWERKRPVWVMLMVNSLTEVDIKSRGVPVLDLFLAQEAERLRKQTGAVEKVEEQCHPLNGLNFSQVIFALNQTLLQQESLRAGSLQIPYTTEDLIKHYNCGDLSSVILSHDSSQVPNFINATLPPQERITAQEIDSYLRRELIYKRNERIGKRVKALLEEFPDKGFFFAFGAGHFMGNNTVLDVLRREGYEVEHAPAGRPIHKGKSKKTSTRPTLSTIFAPKVPTLEVPAPEAVSSGHSTLPPLVSRPGSADTPSEAEQRFRKKRRRSQRRPRLRQFSDLWVRLEESDIVPQLQVPVLDRHISTELRLPRRGHSHHSQMVASSACLSLWTPVFWVLVLAFQTETPLL

SEQ ID NO: 13106 - protein, 514 aa, Homo sapiens
MPWRRRRNRVSALEGGREEEAPPEAAAVPPALLTSPQQTEAAAERILLRGIFEIGRDSCDVVLSERALRWRPIQPERPAGDSKYDLLCKEEFIELKDIFSVKLKRRCSVKQQRSGTLLGITLFICLKKEQNKLKNSTLDLINLSEDHCDIWFRQFKKILAVMEYEGHALSLLKECELQGFDGGHRKPLFAIHWSVQRLFTGMQTLEPSVVCVGGDGSASEVAHALLLRAQKNAGMETDRILTPVRAQLPLGLIPAGSTNVLAHSLHGVPHVITATLHIIMGHVQLVDVCTFSTAGKLLRFGFSAMFGFGGRTLALAEKYRWMSPNQRRDFAVVKALAKLKAEDCEISFLPFNSSDDVQERRAQGSPKSDCNDQWQMIQGQFLNVSIMAIPCLCSVAPRGLAPNTRLNNGSMALIIARNTSRPEFIKHLKRYASVKNQFNFPFVETYTVEEVKVHPRNNTGGYNPEEEEDETASENCFPWNVDGDLMEVASEVHIRLHPRLISLYGGSMEEMIPK

SEQ ID NO: 13107 - protein, 334 aa, Homo sapiens
MGRPLHLVLLSASLAGLLLLGESLFIRREQANNILARVTRANSFLEEMKKGHLERECMEETCSYEEAREVFEDSDKTNEFWNKYKDGDQCETSPCQNQGKCKDGLGEYTCTCLEGFEGKNCELFTRKLCSLDNGDCDQFCHEEQNSVVCSCARGYTLADNGKACIPTGPYPCGKQTLERRKRSVAQATSSSGEAPDSITWKPYDAADLDPTENPFDLLDFNQTQPERGDNNLTRIVGGQECKDGECPWQALLINEENEGFCGGTILSEFYILTAAHCLYQAKRFKVRGTGTRSRRRAVRRCTRWRWSSSTTGSQRRPMTSTSPCSGSRPPSPSA

SEQ ID NO: 13108 - protein, 121 aa, Homo sapiens
MSKLSFRARALDAAKPLPIYRGKDMPDLNDCVSINRAVPQMPTGMEKEEESEHHLQRAISAQQVFREKKESMVIPVPEAESNVNYYNRLYKGEFKQPKQFIHIQLKLHLKLLLFRIEVLFF

SEQ ID NO: 13109 - protein, 764 aa, Homo sapiens
MEDAGEDPTTFAAHSLPSDPRLLATVTNAYLGTRVFHDTLHVSGVYNGAGGDTHRAMLPSPLNVRLEAPAGMGEQLTETFALDTNTGSFLHTLEGPRFRASQCIYAHRTLPHVLAFRVSIARLAPGSGPITLLLRSAFSPESPDLDLHQGPDFQGARYLYGHTLTPEQPGGPQQEVHMLWTPAPPDLTLGEGEEARTWDFLTAVGGSQAEAQACLTEALQLQARGALYTAHAQAWAQLWVECGLDVVGPLQLRQALRGSLYYLLSALPQPKAPGYICHGLSPGGLSNGSREECYWGHVFWDQDLWMFPSILMFHPEAARAILEYRIRTLDGALENAQNLGYQGAKFAWESADSGLEVCPEDIYGVQEVHVNGAVVLAFELYYHTTQDLQLFREAGGWDVVRAVAEFWCSRVEWSPREEKHLTCASPTLTTGVEGRPLRLCTEHHLGLVCPGVMSPDEYHSGVNNSVYTNVLVQNSLRFAAALAQDLGLPIPSQWLAVADKIKVPFDVEQNFHPEFDGYEPGEVVKQADVVLLGYPVPFSLSPDVRRKNLEIYEAVTSPQGPAMTWSMFAVGWMELKDAVRARGLLDRSFANMAEPFKVWTENADGSGAVNFLTGMGGFLQAVVFGCTGFRVTRAGVTFDPVCLSGISRVSVSGIFYQGNKLNFSFSEDSVTVEVTARAGPWAPHLEAELWPSQSRLSLLPGHKVSFPRSAGRIQMSPPKLPGSSSSEFPGRTFSDVRDPLQSPLWVTLGSSSPTESLTVDPASE

SEQ ID NO: 13110 - protein, 711 aa, Homo sapiens
MAALGRPGSGPRAAVPAWKREILERKRAKLAALGGGAGPGAAEPEQRVLAESLGPLRENPFMLLEAERRRGGGAAGARLLERYRRVPGVRALRADSVLIIETVPGFPPAPPAPGAAQIRAAEVLVYGAPPGRVSRLLERFDPPAAPRRRGSPERARPPPPPPPPAPPRPPPAAPSPPAAPGPRGGGASPGARRSDFLQKTGSNSFTVHPRGLHRGAGARLLSNGHSAPEPRAGPANRLAGSPPGSGQWKPKVESGDPSLHPPPSPGTPSATPASPPASATPSQRQCVSAATSTNDSFEIRPAPKPVMETIPLGDLQARALASLRANSRNSFMVIPKSKASGAPPPEGRQSVELPKGDLGPASPSQELGSQPVPGGDGAPALGKSPLEVEAQWAVEEGACPRTATALADRAIRWQRPSSPPPFLPAASEEAEPAEGLRVPGLAKNSREYVRPGLPVTFIDEVDSEEAPQAAKLPYLPHPARPLHPARPGCVAELQPRGSNTFTVVPKRKPGTLQDQHFSQANREPRPREAEEEEASCLLGPTLKKRYPTVHEIEVIGGYLALQKSCLTKAGSSRKKMKISFNDKSLQTTFEYPSESSLEQEEEVDQQEEEEEEEEEEEEEEEGSGSEEKPFALFLPRATFVSSVRPESSRLPEGSSGLSSYTPKHSVAFSKWQEQALEQAPREAEPPPVEAMLTPASQNDLSDFRSEPALYF

SEQ ID NO: 13111 - protein, 943 aa, Homo sapiens
MVAAHAAHSSSSAEWIACLDKRPLERSSEDVDIIFTRLKEVKAFEKFHPNLLHQICLCGYYENLEKGITLFRQGDIGTNWYAVLAGSLDVKVSETSSHQDAVTICTLGIGTAFGESILDNTPRHATIVTRESSELLRIEQKDFKALWEKYRQYMAGLLAPPYGVMETGSNNDRIPDKENTPLIEPHVPLRPANTITKVPSEKILRAGKILRNAILSRAPHMIRDRKYHLKTYRQCCVGTELVDWMMQQTPCVHSRTQAVGMWQVLLEDGVLNHVDQEHHFQDKYLFYRFLDDEHEDAPLPTEEEKKECDEELQDTMLLLSQMGPDAHMRMILRKPPGQRTVDDLEIIYEELLHIKALSHLSTTVKRELAGVLIFESHAKGGTVLFNQGEEGTSWYIILKGSVNVVIYGKGVVCTLHEGDDFGKLALVNDAPRAASIVLREDNCHFLRVDKEDFNRILRDVEANTVRLKEHDQDVLVLEKVPAGNRASNQGNSQPQQKYTVMSGTPEKILEHFLETIRLEATLNEATDSVLNDFIMMHCVFMPNTQLCPALVAHYHAQPSQGTEQEKMDYALNNKRRVIRLVLQWAAMYGDLLQEDDVSMAFLEEFYVSVSDDARMIAALKEQLPELEKIVKQISEDAKAPQKKHKVLLQQFNTGDERAQKRQPIRGSDEVLFKVYCMDHTYTTIRVPVATSVKEVISAVADKLGSGEGLIIVKMSSGGEKVVLKPNDVSVFTTLTINGRLFACPREQFDSLTPLPEQEGPTVGTVGTFELMSSKDLAYQMTIYDWELFNCVHELELIYHTFGRHNFKKTTANLDLFLRRFNEIQFWVVTEICLCSQLSKRVQLLKKFIKIAAHCKEYKNLNSFFAIVMGLSNVAVSRLALTWERMIANTARTVRYYRSQPFNPDAAQANKNHQDVRSYVRQLNVIDNQRTLSQMSHRLEPRRP

SEQ ID NO: 13112 - protein, 977 aa, Homo sapiens
MGPPLPLLLLLLLLLPPRVLPAAPSSVPRGRQLPGRLGCLLEEGLCGASEACVNGFTWQDDYTQYVMDQELADLPKTYLRRPEASSPARPSKHSVGSERRYSREGGAALANALRRHLPFLEALSQAPASDVLARTHTAQDRPPAEGDDRFSESILTYVAHTSALTYPPGSRTQLREDLLPRTLGQLQPDELSPKVDSGVDRHHLMAALSAYAAQRPPAPPGEGSLEPQYLLRAPSRMPRPLLAPAAPQKWPSPLGDSEDPSSTGDGARIHTLLKDLQRQPAEVRGLSGLELDGMAELMAGLMQGVDHGVARGSPGRAALGESGEQADGPKATLRGDSFPDDGVQDDDDRLYQEVHRLSATLGGLLQDHGSRLLPGALPFARPLDMERKKSEHPESSLSSEEETAGVENVKSQTYSKDLLGQQPHSEPGAAAFGELQNQMPGPSKEEQSLPAGAQEALSDGLQLEVQPSEEEARGYIVTDRDPLRPEEGRRLVEDVARLLQVPSSAFADVEVLGPAVTFKVSANVQNVTTEDVEKATVDNKDKLEETSGLKILQTGVGSKSKLKFLPPQAEQEDSTKFIALTLVSLACILGVLLASGLIYCLRHSSQHRLKEKLSGLGGDPGADATAAYQELCRQRMATRPPDRPEGPHTSRISSVSSQFSDGPIPSPSARSSASSWSEEPVQSNMDISTGHMILSYMEDHLKNKNRLEKEWEALCAYQAEPNSSFVAQREENVPKNRSLAVLTYDHSRVLLKAENSHSHSDYINASPIMDHDPRNPAYIATQGPLPATVADFWQMVWESGCVVIVMLTPLAENGVRQCYHYWPDEGSNLYHIYEVNLVSEHIWCEDFLVRSFYLKNLQTNETRTVTQFHFLSWYDRGVPSSSRSLLDFRRKVNKCYRGRSCPIIVHCSDGAGRSGTYVLIDMVLNKMAKGAKEIDIAATLEHLRDQRPGMVQTKEQFEFALTAVAEEVNAILKALPQ

SEQ ID NO: 13113 - protein, 1053 aa, Homo sapiens
MFGRSRSWVGGGHGKTSRNIHSLDHLKYLYHVLTKNTTVTEQNRNLLVETIRSITEILIWGDQNDSSVFDFFLEKNMFVFFLNILRQKSGRYVCVQLLQTLNILFENISHETSLYYLLSNNYVNSIIVHKFDFSDEEIMAYYISFLKTLSLKLNNHTVHFFYNEHTNDFALYTEAIKFFNHPESMVRIAVRTITLNVYKVSLDNQAMLHYIRDKTAVPYFSNLVWFIGSHVIELDDCVQTDEEHRNRGKLSDLVAEHLDHLHYLNDILIINCEFLNDVLTDHLLNRLFLPLYVYSLENQDKGGERPKISLPVSLYLLSQVFLIIHHAPLVNSLAEVILNGDLSEMYAKTEQDIQRSSAKPSIRCFIKPTETLERSLEMNKHKGKRRVQKRPNYKNVGEEEDEEKGPTEDAQEDAEKAKGTEGGSKGIKTSGESEEIEMVIMERSKLSELAASTSVQEQNTTDEEKSAAATCSESTQWSRPFLDMVYHALDSPDDDYHALFVLCLLYAMSHNKGMDPEKLERIQLPVPNAAEKTTYNHPLAERLIRIMNNAAQPDGKIRLATLELSCLLLKQQVLMSAGCIMKDVHLACLEGAREESVHLVRHFYKGEDIFLDMFEDEYRSMTMKPMNVEYLMMDASILLPPTGTPLTGIDFVKRLPCGDVEKTRRAIRVFFMLRSLSLQLRGEPETQLPLTREEDLIKTDDVLDLNNSDLIACTVITKDGGMVQRFLAVDIYQMSLVEPDVSRLGWGVVKFAGLLQDMQVTGVEDDSRALNITIHKPASSPHSKPFPILQATFIFSDHIRCIIAKQRLAKGRIQARRMKMQRIAALLDLPIQPTTEVLGFGLGSSTSTQHLPFRFYDQGRRGSSDPTVQRSVFASVDKVPGFAVAQCINQHSSPSLSSQSPPSASGSPSGSGSTSHCDSGGTSSSSTPSTAQSPADAPMSPELPKPHLPDQLVIVNETEADSKPSKNVARSAAVETASLSPSLVPARQPTISLLCEDTADTLSVESLTLVPPVDPHSLRSLTGMPPLSTPAAACTEPVGEEAACAEPVGTAED

SEQ ID NO: 13114 - protein, 922 aa, Homo sapiens
MHWLASATQTSASIVSSSLLSAVDVSSSLTMSEYFQNTSLPGTANSRQFSLPVVSNAAFLTGSISNFSRASAPAISSAWLQPSASGTSFQPLMGSAYLYQHSSTTMLSGVTGQSHICTSAASYPGVFEWDSTASTVKKSSSLRDFTVTVIDQNTAVSSMSMTAQYYKTSDTNTMVPLYPSLSASLVQGTLTQIPNQQGHNLSLPCQIGSQVYYYNQGTLGPQLSCLQSYGSVSYTGYRASAHQPEMVMVLKEVQPTNVLPPVSTSGMYYSVSSQPITETSVQVMETSLGMDTSLGLQSPSQTFCLPQTPEFSKSFSSRNTQTLESNPSPELGDISITPVQSPTNLLTLSPAPSQEKNENENLDEIKTNLSKPLDVHQILIGNQDPPLLPVEIPDIHPLLACIDPLGQEEQPGSENANLRNKSLSLEDQGIFENGIESSSDLADITTWVEDTYLPPIFSSLQDLDQPESPSAKKAKDTSAIKVNQVQEKSCVIKGHSDQVRKNKHKASEPIQGAPKAKIQPKNPECLLEREVVVGSATVSNSASVNKAKHSSNKPHKAASSRISKTKSHGQEKTKGNRKNSSKKSEESKQSGKKVKVEEKQTIPNMKRKKNQPELSQKTLKKPRSSLGMHMLESVQVFHALGKKIDMKTGFSSSRTLGSSSNTQNRQPFPALKPWLDIQHEGKGPEKIQVKAQKLDGSAEKECTSPSHSELPPPGKVKLIPLPFLTLDQPQARHVSRRPNPLASRRPAVAYPARPDSTNSAQSNAVNPSRPAPTNTSLTGPATPAQPISAKATQPSSANPTQPTVPQSAASRPSAYKTSSCSSLQREPVSTAVTSLRSLPKPQNQFLIQDFSLQPRPWRKPTVPEPVMSTPITEEQRPEREAMKRKAQQERENAAKYTSLGKVQFFIERERDMEIAEYYGYTI

SEQ ID NO: 13115 - protein, 893 aa, Homo sapiens
MKQLPAATVRLLSSSQIITSVVSVVKELIENSLDAGATSVDVKLENYGFDKIEVRDNGEGIKAVDAPVMAMKYYTSKINSHEDLENLTTYGFRGEALGSICCIAEVLITTRTAADNFSTQYVLDGSGHILSQKPSHLGQGTTVTALRLFKNLPVRKQFYSTAKKCKDEIKKIQDLLMSFGILKPDLRIVFVHNKIYLSGFLPKCDADHSFTSLSTPERSFIFINSRPVHQKDILKLIRHHYNLKCLKESTRLYPVFFLKIDVPTADVDVNLTPDKSQVLLQNKESVLIALENLMTTCYGPLPSTNSYENNKTDVSAADIVLSKTAETDVLFNKVESSGKNYSNVDTSVIPFQNDMHNDESGKNTDDCLNHQISIGDFGYGHCSSEISNIDKNTKNAFQDISMSNVSWENSQTEYSKTCFISSVKHTQSENGNKDHIDESGENEEEAGLENSSEISADEWSRGNILKNSVGENIEPVKILVPEKSLPCKVSNNNYPIPEQMNLNEDSCNKKSNVIDNKSGKVTAYDLLSNRVIKKPMSASALFVQDHRPQFLIENPKTSLEDATLQIEELWKTLSEEEKLKYEEKATKDLERYNSQMKRAIEQESQMSLKDGRKKIKPTSAWNLAQKHKLKTSLSNQPKLDELLQSQIEKRRSQNIKMVQIPFSMKNLKINFKKQNKVDLEEKDEPCLIHNLRFPDAWLMTSKTEVMLLNPYRVEEALLFKRLLENHKLPAEPLEKPIMLTESLFNGSHYLDVLYKMTADDQRYSGSTYLSDPRLTANGFKIKLIPGVSITENYLEIEGMANCLPFYGVADLKEILNAILNRNAKEVYECRPRKVISYLEGEAVRLSRQLPMYLSKEDIQDIIYRMKHQFGNEIKECVHGRPFFHHLTYLPETT

SEQ ID NO: 13116 - protein, 1909 aa, Homo sapiens
MEGKRQLEKRDFGKRLSLDSSLVEYMDSNKYIEHLLTQLEEQHRSLWREKLAVARLQREVAQRTSEGAMHEKLIHELEEERHLRLQSEKRLQEVTLESERNRIQMRSLQQQFSRMEETVRNLLQSQGSPEQKKEETVNIMVYQEKLSEEERKHKEALEDLHMVVDEDSRSESSSTDEGKEKTKLLLERLKALEAENSALALENENQREQYERCLDEVANQVVQALLTQKDLREECVKLKTRVFDLEQQNRTLSILFQQRVRPTSDLLLQKLHSRLLDLSSGDLLSEVERNRSLTQSRTDAEVHEHQLNTKSALKCPGLGAVIPGHLCPRNSYSSSSELSLSSTCSEYSSGSSYTWHDGKNLRKRQSSQNWDKRLSIDSSLPSGFASPTNELPPTRIKESHILEGLRKLQKRKVLLEPPSVITKWGYKDCMNSNEGIYSPGIKSSSLKEYPPCKTADLGSPCKEPHKTFVYDLDSHVDADDDPSTLALLQAVPNQSCRPHGSKLTHSVSDSLFGWETNRKHFLEGTSSVYPKERPEKLTSCASSCPLEMKLCPSVQTPQVQRERGPQGQGHGRMALNLQLSDTDDNETFDELHIESSDEKSPSDVSLAADTDKSVENLDVLVGFGKSLCGSPEEEEKQVPIPSETRPKTFSFIKQQRVVKRTSSEECVTVIFDAEDGEPIEFSSHQTGVVTVTRNEISINSTPAGPKAEHTELLPQGIACLQPRAAARDYTFFKRSEEDTEKNIPKDNVDNVPRVSTESFSSRTVTQNPQQQKLVKPTHNISCQSNSRSSAPMGIYQKQNLTKIPPRGKSSPQKSKLMEPEATTLLPSSGLVTLEKSPALAPGKLSRFMKTESSGPLFELRSDPHIPKHSAQLPHSSRMPSRRDWVQCPKSQTPGSRSRPAIESSDSGEPPTRDEHCGSGPEAGVKSPSPPPPPGRSVSLLARPSYDYSPAPSSTKSETRVPSETARTPFKSPLLKGISAPVISSNPATTEVQRKKPSVAFKKPIFTHPMPSPEAVIQTRCPAHAPSSSFTVMALGPPKVSPKRGVPKTSPRQTLGTPQRDIGLQTPRISPSTHEPLEMTSSKSVSPGRKGQLNDSASTPPKPSFLGVNESPSSQVSSSSSSSSPAKSHNSPHGCQSAHEKGLKTRLPVGLKVLMKSPQLLRKSSTVPGKHEKDSLNEASKSSVAVNKSKPEDSKNPASMEITAGERNVTLPDSQAQGSLADGLPLETALQEPLESSIPGSDGRDGVDNRSMRRSLSSSKPHLKPALGMNGAKARSHSFSTHSGDKPSTPPIEGSGKVRTQIITNTAERGNSLTRQNSSTESSPNKAPSAPMLESLPSVGRPSGHPSSGKGSLGSSGSFSSQHGSPSKLPLRIPPKSEGLLIPPGKEDQQAFTQGECPSANVAVLGEPGSDRRSCPPTPTDCPEALQSPGRTQHPSTFETSSTSKLETSGRHPDASATATDAVSSEAPLSPTIEEKVMLCIQENVEKGQVQTKPTSVEAKQKPGPSFASWFGFRKSRLPALSSRKMDISKTKVEKKDAKVLGFGNRQLKSERKKEKKKPELQCETENELIKDTKSADNPDGGLQSKNNRRTPQDIYNQLKIEPRNRHSPVACSTKDTFMTELLNRVDKKAAPQTESGSSNASCRNVLKGSSQGSCLIGSSISTQGNHKKNMKIKADMEVPKDSLVKEANENLQEDEDDAVADSVFQSHIIESNCQMRTLDSGIGTFPLPDSGNRSTGRYLCQPDSPEDAEPLLPLQSALSAVSSMRAQTLEREVPSSTDGQRPADSAIVHSTSDPIMTARGMRPLQSRLPKPASSGKVSSQKQNEAEPRPQTCSSFGYAEDPMASQPLPDWGSEVAATGTQDKAPRMCTYSASGGSNSDSDLDYGDNGFGAGRGQLVKALKSAAPEIETT

SEQ ID NO: 13117 - protein, 2097 aa, Homo sapiens
MLRVFILYAENVHTPDTDISDAYCSAVFAGVKKRTKVIKNSVNPVWNEGFEWDLKGIPLDQGSELHVVVKDHETMGRNRFLGEAKVPLREVLATPSLSASFNAPLLDTKKQPTGASLVLQVSYTPLPGAVPLFPPPTPLEPSPTLPDLDVVAGGGQSRAETWSLLSDSTMDTRYSGKKWPAPTDTGGEEDTEDQGLTGDEAEPFLDQSGGPGAPTTPRKLPSRPPPHYPGIKRKRSAPTSRKLLSDKPQDFQIRVQVIEGRQLPGVNIKPVVKVTAAGQTKRTRIHKGNSPLFNETLFFNLFDSPGELFDEPIFITVVDSRSLRTDALLGEFRMDVGTIYREPRHAYLRKWLLLSDPDDFSAGARGYLKTSLCVLGPGDEAPLERKDPSEDKEDIESNLLRPTGVALRGAHFCLKVFRAEDLPQMDDAVMDNVKQIFGFESNKKNLVDPFVEVSFAGKMLCSKILEKTANPQWNQNITLPAMFPSMCEKMRIRIIDWDRLTHNDIVATTYLSMSKISAPGGEIEVDDYLGFLPTFGPCYINLYGSPREFTGFPDPYTELNTGKGEGVAYRGRLLLSLETKLVEHSEQKVEDLPADDILRVEKYLRRRKYSLFAAFYSATMLQDVDDAIQFEVSIGNYGNKFDMTCLPLASTTQYSRAVFDGCHYYYLPWGNVKPVVVLSSYWEDISHRIETQNQLLGIADRLEAGLEQVHLALKAQCSTEDVDSLVAQLTDELIAGCSQPLGDIHETPSATHLDQYLYQLRTHHLSQITEAALALKLGHSELPAALEQAEDWLLRLRALAEEPQNSLPDIVIWMLQGDKRVAYQRVPAHQVLFSRRGANYCGKNCGKLQTIFLKYPMEKVPGARMPVQIRVKLWFGLSVDEKEFNQFAEGKLSVFAETYENETKLALVGNWGTTGLTYPKFSDVTGKIKLPKDSFRPSAGWTWAGDWFVCPEKTLLHDMDAGHLSFVEEVFENQTRLPGGQWIYMSDNYTDVNGEKVLPKDDIECPLGWKWEDEEWSTDLNRAVDEQGWEYSITIPPERKPKHWVPAEKMYYTHRRRRWVRLRRRDLSQMEALKRHRQAEAEGEGWEYASLFGWKFHLEYRKTDAFRRRRWRRRMEPLEKTGPAAVFALEGALGGVMDDKSEDSMSVSTLSFGVNRPTISCIFDYGNRYHLRCYMYQARDLAAMDKDSFSDPYAIVSFLHQSQKTVVVKNTLNPTWDQTLIFYEIEIFGEPATVAEQPPSIVVELYDHDTYGADEFMGRCICQPSLERMPRLAWFPLTRGSQPSGELLASFELIQREKPAIHHIPGFEVQETSRILDESEDTDLPYPPPQREANIYMVPQNIKPALQRTAIEILAWGLRNMKSYQLANISSPSLVVECGGQTVQSCVIRNLRKNPNFDICTLFMEVMLPREELYCPPITVKVIDNRQFGRRPVVGQCTIRSLESFLCDPYSAESPSPQGGPDDVSLLSPGEDVLIDIDDKEPLIPIQEEEFIDWWSKFFASIGEREKCGSYLEKDFDTLKVYDTQLENVEAFEGLSDFCNTFKLYRGKTQEETEDPSVIGEFKGLFKIYPLPEDPAIPMPPRQFHQLAAQGPQECLVRIYIVRAFGLQPKDPNGKCDPYIKISIGKKSVSDQDNYIPCTLEPVFGKMFELTCTLPLEKDLKITLYDYDLLSKDEKIGETVVDLENRLLSKFGARCGLPQTYCVSGPNQWRDQLRPSQLLHLFCQQHRVKAPVYRTDRVMFQDKEYSIEEIEAGRIPNPHLGPVEERLALHVLQQQGLVPEHVESRPLYSPLQPDIEQGKLQMWVDLFPKALGRPGPPFNITPRRARRFFLRCIIWNTRDVILDDLSLTGEKMSDIYVKGWMIGFEEHKQKTDVHYRSLGGEGNFNWRFIFPFDYLPAEQVCTIAKKDAFWRLDKTESKIPARVVFQIWDNDKFSFDDFLGSLQLDLNRMPKPAKTAKKCSLDQLDDAFHPEWFVSLFEQKTVKGWWPCVAEEGEKKILAGKLEMTLEIVAESEHEERPAGQGRDEPNMNPKLEDPRRPDTSFLWFTSPYKTMKFILWRRFRWAIILFIILFILLLFLAIFIYAFPNYAAMKLVKPFS

SEQ ID NO: 13118 - protein, 889 aa, Homo sapiens
MRLSDETLLEISKRFRKEMEKGLGATTHPTAAVKMLPTFVRSTPDGTEHGEFLALDLGGTNFRVLWVKVTDNGLQKVEMENQIYAIPEDIMRGSGTQLFDHIAECLANFMDKLQIKDKKLPLGFTFSFPCHQTKLDESFLVSWTKGFKSSGVEGRDVVALIRKAIQRRGDFDIDIVAVVNDTVGTMMTCGYDDHNCEIGLIVGTGSNACYMEEMRHIDMVEGDEGRMCINMEWGAFGDDGSLNDIRTEFDQEIDMGSLNPGKQLFEKMISGMYMGELVRLILVKMAKEELLFGGKLSPELLNTGRFETKDISDIEGEKDGIRKAREVLMRLGLDPTQEDCVATHRICQIVSTRSASLCAATLAAVLQRIKENKGEERLRSTIGVDGSVYKKHPHFAKRLHKTVRRLVPGCDVRFLRSEDGSGKGAAMVTAVAYRLADQHRARQKTLEHLQLSHDQLLEVKRRMKVEMERGLSKETHASAPVKMLPTYVCATPDGTEKGDFLALDLGGTNFRVLLVRVRNGKWGGVEMHNKIYAIPQEVMHGTGDELFDHIVQCIADFLEYMGMKGVSLPLGFTFSFPCQQNSLDESILLKWTKGFKASGCEGEDVVTLLKEAIHRREEFDLDVVAVVNDTVGTMMTCGFEDPHCEVGLIVGTGSNACYMEEMRNVELVEGEEGRMCVNMEWGAFGDNGCLDDFRTEFDVAVDELSLNPGKQRFEKMISGMYLGEIVRNILIDFTKRGLLFRGRISERLKTRGIFETKFLSQIESDCLALLQVRAILQHLGLESTCDDSIIVKEVCTVVARRAAQLCGAGMAAVVDRIRENRGLDALKVTVGVDGTLYKLHPHFAKVMHETVKDLAPKCDVSFLQSEDGSGKGAALITAVACRIREAGQR

SEQ ID NO: 13119 - protein, 579 aa, Homo sapiens
MAVLKLTDQPPLVQAIFSGDPEEIRMLIHKTEDVNTLDSEKRTPLHVAAFLGDAEIIELLILSGARVNAKDNMWLTPLHRAVASRSEEAVQVLIKHSADVNARDKNWQTPLHVAAANKAVKCAEVIIPLLSSVNVSDRGGRTALHHAALNGHVEMVNLLLAKGANINAFDKKDRRALHWAAYMGHLDVVALLINHGAEVTCKDKKGYTPLHAAASNGQINVVKHLLNLGVEIDEINVYGNTALHIACYNGQDAVVNELIDYGANVNQPNNNGFTPLHFAAASTHGALCLELLVNNGADVNIQSKDGKSPLHMTAVHGRFTRSQTLIQNGGEIDCVDKDGNTPLHVAARYGHELLINTLITSGADTAKCGIHSMFPLHLAALNAHSDCCRKLLSSGFEIDTPDKFGRTCLHAAAAGGNVECIKLLQSSGADFHKKDKCGRTPLHYAAANCHFHCIETLVTTGANVNETDDWGRTALHYAAASDMDRNKTILGNAHDNSEELERARELKEKEATLCLEFLLQNDANPSIRDKEGYNSIHYAAAYGHRQCLELVSCFVLFSLTHTHTHTPNHRGINCFFPEL

SEQ ID NO: 13120 - protein, 1606 aa, Homo sapiens
MFPKSNLTVTCWVWRSMRKLFLLLSLLLSHAAHLEGKKDNQFIWKPGPWGRCTGDCGPGGVQSRAVWCFHVDGWTSHLSNCGESNRPPKERSCFRVCDWHSDLFQWEVSDWHHCVLVPYARGEVKPRTAECVTAQHGLQHRMVRCIQKLNRTVVANEICEHFALQPPTEQACLIPCPRDCVVSEFLPWSNCSKGCGKKLQHRTRAVIAPPLFGGLQCPNLTESRACDAPISCPLGEEEYTFSLKVGPWSKCRLPHLKEINPSGRTVLDFNSDSNERVTFKHQSYKAHHHSKSWAIEIGYQTRQVSCTRSDGQNAMLSLCLQDSFPLTVQSCIMPKDCETSQWSSWSPCSKTCRSGSLLPGFRSRSRNVKHMAIGGGKECPELLEKEACIVEGELLQQCPRYSWRTSEWKECQVSLLLEQQDPHWHVTGPVCGGGIQTREVYCAQSVPAAAALRAKEVSRPVEKALCVGPAPLPSQLCNIPCSTDCIVSSWSAWGLCIHENCHDPQGKKGFRTRQRHVLMESTGPAGHCPHLVESVPCEDPMCYRWLASEGICFPDHGKCGLGHRILKAVCQNDRGEDVSGSLCPVPPPPERKSCEIPCRMDCVLSEWTEWSSCSQSCSNKNSDGKQTRSRTILALAGEGGKPCPPSQALQEHRLCNDHSCMQLHWETSPWGPCSEDTLVTALNATIGWNGEATCGVGIQTRRVFCVKSHVGQVMTKRCPDSTRPETVRPCFLPCKKDCIVTAFSEWTPCPRMCQAGNATVKQSRYRIIIQEAANGGQECPDTLYEERECEDVSLCPVYRWKPQKWSPCILVPESVWQGITGSSEACGKGLQTRAVSCISDDNRSAEMMECLKQTNGMPLLVQECTVPCREDCTFTAWSKFTPCSTNCEATKSRRRQLTGKSRKKEKCQDSDLYPLVETELCPCDEFISQPYGNWSDCILPEGRREPHRGLRVQADSKECGEGLRFRAVACSDKNGRPVDPSFCSSSGYIQEKCVIPCPFDCKLSDWSSWGSCSSSCGIGVRIRSKWLKEKPYNGGRPCPKLDLKNQVHEAVPCYSECNQYSWVVEHWSSCKINNELRSLRCGGGTQSRKIRCVNTADGEGGAVDSNLCNQDEIPPETQSCSLMCPNECVMSEWGLWSKCPQSCDPHTMQRRTRHLLRPSLNSRTCAEDSQVQPCLLNENCFQFQYNLTEWSTCQLSENAPCGQGVRTRLLSCVCSDGKPVSMDQCEQHNLEKPQRMSIPCLVECVVNCQLSGWTAWTECSQTCGHGGRMSRTRFIIMPTQGEGRPCPTELTQEKTCPVTPCYSWVLGNWSACKLEGGDCGEGVQIRSLSCMVHSGSISHAAGRVEDALCGEMPFQDSILKQLCSVPCPGDCHLTEWSEWSTCELTCIDGRSFETVGRQSRSRTFIIQSFENQDSCPQQVLETRPCTGGKCYHYTWKASLWNNNERTVWCQRSDGVNVTGGCSPQARPAAIRQCIPACRKPFSYCTQGGVCGCEKGYTEIMKSNGFLDYCMKVPGSEDKKADVKNLSGKNRPVNSKIHDIFKGWSLQPLDPDGRVKIWVYGVSGGAFLIMIFLIFTSYLVCKKPKPHQSTPPQQKPLTLAYDGDLDM

SEQ ID NO: 13121 - protein, 46 aa, Homo sapiens
MGLSTQEAGKMTRVEGEGEYTDIQGLEWSGNFHFTAAPDLKLKLHM

SEQ ID NO: 13122 - protein, 443 aa, Homo sapiens
MLTNGKEQVIKSCVSLPELNAQVFCHSSNNVTKTECCFTDFCNNITLHLPTASPNAPKLGPMELAIIITVPVCLLSIAAMLTVWACQGRQCSYRKKKRPNVEEPLSECNLVNAGKTLKDLIYDVTASGSGSGLPLLVQRTIARTIVLQEIVGKGRFGEVWHGRWCGEDVAVKIFSSRDERSWFREAEIYQTVMLRHENILGFIAADNKDNGTWTQLWLVSEYHEQGSLYDYLNRNIVTVAGMIKLALSIASGLAHLHMEIVGTQGKPAIAHRDIKSKNILVKKCETCAIADLGLAVKHDSILNTIDIPQNPKVGTKRYMAPEMLDDTMNVNIFESFKRADIYSVGLVYWEIARRCSVGGIVEEYQLPYYDMVPSDPSIEEMRKVVCDQKFRPSIPNQWQSCEALRVMGRIMRECWYANGAARLTALRIKKTISQLCVKEDCKA

SEQ ID NO: 13123 - protein, 1320 aa, Homo sapiens
MAAETQTLNFGPEWLRALSSGGSITSPPLSPALPKYKLADYRYGREEMLALFLKDNKIPSDLLDKEFLPILQEEPLPPLALVPFTEEEQRNFSMSVNSAAVLRLTGRGGGGTVVGAPRGRSSSRGRGRGRGECGFYQRSFDEVEGVFGRGGGREMHRSQSWEERGDRRFEKPGRKDVGKKNGYYCMYSPVLLLGQPLCQGRPNFEEGGPTSVGRKHEFIRSESENWRIFREEQNGEDEDGGWRLAGSRRDGERWRPHSPDGPRSAGWREHMERRRRFEFDFRDRDDERGYRRVRSGSGSIDDDRDSLPEWCLEDAEEEMGTFDSSGAFLSLKKVQKEPIPEEQEMDFRPVDEGEECSDSEGSHNEEAKEPDKTNKKEGEKTDRVGVASEETPQTSSSSARPGTPSDHQSQEASQFERKDEPKTEQTEKAEEETRMENSLPAKVPSRGDEMVADVQQPLSQIPSDTASPLLILPPPVPNPSPTLRPVETPVVGAPGMGSVSTEPDDEEGLKHLEQQAEKMVAYLQDSALDDERLASKLQEHRAKGVSIPLMHEAMQKWYYKDPQGEIQGPFNNQEMAEWFQAGYFTMSLLVKRACDESFQPLGDIMKMWGRVPFSPGPAPPPHMGELDQERLTRQQELTALYQMQHLQYQQFLIQQQYAQVLAQQQKAALSSQQQQQLALLLQQFQTLKMRISDQNIIPSVTRSVSVPDTGSIWELQPTASQPTVWEGGSVWDLPLDTTTPGPALEQLQQLEKAKAAKLEQERREAEMRAKREEEERKRQEELRRQQEEILRRQQEEERKRREEEELARRKQEEALRRQREQEIALRRQREEEERQQQEEALRRLEERRREEEERRKQEELLRKQEEEAAKWAREEEEAQRRLEENRLRMEEEAARLRHEEEERKRKELEVQRQKELMRQRQQQQEALRRLQQQQQQQQLAQMKLPSSSTWGQQSNTTACQSQATLSLAEIQKLEEERERQLREEQRRQQRELMKALQQQQQQQQQKLSGWGNVSKPSGTTKSLLEIQQEEARQMQKQQQQQQQHQQPNRARNNTHSNLHTSIGNSVWGSINTGPPNQWASDLVSSIWSNADTKNSNMGFWDDAVKEVGPRNSTNKNKNNASLSKSVGVSNRQNKKVEEEEKLLKLFQGVNKAQDGFTQWCEQMLHALNTANNLDVPTFVSFLKEVESPYEVHDYIRAYLGDTSEAKEFAKQFLERRAKQKANQQRQQQQLPQQQQQQPPQQPPQQPQQQDSVWGMNHSTLHSVFQTNQSNNQQSNFEAVQSGKKKKKQKMVRADPSLLGFSVNASSERLNMGEIETLDDY

SEQ ID NO: 13124 - protein, 405 aa, Homo sapiens
MNYQQQLANSAAIRAEIQRFESVHPNIYSIYELLERVEEPVLQNQIREHVIAIEDAFVNSQEWTLSRSVPELKVGIVGNLASGKSALVHRYLTGTYVQEESPEGGRFKKEIVVDGQSYLLLIRDEGGPPEAQFAMWVDAVIFVFSLEDEISFQTVYHYYSRMANYRNTSEIPLVLVGTQDAISSANPRVIDDARARKLSNDLKRCTYYETCATYGLNVERVFQDVAQKIVATRKKQQLSIGPCKSLPNSPSHSSVCSAQVSAVHISQTSNGGGSLSDYSSSVPSTPSTSQKELRIDVPPTANTPTPVRKQSKRRSNLFTSRKGSDPDKEKKGLESRADSIGSGRAIPIKQGLPFFVLALTASTYLRPAGARARQSSPWPGPRGGQTSPHCAEGPQSAQLSGAMMN

SEQ ID NO: 13125 - protein, 1038 aa, Homo sapiens
MVAEVDSMPAASSVKKPFVLRSKMGKWCRHCFPCCRGSGKSNVGTSGDQDDSTMKTLRSKMGKWCCHCFPCCRGSGKSNVGAWGDYDDSAFVEPRYHVRREDLDKLHRAAWWGKVARKDLIVMLRDTDVNKQDKQKRTALHLASANGNSGVVKLLLDRRCQLNVLDNKKRTALTKAVQCQEDECALMLLEHGTDPNIPDEYGNTTLHYAIYNEDKLMAKALLLYGADIESKNKHGLTPLLLGVHEQKQQVVKFLIKKKANLNALDRYGRTALILAVCCGSASIVSLLLEQNIDVSSQDLSGQTAREYAVSSHHHVICQLLSDYKEKQMLKISSENSNPEQDLKLTSEEESQRFKGSENSQPEKMSQEPEINKDGDREVEEEMKKHESNNVGLLENLSNGVTAGNGDDGLIPQRKSRTPENQQFPDNESEEYHRICELVSDYKEKQMPKYSSENSNPEQDLKLTSEEESQRLKGSENGQPEKRSQEPEINKDGDRELENFMAIEEMKKHGSTHVGFPENLTNGATAGNGDDGLIPPRKSRTPESQQFPDTENEEYHSDEQNDTQKQFCEEQNTGILHDEILIHEEKQIEVVEKMNSELSLSCKKERDFLHENSMLREEIAMLRLELDTMKHQSQLRKKKYLEDIESVKKKNDNLLKALQLNELTMDDDTAVLVIDNGSGMCKAGFAGDDAPRAVFPSIVGCPRQQGMMGGMHQKESYVGKEAQSKRGILTLKYPMEHGIITNWDDMEKIWHHTFYNELRVAPEEHPILLTEAPLNPKANREKMTQIMFETFNTPAMYVAIQAMLSLYTSGRTTGIVMDSGDGVTHTVPIYDGNALPHATLRLDLAGRELTDYLMKILTERGYRFTTMAEREIVRDIKEKLCYVALDFEQEMAMVASSSSLEKSYELPDGQVITISNEWFRCPEALFQPCFLGMESCGIHETTFNSIMKSDVDIRKDLYTNTVLSGGTTMYPGMAHRMQKEIAALAPSMMKIRIIAPPKRKYSVWVGGSILASLSTFQQMWISKQEYDESGPSIVHRKCF

SEQ ID NO: 13126 - protein, 174 aa, Homo sapiens
MGMMCWSPPLDKMGNSVKGIHFCHDLVSLCNFHNYDNLRHFAKKLDPRREGGDQRVKSVINLLFAAYTGDVSALRRFALSAMDMEQRDYDSRTALHVAAAEGHVEVVKFLLEACKVNPFPKDRWNNTPMDEALHFGHHDVFKILQEYQVQYTPQGDSDNGKENQTVHKNLDGLL

SEQ ID NO: 13127 - protein, 57 aa, Homo sapiens
MFHGLGTYTFPNGAKYTGNFNENRVEGEGEYTDIQGLEWSGNFHFTAAPDLKLKLHM

SEQ ID NO: 13128 - protein, 119 aa, Homo sapiens
MCEEETTALVCDNGSGLCKAGFAGDDAPRAVFPSIVGRPRHQGVMVGMGQKDSYVGDEAQSKRGILTLKYPIEHGIITNWDDMEKPHDHFSNLGCQHLSLDYCNGFLADFLVSCPHSPN

SEQ ID NO: 13129 - protein, 737 aa, Homo sapiens
MEDAGEDPTTFAAHSLPSDPRLLATVTNAYLGTRVFHDTLHVSGVYNGAGGDTHRAMLPSPLNVRLEAPAGMGEQLTETFALDTNTGSFLHTLEGPRFRASQCIYAHRTLPHVLAFRVSIARLAPGSGPITLLLRSAFSPESPDLDLHQGPDFQGARYLYGHTLTPEQPGGPQQEVHMLWTPAPPDLTLGEGEEARTWDFLTAVGGSQAEAQACLTEALQLQARGALYTAHAQAWAQLWVECGLDVVGPLQLRQALRGSLYYLLSALPQPKAPGYICHGLSPGGLSNGSREECYWGHVFWDQDLWMFPSILMFHPEAARAILEYRIRTLDGALENAQNLGYQGAKFAWESADSGLEVCPEDIYGVQEVHVNGAVVLAFELYYHTTQDLQLFREAGGWDVVRAVAEFWCSRVEWSPREEKYHLRGVMSPDEYHSGVNNSVYTNVLVQNSLRFAAALAQDLGLPIPSQWLAVADKIKVPFDVEQNFHPEFDGYEPGEVVKQADVVLLGYPVPFSLSPDVRRKNLEIYEAVTSPQGPAMTWSMFAVGWMELKDAVRARGLLDRSFANMAEPFKVWTENADGSGAVNFLTGMGGFLQAVVFGCTGFRVTRAGVTFDPVCLSGISRVSVSGIFYQGNKLNFSFSEDSVTVEVTARAGPWAPHLEAELWPSQSRLSLLPGHKVSFPRSAGRIQMSPPKLPGSSSSEFPGRTFSDVRDPLQSPLWVTLGSSSPTESLTVDPASE

SEQ ID NO: 13130 - protein, 326 aa, Homo sapiens
MATEIGSPPRFFHMPRFQHQAPRQLFYKRPDFAQQQAMQQLTFDGKRMRKAVNRKTIDYNPSVIKYLENRIWQRDQRDMRAIQPDAGYYNDLVPPIGMLNNPMNAVTTKFVRTSTNKVKCPVFVVRWTPEGRRLVTGASSGEFTLWNGLTFNFETILQAHDSPVRAMTWSHNDMWMLTADHGGYVKYWQSNMNNVKMFQAHKEAIREARFIHNIPFSVVPIVMVKLFSKCILGAEMHGLCQFLGNFLHPINTIFFFVFTHSPFCWHLSEVVLSRYQPLQYVRDVLSAAFCTGFLFSFMINNVYTLFLFIIYCVRQEYFIPNKEFSL

SEQ ID NO: 13131 - protein, 308 aa, Homo sapiens
MEEEGGGRSCGTTRELQKLKQQAMEYYRENDVPRRLEELLNSTFYLQPADVYGHLPSPPKAETKKGHDGSKRGQQQITGKMSHLGCLTINCDSIEQPLLLIQEICANLGLELGTNLHLAINCAGHELMDYDSEQWDSIYHALGSRCYIIAGTASKSISKLLEQGNISIPKSNGLIIKHTNQTTMSDLVEITNLIDSKKHITVFGSTEGESSDDSLVDLAVGLGVRFIKLGGLSRGERVTKYNRLLTIEEELVQNGTLGFKEEHTFFYFNEEAEKAAEALEAAAAREPLVPTFPTQGVEESAETGASSG

SEQ ID NO: 13132 - protein, 617 aa, Homo sapiens
MKCALFLRVKILQRVCRSRYIVHAGTCDSTAAMSGILKRKFEEVDGSSPCSSVRESDDEVSSSESADSGDSVNPSTSSHFTPSSILKREKRLRTKNVHFSCVTVYYFTRRQGFTSVPSQGGSTLGMSSRHNSVRQYTLGEFAREQERLHREMLREHLREEKLNSLKLKMTKNGTVESEEASTLTLDDISDDDIDLDNTEVDEYFFLQPLPTKKRRALLRASGVKKIDVEEKHELRAIRLSREDCGCDCRVFCDPDTCTCSLAGIKCQVDRMSFPCGCTKEGCSNTAGRIEFNPIRVRTHFLHTIMKLELEKNREQQIPTLNGCHSEISAHSSSMGPVAHSVEYSIADSFEIETEPQAAVLHLQSAEELDCQGEEEEEEEDGSSFCSGVTDSSTQSLAPSESDEEEEEEEEEEEEEDDDDDKGDGFVEGLGTHAEVVPLPSVLCYSDGTAVHESHAKNASFYANSSTLYYQIDSHIPGTPNQISENYSERDTVKNGTLSLVPYTMTPEQFVDYARQAEEAYGASHYPAANPSVIVCCSSSENDSGVPCNSLYPEHRSNHPQVEFHSYLKGPSQEGFVSALNGDSHISEHPAENSLSLAEKSILHEECIKSPVVETVPV

SEQ ID NO: 13133 - protein, 457 aa, Homo sapiens
MILEVKPQTNASCEYSASHKQDLLLGSTGSISCPSLSCQSDAQSPAVTWYKNGKLLSVERSNRIVVDEVYDYHQGTYVCDYTQSDTVSSWTVRAVVQVRTIVGDTKLKPDILDPVEDTLEVELGKPLTISCKARFGFERVFNPVIKWYIKDSDLEWEVSVPEAKSIKSTLKDEIIERNIILEKVTQRDLRRKFVCFVQNSIGNTTQSVQLKEKRGVVLLYILLGTIGTLVAVLAASALLYRHWIEIVLLYRTYQSKDQTLGDKKDFDAFVSYAKWSSFPSEATSSLSEEHLALSLFPDVLENKYGYSLCLLERDVAPGGVYAEDIVSIIKRSRRGIFILSPNYVNGPSIFELQAAVNLALDDQTLKLILIKFCYFQEPESLPHLVKKALRVLPTVTWRGLKSVPPNSRFWAKMRYHMPVKNSQGFTWNQLRITSRIFQWKGLSRTETTGRSSQPKEW

SEQ ID NO: 13134 - protein, 167 aa, Homo sapiens
MYMGMMCTAKKCGIRFQPPAIILIYESEIKGKIRQRIMPVRNFSKFSDCTRAAEQLKNNPRHKSYLEQVSLRQLEKLFSFLRGYLSGQSLAETMEQIQRETTIDPEEDLNKLDDKELAKRKSIMDELFEKNQKKKDDPNFVYDIEVEFPQDDQLQSCGWDTESADEF

SEQ ID NO: 13135 - protein, 952 aa, Homo sapiens
MVQMTVKDYMRSLHQFSETPILSRGTSFNSCYSTASVPQSIPEWLEFWEIDPVEILLDLGFGADEPDICMQIPARFLGCGSAARGINIRVFLEAQKQRMDIENPNLYGRFRQLEILDHVTNAFSSLLSDVSILPNRAEEKAGGESVQRTSVSAAKEHRRRMGKLLRRASKQNIRRDCNPEVSESFKVKDEVFVPFTKPWDCGAELAATSINHKQNHLSLSVEHQSLQACDDLLPYPPHGLLSKQWPCSSMPAKQAPPSCVSEGSVKGRTQKENLFQTNKLKSLSHLAGKGPDSFEMEEVQSFEEETGNPLDMTSGTVGARVDRANSCQSDSSGFLEEPLEPLPLQMPSLPNSQSPAENGGRKPRDQSHSLVSSQDCQLESDGPDSKSRASMSFSSQEANALEQRASVSVMEEEFLLEAMEGPPELYIPDMACAKTTTRGECPRKDSHLWQLLPMPHAEYEVTRPTATSKYDHPLGFMVTHVTEMQDSFVRPEGAGKVQSHHNESQRSPGNDHTQDKFLHVDSEAPREEESSGFCPHTNHSLLVPESSSQCIPKHSEITPYATDLAQTSEKLIPHLHKLPGDPAQVKSRSGTLGQILPGTEAEMENLPLNTGSSRSVMTQMSSSLVSAAQRAVALGTGPRGTSLECTVCDPVTATETRLGTKARQLNDASIQTSALSNKTLTHGPQPLTKSVSLDSGFSSICPMGTCHAIPAHCCICCHHHPHCHGERQSPGPEPSVCRHCLCSLTGHQEAQFMTTLKALQDTTVRELCSCTVHEMEAMKTICQSFREYLEEIEQHLMGQQALFSRDMSEEEREEAEQLQTLREALRQQVAELEFQLGDRAQQIREGILLQLEVLTAEPPEHYSNLHQYNWIEESNGQTSCSKIHPGMAPRTVFPPDDGQEAPCSGGTQLAAFTPPTLENSTRMSPSSSAWAKLGPTPLSNCPVGEKDADVFL

SEQ ID NO: 13136 - protein, 254 aa, Homo sapiens
MAATARRGWGAAAVAAGLRRRFCHMLKNPYTIKKQPLHQFVQRPLFPLPAAFYHPVRYMFIQTQDTPNPNSLKFIPGKPVLETRTMDFPTPAAAFRSPLARQLFRIEGVKSVFFGPDFITVTKENEELDWNLLKPDIYATIMDFFASGLPLVTEETPSGEAGSEEDDEVVAMIKELLDTRIRPTVQEDGGDVIYKGFEDGIVQLKLQGSCTSCPSSIITLKNGIQNMLQFYIPEVEGVEQVMDDESDEKEANSP

SEQ ID NO: 13137 - protein, 618 aa, Homo sapiens
MRREFCWDAYSKAAGSRASSPLPRQDRDSFCHQMSFCLTELHLWSLKNTLHIADRDIGIYQYYDKKDPPATEHGNLEKKQKLAESRDYPWTLKNRRPEKLRDSLKELEELMQNSRCVLSKWKNKYVCQLLFGSGVLVSLSLSGPQLEKVVIDRSLVGKLISDTISDALLTDSFIILSFLAQNKLCFIQFTKKMESSDVNKRLEKLSALDYKIFYYEIPGPINKTTERHLAINCVHDRVVCWWPLVNDDAWPWAPISSEKDRANLLLLGYAQGRLEVLSSVRTEWDPLDVRFGTKQPYQVFTVEHSVSVDKEPMADSCIYECIRNKIQCVSVTRIPLKSKAISCCRNVTEDKLILGCEDSSLILYETHRRVTLLAQTELLPSLISCHPSGAILLVGSNQGELQIFDMALSPINIQLLAEDRLPRETLQFSKLFDASSSLVQMQWIAPQVVSQKGEGSDIYDLLFLRFERGPLGVLLFKLGVFTRGQLGLIDIIFQYIHCDEIYEAINILSSMNWDTLGHQCFISMSAIVNHLLRQKLTPEREAQLETSLGTFYAPTRPLLDSTILEYRDQISKYARRFFHHLLRYQRFEKAFLLAVDVGARDLFMASCYLTSNYTTRLQ

SEQ ID NO: 13138 - protein, 227 aa, Homo sapiens
MALHDMEDFTFDGTKRLSVNYVKGILQPTDTCDIWDKIWNFQAKPDDLLISTYPKAGTTWTQEIVELIQNEGDVEKSKRAPTHQRFPFLEMKIPSLGSVCWGSWHEHVKGWWEAKDKHRILYLFYEDMKKNPKHEIQKLAEFIGKKLDDKVLDKIVHYTSFDVMKQNPMANYSSIPAEIMDHSISPFMRKGAVGDWKKHFTVAQNERFDEDYKKKMTDTRLTFHFQF

SEQ ID NO: 13139 - protein, 711 aa, Homo sapiens
MLRACQLSGVTAAAQSCLCGKFVLRPLRPCRRYSTSGSSGLTTGKIAGAGLLFVGGGIGGTILYAKWDSHFRESVEKTIPYSDKLFEMVLGPAAYNVPLPKKSIQSGPLKISSVSEVMKESKQPASQLQKQKGDTPASATEASSSSIRERPPEEVAARLAQQEKQEQVKIESLAKSLEDALRQTASVTLQAIAAQNAAVQAVNAHSNILKAAMDNSEIAGEKKSAQWRTVEGALKERRKAVDEAADALLKAKEELEKMKSVIENAKKKEVAGAKPHITAAEGKLHNMIVDLDNVVKKVQAAQSEAKVVSQYHELVVQARDDFKRELDSITPEVLPGWKGMSVSDLADKLSTDDLNSLIAHAHRRIDQLNRELAEQKATEKQHITLALEKQKLEEKRAFDSAVAKALEHHRSEIQAEQDRKIEEVRDAMENEMRTQLRRQAAAHTDHLRDVLRVQEQELKSEFEQNLSEKLSEQELQFRRLSQEQVDNFTLDINTAYARLRGIEQAVQSHAVAEEEARKAHQLWLSVEALKYSMKTSSAETPTIPLGSAVEAIKANCSDNEFTQALTAAIPPESLTRGVYSEETLRARFYAVQKLARRVAMIDETRNSLYQYFLSYLQSLLLFPPQQLKPPPELCPEDINTFKLLSYASYCIEHGDLELAAKFVNQLKGESRRVAQDWLKEARMTLETKQIVEILTAYASAVGIGTTQVQPE

SEQ ID NO: 13140 - protein, 591 aa, Homo sapiens
MPGFHLITQLKGMSVVLVLLPTLLLVMLTGAQRACPKNCRCDGKIVYCESHAFADIPENISGGSQGLSLRFNSIQKLKSNQFAGLNQLIWLYLDHNYISSVDEDAFQGIRRLKELILSSNKITYLHNKTFHPVPNLRNLDLSYNKLQTLQSEQFKGLRKLIILHLRSNSLKTVPIRVFQDCRNLDFLDLGYNRLRSLSRNAFAGLLKLKELHLEHNQFSKINFAHFPRLFNLRSIYLQWNRIRSISQGLTWTWSSLHNLDLSGNDIQGIEPGTFKCLPNLQKLNLDSNKLTNISQETVNAWISLISITLSGNMWECSRSICPLFYWLKNFKGNKESTMICAGPKHIQGEKVSDAVETYNICSEVQVVNTERSHLVPQTPQKPLIIPRPTIFKPDVTQSTFETPSPSPGFQIPGAEQEYEHVSFHKIIAGSVALFLSVAMILLVIYVSWKRYPASMKQLQQHSLMKRRRKKARESERQMNSPLQEYYVDYKPTNSETMDISVNGSGPCTYTISGSRECEMPHHMKPLPYYSYDQPVIGYCQAHQPLHVTKGYETVSPEQDESPGLELGRDHSFIATIARSAAPAIYLERIAN

SEQ ID NO: 13141 - protein, 666 aa, Homo sapiens
MIGNYDHLMSLVTSTSASASASPFQSAWYSESEITQGARSRSQNQQRDHDSKRPKLSCTNCTTSAGRNVGNGLNTLSDSSWRHSQVPRSSSMVLGSFGTDLMRERRDLERRTDSSISNLMDYSHRSGDFTTSSYVQDRVPSYSQGARPKENSMSTLQLNTSSTNHQLPSEHQTILSSRDSRNSLRSNFSSRESESSRSNTQPGFSYSSSRDEAPIISNSERVVSSQRPFQESSDNEGRRTTRRLLSRIASSMSSTFFSRRSSQDSLNTRSLNSENSYVSPRILTASQSRSNVPSASEVPDNRASEASQGFRFLRRRWGLSSLSHNHSSESDSENFNQESEGRNTGPWLSSSLRNRCTPLFSRRRREGRDESSRIPTSDTSSRSHIFRRESNEVVHLEAQNDPLGAAANRPQASAASSSATTGGSTSDSAQGGRNTGISGILPGSLFRFAVPPALGSNLTDNVMITVDIIPSGWNSADGKSDKTKSAPSRDPERLQKIKESLLLEDSEEEEGDLCRICQMAAASSSNLLIEPCKCTGSLQYVHQDCMKKWLQAKINSGSSLEAVTTCELCKEKLELNLEDFDIHELHRAHANEQAEYEFISSGLYLVVLLHLCEQSFSDMMGNTNEPSTRVRFINLARTLQAHMEDLETSEDDSEEDGDHNRTFDIA

SEQ ID NO: 13142 - protein, 561 aa, Homo sapiens
MRRFVYCKVVLATSLMWVLVDVFLLLYFSECNKCDDKKERSLLPALRAVISRNQEGPGEMGKAVLIPKDDQEKMKELFKINQFNLMASDLIALNRSLPDVRLEGCKTKVYPDELPNTSVVIVFHNEAWSTLLRTVYSVINRSPHYLLSEVILVDDASERDFLKLTLENYVKNLEVPVKIIRMEERSGLIRARLRGAAASKGQVITFLDAHCECTLGWLEPLLARIKEDRKTVVCPIIDVISDDTFEYMAGSDMTYGGFNWKLNFRWYPVPQREMDRRKGDRTLPVRTPTMAGGLFSIDRNYFEEIGTYDAGMDIWGGENLEMSFRIWQCGGSLEIVTCSHVGHVFRKATPYTFPGGTGHVINKNNRRLAEVWMDEFKDFFYIISPGVVKVDYGDVSVRKTLRENLKCKPFSWYLENIYPDSQIPRRYYSLGEIRNVETNQCLDNMGRKENEKVGIFNCHGMGGNQVFSYTADKEIRTDDLCLDVSRLNGPVIMLKCHHMRGNQLWEYDAESCLSVNKVADGSQHPTVETCNDSTLQKWLLRNYTRMEIFRNIFGNSTDYIL

SEQ ID NO: 13143 - protein, 903 aa, Homo sapiens
MSSDEKGISPAHKTSTPTHRSASSSTSSQRDSRQSIHILERTASSSTEPSVSRQLLEPEPVPLSKEADSWEIIEGLKIGQTNVQKPDKHEGFMLKKRKWPLKGWHKRFFVLDNGMLKYSKAPLDIQKGKVHGSIDVGLSVMSIKKKARRIDLDTEEHIYHLKVKSQDWFDAWVSKLRHHRLYRQNEIVRSPRDASFHIFPSTSTAESSPAANVSVMDGKMQPNSFPWQSPLPCSNSLPATCTTGQSKVAAWLQDSEEMDRCAEDLAHCQSNLVELSKLLQNLEILQRTQSAPNFTDMQVPFSATMSPVRLHSSNPNLCADIEFQTPPSHLTDPLESSTDYTKLQEEFCLIAQKVHSLLKSAFNSIAIEKEKLKQMVSEQDHSKGHSTQMARLRQSLSQALNQNAELRSRLNRIHSESIICDQVVSVNIIPSPDEAGEQIHVSLPLSQQVANESRLSMSESVSEFFDAQEVLLSASSSENEASDDESYISDVSDNISEDNTSVADNISRQILNGELTGGAFRNGRRACLPAPCPDTSNINLWNILRNNIGKDLSKVSMPVELNEPLNTLQHLCEEMEYSELLDKASETDDPYERMVLVAAFAVSGYCSTYFRAGSKPFNPVLGETYECIREDKGFRFFSEQVSHHPPISACHCESKNFVFWQDIRWKNKFWGKSMEILPVGTLNVMLPKYGDYYVWNKVTTCIHNILSGRRWIEHYGEVTIRNTKSSVCICKLTFVKVNYWNSNMNEVQGVVIDQEGKAVYRLFGKWHEGLYCGVAPSAKCIWRPGSMPTNYELYYGFTRFAIELNELDPVLKDLLPPTDARFRPDQRFLEEGNLEAAASEKQRVEELQRSRRRYMEENNLEHIPKFFKKVIDANQREAWVSNDTYWELRKDPGFSKVDSPVLW

SEQ ID NO: 13144 - protein, 3327 aa, Homo sapiens
MARYQAAVSRGDCRSFSANMMEESEMCAVPGGLAKVKKQFEDEITSSRNTFAQYQYQHQNRSEQEAIHSSQVGTSRSSQEMARNEQEGSKVQKIDVHGTEMVSHLEKHTEEVNQASQFHQYVQETVIDTPEDEEIPKVSTKLLKEQFEKSAQEKILYSDKEMTTPAKQIKTESEYEETFKPSSVVSTSSTSCVSTSQRKETSTTRYSDHSVTSSTLAQINATSSGMTEEFPPPPPDVLQTSVDVTAFSQSPELPSPPRRLPVPKDVYSKQRNLYELNRLYKHIHPELRKNLEKDYISEVSEIVSSQMNSGSSVSADVQQARYVFENTNDSSQKDLNSEREYLEWDEILKGEVQSIRWIFENQPLDSINNGSPDEGDISRGIADQEIIAGGDVKYTTWMFETQPIDTLGAYSSDTVENAEKIPELARGDVCTARWMFETRPLDSMNKMHQSQEESAVTISKDITGGDVKTVRYMFETQHLDQLGQLHSVDEVHLLQLRSELKEIKGNVKRSIKCFETQPLYVIRDGSGQMLEIKTVHREDVEKGDVRTARWMFETQPLDTINKDITEIKVVRGISMEENVKGGVSKAKWLFETQPLEKIKESEEVIIEKEKIIGTDVSRKCWMFETQPLDILKEVPDADSLQREEIIGGDVQTTKHLFETLPIEALKDSPDIGKLQKITASEEEKGDVRHQKWIFETQPLEDIRKDKKEYTRTVKLEEVDRGDVKNYTHIFESNNLIKFDASHKIEVEGVTRGAVELNKSLFETTPLYAIQDPLGKYHQVKTVQQEEIVRGDVRSCRWLFETRPIDQFDESIHKFQIIRGISAQEIQTGNVKSAKWLFETQPLDSIKYFSDVEETESKTEQTRDIVKGDVKTCKWLFETQPMESLYEKVSLMTSSEEIHKGDVKTCTWLFETQPLDTIKDDSETAVKLQTVKQEEIQGGDVRTACFLFETENLDSIQGEEVKEIKPVEMDIQAGDVSSMRYKFENQSLDSISSSSEEVLKKIKTLKTEDIQKGNVLNCRWLFENQPIDKIKESQEGDECVKTVTDIQGGDVRKGCFIFETFSLDEIKEESDYISTKKTITEEVIQGDVKSYRMLFETQPLYAIQDREGSYHEVTTVKKEEVIHGDVRGTRWLFETKPLDSINKSETVYVIKSVTQEDIQKGDVSSVRYRFETQPLDQISEESHNIMPSIDHIQGGNVKTSRQFFESENFDKNNYIRTVSVNEIQKGNVKTSTWLFETHTMDELRGEGLEYENIKTVTQEDVQKGDVKQAVWLFENRTFDSIMEAHKGITKMTKEEIPPSDVKTTTWLFETTPLHEFNETRVEKIEIIGKSIKETLEDLYSQKVIQAPGIIIEADEIGDVRMAKYKLMNQASPEIQKEEIIRADLRNIMVNLLSKRDCTEREILISEEEKGNVNLTKTQLLNRSTEFHAEKEEIVKGDVQQAIKNLFSEERSVKKGILIQEDEKGDINMTIYCLLHENDGDTIEREEVIGGDVKRTIHNLLSSTSNNKISERAKIDASERGNVQFFTTCIEAGALDYLKQLHTESNETLTAKKQEGEKEIIGGDVEGTKLLLKKRQSLVERTVSETDIIPGDVHNTVKVFMTEPQSTFGKIPKEEIIKGDLTSTLNSLSQAVNQKTVTKTEEIIKGNMLATLKSLKESSHRWKESKQPDAIPGDIEKAIECLEKATNTKTEILKKELLKDDLETSLRSLKEAQRSFKEVHKEGVIKKDAKAVMAGSSGEQKTDIHQVAVQRNKNSLLQPKPGPFEPAAKWQGGADTLSQTMGKSCHGNLVEERTEVNLPKAPKGTVKIVIDREQNNDALEKSLRRLSNSHHKSNVLESGDKTGVWTDTTGEQHLRDEYMSRQLTSTVSVKNNLTTKESDRAVRELKKDDVFNSIQSAGKTVGKQQTYELRNDHQKMEGFHIKSPKKTKNIKILTDTQSSKPSPTQHPVSMPVGGTYDLSGDFQKQTLLKQETKYSNKDIKKKNINLQPMWQLLPVEQDTSNVTEMKVSEKSHNTFKATNKKRETDVHLKSQDFLMKTNTSTGLKMAMERSLNPINFNPENNVKESECPLPPPSPPPPPPSNASSEIEFPLPPPPPLMMFPEKNGFLPSLSTEKIKAEFESFPGLPLPPPPVDEKSERESSSMFLPPPPPPTPSQKPAHLLSSSAPEKHSGDFMQQYSQKEASNSQNSQAKIITGKTGVLPPPTLPKPKLPKHIKDNKNDFSPKVELATSLSDMECKITTSKDQKKVMVMTSSEHTETKQNVISKSLDERKQLSIDSANCLSHTVPGTSAPRKKQIAPLIKSHSFPESSGQQNPKPYMRKFKTPLMIAEEKYRQQKEEIEKQKQESSYYNIVKTQSQNQHITEVEKEMPLQKTNEEVSLSGIDSECTVVQPSPGSQSNARILGVCSDNQLSTTSPETVAAKRLHHVLAASEDKDKMKKEVLQSSRDIMQSKSACEIKQSHQECSTQQTQQKKYLEQLHLPQSKPISPNFKVKTIKLPTLDHTLNETDHSYESHKQQSEIDVQTFTKKQYLKTKKTEASTECSHKQSLAERHYQLPKKEKRVTVQLPTESIQKNQEDKLKMVPRKQREFSGSDRGKLPGSEEKNQGPSMIGRKEERLITERKHEHLKNKSAPKVVKQKVIDAHLDSQTQNFQQTQIQTAESKAEHKKLPQPYNSLQEEKCLEVKGIQEKQVFSNTKDSKQEITQNKSFFSSVKESQRDDGKGALNIVEFLRKREELQQILSRVKQFEAEPNKSGLKTFQTLLNTIPGWLISEDKREYAVHIAMENNLEKVKEEITHIKTQAEDMLVSYENIIQTAMMSSKTGKPGNKPTSLDETSSKVSNVHVSNNKNSEQKENKIAKEKTVQHQVAAHHEATVRSHVKTHQEIKLDDSNIPPPSLKTRPPSPTFITIESTARRTENPTKNELSQSPKKDSYVEPPPRRPMSQKSEIHRANTSPSPPRSRSEQLVRLKDTTAKLSKGAIPCPAATPVPIVEKRSEIIMSPATLRRQIKIETRGRDSPPTITIPVNINHAASGSFRESVDAQEEIRKVEKRATYVHKDGLNSTDHMVPDTESYDAVEIIRKVAVPPRLSEHTQRYEAANRTVQMAENFVNDPENEINRWFREFEHGPVSEAKSNRRVYAKGETNHNIQQESRTFCKEEFGLTSLGNTSFTDFSCKHPRELREKIPVKQPRICSETRSLSEHFSGMDAFESQIVESKMKTSSSHSSEAGKSGCDFKHAPPTYEDVIAGHILDISDSPKEVRKNFQKTWQESGRVFKGLGYATADASATEMRTTFQEESAFISEAAAPRQGNMYTLSKDSLSNGVPSGRQAEFS

SEQ ID NO: 13145 - protein, 588 aa, Homo sapiens
MPLRKRKSPERTASSKSPEISRSHVNSIKERTSSVGLPSVIPNSTRRVSFAPNLPSMKTSQDIGDSRISLKTLLNAIKTMEGRLEGKIEILASRPLINDESPNFLKQDSVKSILERSKEELSRTVKCRNAALKESQKLKEDLEAVEDRENKKVGNFQRQLAEAKEDNCKVTIMLENVLASHSKMQGALEKVQIELGRRDSEIAGLKKERDLNQQRVQKLEAEVDQWQARMLVMEDQHNSEIESLQKALGVAREDNRKLAMSLEQALQTNNHLQTKLDHIQEQLESKELERQNLETFKDRMTEESKVEAELHAERIEALRKQFQTERETTKKVAQREVAELKKALDEANFRSVEVSRTNRELRQKLAELEKILESNKEKIKNQKTQIKLHLSAKANNAQNIERMKQIEKELKQMELIKDQYQKKNYEQSLSIQRFVCEMTNLQKEMQMLAKSQYDASVRNKQQELHLEAERKIRQELENRCQELEETVRHLKKCKEATENTLKEASVESEQITANLEEAHRWFKHRFDGLQLELTKNRLQRPSGEDRWQEKDQDVKHDVMSNQSVLHRWERKQNLRPMPKKYHSEVQRK

SEQ ID NO: 13146 - protein, 758 aa, Homo sapiens
MLRACQLSGVTAAAQSCLCGKFVLRPLRPCRRYSTSGSSGLTTGKIAGAGLLFVGGGIGGTILYAKWDSHFRESVEKTIPYSDKLFEMVLGPAAYNVPLPKKSIQSGPLKISSVSEVMKESKQPASQLQKQKGDTPASATAPTEAAQIISAAGDTLSVPAPAVQPEESLKTDHPEIGEGKPTPALSEEASSSSIRERPPEEVAARLAQQEKQEQVKIESLAKSLEDALRQTASVTLQAIAAQNAAVQAVNAHSNILKAAMDNSEIAGEKKSAQWRTVEGALKERRKAVDEAADALLKAKEELEKMKSVIENAKKKEVAGAKPHITAAEGKLHNMIVDLDNVVKKVQAAQSEAKVVSQYHELVVQARDDFKRELDSITPEVLPGWKGMSVSDLADKLSTDDLNSLIAHAHRRIDQLNRELAEQKATEKQHITLALEKQKLEEKRAFDSAVAKALEHHRSEIQAEQDRKIEEVRDAMENEMRTQLRRQAAAHTDHLRDVLRVQEQELKSEFEQNLSEKLSEQELQFRRLSQEQVDNFTLDINTAYARLRGIEQAVQSHAVAEEEARKAHQLWLSVEALKYSMKTSSAETPTIPLGSAVEAIKANCSDNEFTQALTAAIPPESLTRGVYSEETLRARFYAVQKLARRVAMIDETRNSLYQYFLSYLQSLLLFPPQQLKPPPELCPEDINTFKLLSYASYCIEHGDLELAAKFVNQLKGESRRVAQDWLKEARMTLETKQIVEILTAYASAVGIGTTQVQPE

SEQ ID NO: 13147 - protein, 1139 aa, Homo sapiens
MMRQAPTARKTTTRRPKPTRPASTGVAGASSSLGPSGSASAGELSSSEPSTPAQTPLAAPIIPTPVLTSPGAVPPLPSPSKEEEGLRAQVRDLEEKLETLRLKRAEDKAKLKELEKHKIQLEQVQEWKSKMQEQQADLQRRLKEARKEAKEALEAKERYMEEMADTADAIEMATLDKEMAEERAESLQQEVEALKERVDELTTDLEILKAEIEEKGSDGAASSYQLKQLEEQNARLKDALVRMRDLSSSEKQEHVKLQKLMEKKNQELEVVRQQRERLQEELSQAESTIDELKEQVDAALGAEEMVEMLTDRNLNLEEKVRELRETVGDLEAMNEMNDELQENARETELELREQLDMAGARVREAQKRVEAAQETVADYQQTIKKYRQLTAHLQDVNRELTNQQEASVERQQQPPPETFDFKIKFAETKAHAKAIEMELRQMEVAQANRHMSLLTAFMPDSFLRPGGDHDCVLVLLLMPRLICKAELIRKQAQEKFELSENCSERPGLRGAAGEQLSFAAGLVYSLSLLQATLHRYEHALSQCSVDVYKKVGSLYPEMSAHERSLDFLIELLHKDQLDETVNVEPLTKAIKYYQHLYSIHLAEQPEDCTMQLADHIKFTQSALDCMSVEVGRLRAFLQGGQEATDIALLLRDLETSCSDIRQFCKKIRRRMPGTDAPGIPAALAFGPQVSDTLLDCRKHLTWVVAVLQEVAAAAAQLIAPLAENEGLLVAALEELAFKASEQIYGTPSSSPYECLRQSCNILISTMNKLATAMQEGEYDAERPPSKPPPVELRAAALRAEITDAEGLGLKLEDRETVIKELKKSLKIKGEELSEANVRLSLLEKKLDSAAKDADERIEKVQTRLEETQALLRKKEKEFEETMDALQADIDQLEAEKAELKQRLNSQSKRTIEGLRGPPPSGIATLVSGIAGGAIPGQAPGSVPGPGLVKDSPLLLQQISAMRLHISQLQHENSILKGAQMKASLASLPPLHVAKLSHEGPGSELPAGALYRKTSQLLETLNQLSTHTHVVDITRTSPAAKSPSAQLMEQVAQLKSLSDTVEKLKDEVLKETVSQRPGATVPTDFATFPSSAFLRAKEEQQDDTVYMGKVTFSCAAGFGQRHRLVLTQEQLHQLHSRLIS

SEQ ID NO: 13148 - protein, 823 aa, Homo sapiens
MKINNEEIVSDPIYIEVQGLPHFTKQPESMNVTRNTAFNLTCQAVGPPEPVNIFWVQNSSRVNEQPEKSPSVLTVPGLTEMAVFSCEAHNDKGLTVSKGVQINIKAIPSPPTEVSIRNSTAHSILISWVPGFDGYSPFRNCSIQVKEADPLSNGSVMIFNTSALPHLYQIKQLQALANYSIGVSCMNEIGWSAVSPWILASTTEGAPSVAPLNVTVFLNESSDNVDIRWMKPPTKQQDGELVGYRISHVWQSAGISKELLEEVGQNGSRARISVQVHNATCTVRIAAVTRGGVGPFSDPVKIFIPAHGWVDYAPSSTPAPGNADPVLIIFGCFCGFILIGLILYISLAIRKRVQETKFGNAFTEEDSELVVNYIAKKSFCRRAIELTLHSLGVSEELQNKLEDVVIDRNLLILGKILGEGEFGSVMEGNLKQEDGTSLKVAVKTMKLDNSSQREIEEFLSEAACMKDFSHPNVIRLLGVCIEMSSQGIPKPMVILPFMKYGDLHTYLLYSRLETGPKHIPLQTLLKFMVDIALGMEYLSNRNFLHRDLAARNCMLRDDMTVCVADFGLSKKIYSGDYYRQGRIAKMPVKWIAIESLADRVYTSKSDVWAFGVTMWEIATRGMTPYPGVQNHEMYDYLLHGHRLKQPEDCLDELYEIMYSCWRTDPLDRPTFSVLRLQLEKLLESLPDVRNQADVIYVNTQLLESSEGLAQGSTLAPLDLNIDPDSIIASCTPRAAISVVTAEVHDSKPHEGRYILNGGSEEWEDLTSAPSAAVTAEKNSVLPGERLVRNGVSWSHSSMLPLGSSLPDELLFADDSSEGSEVLM

SEQ ID NO: 13149 - protein, 637 aa, Homo sapiens
MIQSDKGADPPDKKDMKLSTATNPQNGLSQILRLVLQELSLFYGRDVNGVCLLYDLLHSPWLQALLKIYDCLQEFKEKKLVPATPHAQVLSYEVVELLRETPTSPEIQELRQMLQAPHFKALLSAHDTIAQKDFEPLLPPLPDNIPESEEAMRIVCLVKNQQPLGATIKRHEMTGDILVARIIHGGLAERSGLLYAGDKLVEVNGVSVEGLDPEQVIHILAMSRGTIMFKVVPVSDPPVNSQQMVYVRAMTEYWPQEDPDIPCMDAGLPFQKGDILQIVDQNDALWWQARKISDPATCAGLVPSNHLLKRKQREFWWSQPYQPHTCLKSTLSISMEEEDDMKIDEKCVEADEETFESEELSEDKEEFVGYGQKFFIAGFRRSMRLCRRKSHLSPLHASVCCTGSCYSAVGAPYEEVVRYQRRPSDKYRLIVLMGPSGVGVNELRRQLIEFNPSHFQSAVPHTTRTKKSYEMNGREYHYVSKETFENLIYSHRMLEYGEYKGHLYGTSVDAVQTVLVEGKICVMDLEPQDIQGVRTHELKPYVIFIKPSNMRCMKQSRKNAKVITDYYVDMKFKDEDLQEMENLAQRMETQFGQFFDHVIVNDSLHDACAQLLSAIQKAQEEPQWVPATWISSDTESQ

SEQ ID NO: 13150 - protein, 380 aa, Homo sapiens
MGAFLDKPKTEKHNAHGAGNGLRYGLSSMQGWRVEMEDAHTAVVGIPHGLEDWSFFAVYDGHAGSRVANYCSTHLLEHITTNEDFRAAGKSGSALELSVENVKNGIRTGFLKIDEYMRNFSDLRNGMDRSGSTAVGVMISPKHIYFINCGDSRAVLYRNGQVCFSTQDHKPCNPREKERIQNAGGSVMIQRVNGSLAVSRALGDYDYKCVDGKGPTEQLVSPEPEVYEILRAEEDEFIILACDGIWDVMSNEELCEYVKSRLEVSDDLENVCNWVVDTCLHKGSRDNMSIVLVCFSNAPKVSDEAVKKDSELDKHLESRVEEIMEKSGEEGMPDLAHVMRILSAENIPNLPPGGGLAGKRNVIEAVYSRLNPHRESDGQK

SEQ ID NO: 13151 - protein, 688 aa, Homo sapiens
MGKKIKKEVEPPPKDVFDPLMIESKKAATVVLMLNSPEEEILAKACEAIYKFALKGEENKTTLLELGAVEPLTKLLTHEDKIVRRNATMIFGILASNNDVKKLLRELDVMNSVIAQLAPEEEVVIHEFASLCLANMSAEYTSKVQIFEHGGLEPLIRLLSSPDPDVKKNSMECIYNLVQDFQCRAKLQELNAIPPILDLLKSEYPVIQLLALKTLGVIANDKESRTMLRDNQGLDHLIKILETKELNDLHIEALAVIANCLEDMDTMVQIQQTGGLKKLLSFAENSTIPDIQKNAAKAITKAAYDPENRKLFHEQEVEKCLVALLGSENDGTKIAASQAISAMCENSGSKDFFNNQGIPQLIQLLKSDNEEVREAAALALANLTTCNPANANAAAEADGIDPLINLLSSKRDGAIANAATVLTNMAMQEPLRLNIQNHDIMHAIISPLRSANTVVQSKAALAVTATACDVEARTELRNSGGLEPLVELLRSKNDEVRKHASWAVMVCAGDELTANELCRLGALDILEEVNVSGTRKNKFSEAAYNKLLNNNLSLKYSQTGYLSSSNIINDGFYDYGRINPGTKLLPLKELCLQEPSDLRAVLLINSKSYVSPPSSMEDKSDVGYGRSISSSSSLRRSSKEKNKKNSYHFSAGFGSPIEDKSEPASGRNTVLSKSATKEKGWSSLPTSR

SEQ ID NO: 13152 - protein, 579 aa, Homo sapiens
MIQSDKGADPPDKKDMKLSTATNPQNGLSQILRLVLQELSLFYGRDVNGVCLLYDLLHSPWLQALLKIYDCLQEFKEKKLVPATPHAQVLSYEALLSAHDTIAQKDFEPLLPPLPDNIPESEEAMRIVCLVKNQQPLGATIKRHEMTGDILVARIIHGGLAERSGLLYAGDKLVEVNGVSVEGLDPEQVIHILAMSRGTIMFKVVPVSDPPVNSQQMVYVRAMTEYWPQEDPDIPCMDAGLPFQKGDILQIVDQNDALWWQARKISDPATCAGLVPSNHLLKRKQREFWWSQPYQPHTCLKSTLYKEEFVGYGQKFFIAGFRRSMRLCRRKSHLSPLHASVCCTGSCYSAVGAPYEEVVRYQRRPSDKYRLIVLMGPSGVGVNELRRQLIEFNPSHFQSAVPHTTRTKKSYEMNGREYHYVSKETFENLIYSHRMLEYGEYKGHLYGTSVDAVQTVLVEGKICVMDLEPQDIQGVRTHELKPYVIFIKPSNMRCMKQSRKNAKVITDYYVDMKFKDEDLQEMENLAQRMETQFGQFFDHVIVNDSLHDACAQLLSAIQKAQEEPQWVPATWISSDTESQ

SEQ ID NO: 13153 - protein, 954 aa, Homo sapiens
MTAREHSPRHGARARAMQRASTIDVAADMLGLSLAGNIQDPDEPILEFSLACSELHTPSLDRKPNSFVAVSVTTPPQAFWTKHAQTEIIEGTNNPIFLSSIAFFQDSLINQMTQVKLSVYDVKDRSQGTMYLLGSGTFIVKDLLQDRHHRLHLTLRSAESDRVGNITVIGWQMEEKSDQRPPVTRSVDTVNGRMVLPVDESLTEALGIRSKYASLRKDTLLKSVFGGAICRMYRFPTTDGNHLRILEQMAESVLSLHVPRQFVKLLLEEDAARVCELEELGELSPCWESLRRQIVTQYQTIILTYQENLTDLHQYRGPSFKASSLKADKKLEFVPTNLHIQRMRVQDDGGSDQNYDIVTIGAPAAHCQGFKSGGLRKKLHKFEETKKHFEECCTSSGCQSIIYIPQDVVRAKEIIAQINTLKTQVSYYAERLSRAAKDRSATGLERTLAILADKTRQLVTVCDCKLLANSIHGLNAARPDYIASKASPTSTEEEQVMLRNDQDTLMARWTGRNSRSSLQVDWHEEEWEKVWLNVDKSLECIIQRVDKLLQKERLHGEGCEDVFPCAGSCTSKKDCSPPPEESSPGEWSEALYPLLTTLTDCVAMMSDKAKKAMVFLLMQDSAPTIATYLSLQYRRDVVFCQTLTALICGFIIKLRNCLHDDGFLRQLYTIGLLAQFESLLSTYGEELAMLEDMSLGIMDLRNVTFKVTQATSSASADMLPVITGNRDGFNVRVPLPGPLFDALPREIQSGMLLRVQPVLFNVGINEQQTLAERFGDTSLQEVINVESLVRLNSYFEQFKEVLPEDCLPRSRSQTCLPELLRFLGQNVHARKNKNVDILWQAAEICRRLNGVRFTSCKSAKDRTAMSVTLEQCLILQHEHGMAPQVFTQALECMRSIGTREVVTQKNLSGLVPIRDLRLDPSLLCSIPLLALSPNLLIVWLFLSIAYLVTKLRCK

SEQ ID NO: 13154 - protein, 1382 aa, Homo sapiens
MLRKLTIEQINDWFTIGKTVTNVELLGAPPAFPAGAAREEVQRQDVAPGAGPAAQAPALAQAPARPAAAFERSLSQRSSEVEYINKYRQLEAQELDVCRSVQPTSGPGPRPSLAKLSSVTCIPGTTYKYPDLPISRYKEEVVSLIESNSVVIIHGATGSGKSTQLPQYILDHYVQRSAYCSIVVTQPRKIGASSIARWISKERAWTLGGVVGYQVGLEKIATEDTRLIYMTTGVLLQKIVSAKSLMEFTHIIIDEVHERTEEMDFLLLVVRKLLRTNSRFVKVVLMSATISCKEFADYFAVPVQNKMNPAYIFEVEGKPHSVEEYYLNDLEHIHHSKLSPHLLEEPVITKDIYEVAVSLIQMFDDLDMKESGNKAWSGAQFVLERSSVLVFLPGLGEINYMHELLTSLVHKRLQVYPLHSSVALEEQNNVFLSPVPGYRKIILSTNIAESSVTVPDVKYVIDFCLTRTLVCDEDTNYQSLRLSWASKTSCNQRKGRAGRVSRGYCYRLVHKDFWDNSIPDHVVPEMLRCPLGSTILKVKLLDMGEPRALLATALSPPGLSDIERTILLLKEVGALAVSGQREDENPHDGELTFLGRVLAQLPVNQQLGKLIVLGHVFGCLDECLIIAAALSLKNFFAMPFRQHLDGYRNKVNFSGSSKSDCIALVEAFKTWKACRQTGELRYPKDELNWGRLNYIQIKRIREVAELYEELKTRISQFNMHVDSRRPVMDQEYIYKQRFILQVVLAGAFYPNYFTFGQPDEEMAVRELAGKDPKTTVVLKHIPPYGFLYYKQLQSLFRQCGQVKSIVFDGAKAFVEFSRNPTERFKTLPAVYMAIKMSQLKVSLELSVHSAEEIEGKVQGMNVSKLRNTRVNVDFQKQTVDPMQVSFNTSDRSQTVTDLLLTIDVTEVVEVGHFWGYRIDENNSEILKKLTAEINQLTLVPLPTHPHPDLVCLAPFADFDKQRYFRAQVLYVSGNSAEVFFVDYGNKSHVDLHLLMEIPCQFLELPFQALEFKICKMRPSAKSLVCGKHWSDGASQWFASLVSGCTLLVKVFSVVHSVLHVDVYQYSGVQDAINIRDVLIQQGYAELTEESYESKQSHEVLKGLFSKSVENMTDGSVPFPMKDDEKYLIRILLESFSTNKLGTPNCKAELHGPFNPYELKCHSLTRISKFRCVWIEKESINSVIISDAPEDLHQRMLVAASLSINATGSTMLLRETSLMPHIPGLPALLSMLFAPVIELRIDQNGKYYTGVLCGLGWNPATGASILPEHDMELAFDVQFSVEDVVEVNILRAAINKLVCDGPNGCKCLGPERVAQLQDIARQKLLGLFCQSKPREKIVPKWHEKPYEWNQVDPKLVMEQADRESSRGKNTFLYQLHKLVVLGT

SEQ ID NO: 13155 - protein, 564 aa, Homo sapiens
MAEDKSKRDSIEMSMKGCQTNNGFVHNEDILEQTPDPGSSTDNLKHSTRGILGSQEPDFKGVQPYAGMPKEVLFQFSGQARYRIPREILFWLTVASVLVLIAATIAIIALSPKCLDWWQEGPMYQIYPRSFKDSNKDGNGDLKGIQDKLDYITALNIKTVWITSFYKSSLKDFRYGVEDFREVDPIFGTMEDFENLVAAIHDKGLKLIIDFIPNHTSDKHIWFQLSRTRTGKYTDYYIWHDCTHENGKTIPPNNWLSVYGNSSWHFDEVRNQCYFHQFMKEQPDLNFRNPDVQEEIKEILRFWLTKGVDGFSLDAVKFLLEAKHLRDEIQVNKTQIPDTVTQYSELYHDFTTTQVGMHDIVRSFRQTMDQYSTEPGRYRFMGTEAYAESIDRTVMYYGLPFIQEADFPFNNYLSMLDTVSGNSVYEVITSWMENMPEGKWPNWMIGGPDSSRLTSRLGNQYVNVMNMLLFTLPGTPITYYGEEIGMGNIVAANLNESYDINTLRSKSPMQWDNSSNAGFSEASNTWLPTNSDYHTVNVDSCSVTHARVQWRDLGTLQPLLPGFK

SEQ ID NO: 13156 - protein, 496 aa, Homo sapiens
MGRGVRVLLLLSLLHCAGGSEGRKTWRRRGQQPPPPPRTEAAPAAGQPVESFPLDFTAVEGNMDSFMAQVKSLAQSLYPCSAQQLNEDLRLHLLLNTSVTCNDGSPAGYYLKESRGSRRWLLFLEGGWYCFNRENCDSRYDTMRRLMSSRDWPRTRTGTGILSSQPEENPYWWNANMVFIPYCSSDVWSGASSKSEKNEYAFMGALIIQEVVRELLGRGLSGAKVLLLAGSSAGGTGVLLNVDRVAEQLEKLGYPAIQVRGLADSGWFLDNKQYRHTDCVDTITCAPTEAIRRGIRYWNGVVPERCRRQFQEGEEWNCFFGYKVYPTLRCPVFVVQWLFDEAQLTVDNVHLTGQPVQEGLRLYIQNLGRELRHTLKDVPASFAPACLSHEIIIRSHWTDVQVKGTSLPRALHCWDRSLHDSHKASKTPLKGCPVHLVDSCPWPHCNPSCPTVRDQFTGQEMNVAQFLMHMGFDMQTVAQPQGLEPSELLGMLSNGS

SEQ ID NO: 13157 - protein, 455 aa, Homo sapiens
MAGGGGDLSTRMFTEDQGVDDRLLYDIVFKHFKRNKVEISNAIKKTFPFLEGLRDRDLITNKMFEDSQDSCRNLVPVQRVVYNVLSELEKTFNLPVLEALFSDVNMQEYPDLIHIYKGFENVIHDKLPLQESEEEEREERSGLQLSLEQGTGENSFRSLTWPPSGSPSHAGTTPPENGLSEHPCETEQINAKRKDTTSDKDDSLGSQQTNEQCAQKAEPTESCEQIAVQVNNGDAGREMPCPLPCDEESPEAELHNHGIQINSCSVRLVDIKKEKPFSNSKVECQAQARTHHNQASDIIVISSEDSEGSTDVDEPLEVFISAPRSEPVINNDNPLESNDEKEGQEATCSRPQIVPEPMDFRKLSTFRESFKKRVIGQDHDFSESSEEEAPAEASSGALRSKHGEKAPMTSRSTSTWRIPSRKRRFSSSDFSDLSNGEELQETCSSSLRRGSGKED

SEQ ID NO: 13158 - protein, 413 aa, Homo sapiens
MSVQSSSGSLEGPPSWSQLSTSPTPGSAAAARSLLNHTPPSGRPREGAMDELHSLDPRRQELLEARFTGVASGSTGSTGSCSVGAKASTNNESSNHSFGSLGSLSDKESETPEKKQSESSRGRKRKAENQNESSQGKSIGGRGHKISDYFEYQGGNGSSPVRGIPPAIRSPQNSHSHSTPSSSVRPNSPSPTALAFGDHPIVQPKQLSFKIIQTDLTMLKLAALESNKIQDLEKKEGRIDDLLRANCDLRRQIDEQQKLLEKYKERLNKCISMSKKLLIEKSTQEKLSSREKSMQDRLRLGHFTTVRHGASFTEQWTDGFAFQNLVKQQEWVNQQREDIERQRKLLAKRKPPTANNSQAPSTNSEPKQRKNKAVNGAENDPFVRPNLPQLLTLAEYHEQEEIFKLRLGHLKKR

SEQ ID NO: 13159 - protein, 1237 aa, Homo sapiens
MDRPLSSSAEAEEELEWQVASRRRKAWAKCRSSWQASETEDLSTEATTQDEEEDEEEDLPGAQLPAAGGRGNVPNEKIAIWLKDCRTPLGASLDEQSSSTLKGVLVRNGGSFEDDLSLGAEANHLHESDAQIENCNNILAKERRLQFHQKGRSMNSTGSGKSSGTVSSVSELLELYEEDPEEILYNLGFGRDEPDIASKIPSRFFNSSSFAKGIDIKVFLSAQMQRMEVENPNYALTSRFRQIEVLTTVANAFSSLYSQVSGTPLQRIGSMSSVTSNKETDPPPPLTRSNTANRLMKTLSKLNLCVDKTEKGESSSPSPSAEKGKILNVSVIEESGNKNDQKSQKIMKKKESSSMLATVKEEVSGSSAAVTENADSDRISDEANSNFNQGTENEQSKETQSHESKLGEESGIVESKLDSDFNISSHSELENSSELKSVHISTPEKEPCAPLTIPSIRNIMTQQKDSFEMEEVQSTEGEAPHVPATYQLGLTKSKRDHLLRTASQHSDSSGFAEDSTDCLSLNHLQVQESLQAMGSSADSCDSETTVTSLGEDLATPTAQDQPYFNESEEESLVPLQKGLEKAAAVADKRKSGSQDFPQCNTIENTGTKQSTCSPGDHIIEITEVEEDLFPAETVELLREASAESDVGKSSESEFTQYTTHHILKSLASIEAKCSDMSSENTTGPPSSMDRVNTALQRAQMKVCSLSNQRMGRSLLKSKDLLKQRYLFAKAGYPLRRSQSLPTTLLSPVRVVSSVNVRLSPGKETRCSPPSFTYKYTPEEEQELEKRVMEHDGQSLVKSTIFISPSSVKKEEAPQSEAPRVEECHHGRTPTCSRLAPPPMSQSTCSLHSIHSEWQERPLCEHTRTLSTHSVPNISGATCSAFASPFGCPYSHRHATYPYRVCSVNPPSAIEMQLRRVLHDIRNSLQNLSQYPMMRGPDPAAAPYSTQKSSVLPLYENTFQELQVMRRSLNLFRTQMMDLELAMLRQQTMVYHHMTEEERFEVDQLQGLRNSVRMELQDLELQLEERLLGLEEQLRAVRMPSPFRSSALMVTELMQEQSYLKSELGLGLGEMGFEIPPGESSESVFSQATSESSSVCSGPSHANRRTGVPSTASVGKSKTPLVARKKVFRASVALTPTAPSRTGSVQTPPDLESSEEVDAAEGAPEVVGPKSEVEEGHGKLPSMPAAEEMHKNVEQDELQQVIREIKESIVGEIRREIVSGLLAAVSSSKASNSKQDYH

SEQ ID NO: 13160 - protein, 1167 aa, Homo sapiens
LMCGRAAEAAASSRTPGREMGQAVTRRLGAGARAAPRRAMDGRTPRPQDAPARRKPKAKAPLPPAETKYTDVSSAADSVESTAFIMEQKENMIDKDVELSVVLPGDIIKSTTVHGSKPMMDLLIFLCAQYHLNPSSYTIDLLSAEQNHIKFKPNTPIGMLEVEKVILKPKMLDKKKPTPIIPEKTVRVVINFKKTQKTIVRVSPHASLQELAPIICSKCEFDPLHTLLLKDYQSQEPLDLTKSLNDLGLRELYAMDVNRESCQISQNLDIMKEKENKGFFSFFQRSKKKRDQTASAPATPLVNKHRPTFTRSNTISKPYISNTLPSDAPKKRRAPLPPMPASQSVPQDLAHIQERPASCIVKSMSVDETDKSPCEAGRVRAGSLQLSSMSAGNSSLRRTKRKAPSPPSKIPPHQSDENSRVTALQPVDGVPPDSASEANSPEELSSPAGISSDYSLEEIDEKEELSEVPKVEAENISPKSQDIPFVSTDIINTLKNDPDSALGNGSGEFSQNSMEEKQETKSTDGQEPHSVVYDTSNGKKVVDSIRNLKSLGPNQENVVQNEIIVYPENTEDNMKNGVKKTEINVEGVAKNNNIDMEVERPSNSEAHETDTAISYKENHLAASSVPDQKLNQPSAEKTKDAAIQTTPSCNSFDGKHQDHNLSDSKVEECVQTSNNNISTQHSCLSSQDSVNTSREFRSQGTLIIHSEDPLTVKDPICAHGNDDLLPPVDRIDKNSTASYLKNYPLYRQDYNPKPKPSNEITREYIPKIGMTTYKIVPPKSLEISKDWQSETIEYKDDQDMHALGKKHTHENVKETAIQTEDSAISESPEEPLPNLKPKPNLRTEHQVPSSVSSPDDAMVSPLKPAPKMTRDTGTAPFAPNLEEINNILESKFKSRASNAQAKPSSFFLQMQKRVSGHYVTSAAAKSVHAAPNPAPKELTNKEAERDMLPSPEQTLSPLSKMPHSVPQPLVEKTDDDVIGQAPAEASPPPIAPKPVTIPASQVSTQNLKTLKTFGAPRPYSSSGPSPFALAVVKRSQSFSKERTESPSASALVQPPANTEEGKTHSVNKFVDIPQLGVSDKENNSAHNEQNSQIPTPTDGPSFTVMRQSSLTFQSSDPEQMRQSLLTAIRSGEAAAKLKRVTIPSNTISVNGRSRLSHSMSPDAQDGH

SEQ ID NO: 13161 - protein, 1256 aa, Homo sapiens
MSAEASARPLRVGSRVEVIGKGHRGTVAYVGATLFATGKWVGVILDEAKGKNDGTVQGRKYFTCDEGHGIFVRQSQIQVFEDGADTTSPETPDSSASKVLKREGTDTTAKTSKLRGLKPKKAPTARKTTTRRPKPTRPASTGVAGASSSLGPSGSASAGELSSSEPSTPAQTPLAAPIIPTPVLTSPGAVPPLPSPSKEEEGLRAQVRDLEEKLETLRLKRAEDKAKLKELEKHKIQLEQVQEWKSKMQEQQADLQRRLKEARKEAKEALEAKERYMEEMADTADAIEMATLDKEMAEERAESLQQEVEALKERVDELTTDLEILKAEIEEKGSDGAASSYQLKQLEEQNARLKDALVRMRDLSSSEKQEHVKLQKLMEKKNQELEVVRQQRERLQEELSQAESTIDELKEQVDAALGAEEMVEMLTDRNLNLEEKVRELRETVGDLEAMNEMNDELQENARETELELREQLDMAGARVREAQKRVEAAQETVADYQQTIKKYRQLTAHLQDVNRELTNQQEASVERQQQPPPETFDFKIKFAETKAHAKAIEMELRQMEVAQANRHMSLLTAFMPDSFLRPGGDHDCVLVLLLMPRLICKAELIRKQAQEKFELSENCSERPGLRGAAGEQLSFAAGLVYSLSLLQATLHRYEHALSQCSVDVYKKVGSLYPEMSAHERSLDFLIELLHKDQLDETVNVEPLTKAIKYYQHLYSIHLAEQPEDCTMQLADHIKFTQSALDCMSVEVGRLRAFLQGGQEATDIALLLRDLETSCSDIRQFCKKIRRRMPGTDAPGIPAALAFGPQVSDTLLDCRKHLTWVVAVLQEVAAAAAQLIAPLAENEGLLVAALEELAFKASEQIYGTPSSSPYECLRQSCNILISTMNKLATAMQEGEYDAERPPSKPPPVELRAAALRAEITDAEGLGLKLEDRETVIKELKKSLKIKGEELSEANVRLSLLEKKLDSAAKDADERIEKVQTRLEETQALLRKKEKEFEETMDALQADIDQLEAEKAELKQRLNSQSKRTIEGLRGPPPSGIATLVSGIAGGAIPGQAPGSVPGPGLVKDSPLLLQQISAMRLHISQLQHENSILKGAQMKASLASLPPLHVAKLSHEGPGSELPAGALYRKTSQLLETLNQLSTHTHVVDITRTSPAAKSPSAQLMEQVAQLKSLSDTVEKLKDEVLKETVSQRPGATVPTDFATFPSSAFLRAKEEQQDDTVYMGKVTFSCAAGFGQRHRLVLTQEQLHQLHSRLIS

SEQ ID NO: 13162 - protein, 466 aa, Homo sapiens
MKPHLKQWRQRMLFGIFAWGLLFLLIFIYFTDSNPAEPVPSSLSFLETRRLLPVQGKQRAIMGAAHEPSPPGGLDARQALPRAHPAGSFHAGPGDLQKWAQSQDGFEHKEFFSSQVGRKSQSAFYPEDDDYFFAAGQPGWHSHTQGTLGFPSPGEPGPREGAFPAAQVQRRRVKKRHRRQRRSHVLEEGDDGDRLYSSMSRAFLYRLWKGNVSSKMLNPRLQKAMKDYLTANKHGVRFRGKREAGLSRAQLLCQLRSRARVRTLDGTEAPFSALGWRRLVPAVPLSQLHPRGLRSCAVVMSAGAILNSSLGEEIDSHDAVLRFNSAPTRGYEKDVGNKTTIRIINSQILTNPSHHFIDSSLYKDVILVAWDPAPYSANLNLWYKKPDYNLFTPYIQHRQRNPNQPFYILHPKFIWQLWDIIQENTKEKIQPNPPSSGFIGSFVKIGHIRACSEPRSRDCTPAWTTE

SEQ ID NO: 13163 - protein, 391 aa, Homo sapiens
MAEDKSKRDSIEMSMKGCQTNNGFVHNEDILEQTPDPGSSTDNLKHSTRGILGSQEPDFKGVQPYAGMPKEVLFQFSGQARYRIPREILFWLTVASVLVLIAATIAIIALSPKCLDWWQEGPMYQIYPRSFKDSNKDGNGDLKGIQDKLDYITALNIKTVWITSFYKSSLKDFRYGVEDFREVDPIFGTMEDFENLVAAIHDKGLKLIIDFIPNHTSDKHIWFQLSRTRTGKYTDYYIWHDCTHENGKTIPPNNWLSVYGNSSWHFDEVRNQCYFHQFMKEQPDLNFRNPDVQEEIKEILRFWLTKGVDGFSLDAVKFLLEAKHLRDEIQVNKTQIPDTVTQYSELYHDFTTTQVGMHDIVRSFRQTMDQYSTEPGRYRLTTAYALISSQA

SEQ ID NO: 13164 - protein, 822 aa, Homo sapiens
MSNAMYNKMWHQTQEALGALLDKEPQKMIEPQRNQVFIFQTLATFYVKYVQIFRNLENVYDQFVHPQKRILIRKVLDGVMGRILELKNEMVELELTEFHYFDDILQDLKLAPQQLDIPIPKYFLKEKLEVIKGREKILAQILADSGIDTSDMKYPVKSIPFDEAVKLIQIAERARQGRLRALFMKQIYLQEYRAKQSKMLGKKVTDTWAAALRIQKVWRRFHQRKETEKLREEEMIFLGMNPPPLFNEVSATVIQAEKVDRLRNEVQIKHEEDYREALVTIKNDLKLIEGVDIKENLQDQIRHWFIECRNLTGTFPDYPDVEEGGSAIIFSDKTIQQVIEDIIANQEEEEKNKKKKKKKEKQPKKAKKQKKGTKEKNKEEDEKWKMSPSLFLPAMKEGCNAYKEIWMKKDESWNFSQDYDPELIKEEKRKELQSEIRIQVDELMRQELKNLKLAVDRERERPVKAGKKKDKKGKKGKKKEKKAKKDKDLTADRTIESLYKELVEEGLLIQALKVNLSDYIGEYSYLGTTLRQVSIEPMPSLLDVRQLITLYGIWPLGSAAVHEKAPLVKSLLLAGPSGVGKKMLVHAICTETGANLFNLSSSNIAGKYPGKNGLQMMLHAVFKVARQLQPSVVWIEDTEKTFYKKVPNAEKMNEPKRLKKHLPQILKLLKPDDRILIVGTTRRPFDAELQSFCKVYQKIILVPRPDYASRYVLWKQIIERNGGVLTSALNVSCLAKVTDGFTQGHIVEVVKGVLTDQRIRRQIHKPLTAVEFITAITSMNPVYKEEEESFKNWYAKTPLGKKRALAITGGSTEKAKDKGKRK

SEQ ID NO: 13165 - protein, 2530 aa, Homo sapiens
MTTLLWVFVTLRVITAAVTVETSDHDNSLSVSIPQPSPLRVLLGTSLTIPCYFIDPMHPVTTAPSTAPLAPRIKWSRVSKEKEVVLLVATEGRVRVNSAYQDKVSLPNYPAIPSDATLEVQSLRSNDSGVYRCEVMHGIEDSEATLEVVVKGIVFHYRAISTRYTLDFDRAQRACLQNSAIIATPEQLQAAYEDGFHQCDAGWLADQTVRYPIHTPREGCYGDKDEFPGVRTYGIRDTNETYDVYCFAEEMEGEVFYATSPEKFTFQEAANECRRLGARLATTGQLYLAWQAGMDMCSAGWLADRSVRYPISKARPNCGGNLLGVRTVYVHANQTGYPDPSSRYDAICYTGEDFVDIPENFFGVGGEEDITVQTVTWPDMELPLPRNITEGEARGSVILTVKPIFEVSPSPLEPEEPFTFAPEIGATAFAEVENETGEATRPWGFPTPGLGPATAFTSEDLVVQVTAVPGQPHLPGGVVFHYRPGPTRYSLTFEEAQQACLRTGAVIASPEQLQAAYEAGYEQCDAGWLRDQTVRYPIVSPRTPCVGDKDSSPGVRTYGVRPSTETYDVYCFVDRLEGEVFFATRLEQFTFQEALEFCESHNATLATTGQLYAAWSRGLDKCYAGWLADGSLRYPIVTPRPACGGDKPGVRTVYLYPNQTGLPDPLSRHHAFCFRGISAVPSPGEEEGGTPTSPSGVEEWIVTQVVPGVAAVPVEEETTAVPSGETTAILEFTTEPENQTEWEPAYTPVGTSPLPGILPTWPPTGAATEESTEGPSATEVPSASEEPSPSEVPFPSEEPSPSEEPFPSVRPFPSVELFPSEEPFPSKEPSPSEEPSASEEPYTPSPPVPSWTELPSSGEESGAPDVSGDFTGSGDVSGHLDFSGQLSGDRASGLPSGDLDSSGLTSTVGSGLPVESGLPSGDEERIEWPSTPTVGELPSGAEILEGSASGVGDLSGLPSGEVLETSASGVGDLSGLPSGEVLETTAPGVEDISGLPSGEVLETTAPGVEDISGLPSGEVLETTAPGVEDISGLPSGEVLETTAPGVEDISGLPSGEVLETTAPGVEDISGLPSGEVLETTAPGVEDISGLPSGEVLETAAPGVEDISGLPSGEVLETAAPGVEDISGLPSGEVLETAAPGVEDISGLPSGEVLETAAPGVEDISGLPSGEVLETAAPGVEDISGLPSGEVLETAAPGVEDISGLPSGEVLETAAPGVEDISGLPSGEVLETAAPGVEDISGLPSGEVLETAAPGVEDISGLPSGEVLETAAPGVEDISGLPSGEVLETAAPGVEDISGLPSGEVLETAAPGVEDISGLPSGEVLETAAPGVEDISGLPSGEVLETAAPGVEDISGLPSGEVLETAAPGVEDISGLPSGEVLETAAPGVEDISGLPSGEVLETTAPGVEEISGLPSGEVLETTAPGVDEISGLPSGEVLETTAPGVEEISGLPSGEVLETSTSAVGDLSGLPSGGEVLEISVSGVEDISGLPSGEVVETSASGIEDVSELPSGEGLETSASGVEDLSRLPSGEEVLEISASGFGDLSGLPSGGEGLETSASEVGTDLSGLPSGREGLETSASGAEDLSGLPSGKEDLVGSASGDLDLGKLPSGTLGSGQAPETSGLPSGFSGEYSGVDLGSGPPSGLPDFSGLPSGFPTVSLVDSTLVEVVTASTASELEGRGTIGISGAGEISGLPSSELDISGRASGLPSGTELSGQASGSPDVSGEIPGLFGVSGQPSGFPDTSGETSGVTELSGLSSGQPGISGEASGVLYGTSQPFGITDLSGETSGVPDLSGQPSGLPGFSGATSGVPDLVSGTTSGSGESSGITFVDTSLVEVAPTTFKEEEGLGSVELSGLPSGEADLSGKSGMVDVSGQFSGTVDSSGFTSQTPEFSGLPSGIAEVSGESSRAEIGSSLPSGAYYGSGTPSSFPTVSLVDRTLVESVTQAPTAQEAGEGPSGILELSGAHSGAPDMSGEHSGFLDLSGLQSGLIEPSGEPPGTPYFSGDFASTTNVSGESSVAMGTSGEASGLPEVTLITSEFVEGVTEPTISQELGQRPPVTHTPQLFESSGKVSTAGDISGATPVLPGSGVEVSSVPESSSETSAYPEAGFGASAAPEASREDSGSPDLSETTSAFHEANLERSSGLGVSGSTLTFQEGEASAAPEVSGESTTTSDVGTEAPGLPSATPTASGDRTEISGDLSGHTSQLGVVISTSIPESEWTQQTQRPAETHLEIESSSLLYSGEETHTVETATSPTDASIPASPEWKRESESTAAAPARSCAEEPCGAGTCKETEGHVICLCPPGYTGEHCNIDQEVCEEGWNKYQGHCYRHFPDRETWVDAERRCREQQSHLSSIVTPEEQEFVNNNAQDYQWIGLNDRTIEGDFRWSDGHPMQFENWRPNQPDNFFAAGEDCVVMIWHEKGEWNDVPCNYHLPFTCKKGTVACGEPPVVEHARTFGQKKDRYEINSLVRYQCTEGFVQRHMPTIRCQPSGHWEEPQITCTDPTTYKRRLQKRSSRHPRRSRPSTAH

SEQ ID NO: 13166 - protein, 1393 aa, Homo sapiens
MVEPGQDLLLAALSESGISPNDLFDIDGGDAGLATPMPTPSVQQSVPLSALELGLETEAAVPVKQEPETVPTPALLNVRQQPPSTTTFVLNQINHLPPLGSTIVMTKTPPVTTNRQTITLTKFIQTTASTRPSVSAPTVRNAMTSAPSKDQVQLKDLLKNNSLNELMKLKPPANIAQPVATAATDVSNGTVKKESSNKEGARMWINDMKMRSFSPTMKVPVVKEDDEPEEEDEEEMGHAETYAEYMPIKLKIGLRHPDAVVETSSLSSVTPPDVWYKTSISEETIDNGWLSALQLEAITYAAQQHETFLPNGDRAGFLIGDGAGVGKGRTIAGIIYENYLLSRKRALWFSVSNDLKYDAERDLRDIGAKNILVHSLNKFKYGKISSKHNGSVKKGVIFATYSSLIGESQSGGKYKTRLKQLLHWCGDDFDGVIVFDECHKAKNLCPVGSSKPTKTGLAVLELQNKLPKARVVYASATGASEPRNMAYMNRLGIWGEGTPFREFSDFIQAVERRGVGAMEIVAMDMKLRGMYIARQLSFTGVTFKIEEVLLSQSYVKMYNKAVKLWVIARERFQQAADLIDAEQRMKKSMWGQFWSAHQRFFKYLCIASKVKRVVQLAREEIKNGKCVVIGLQSTGEARTLEALEEGGGELNDFVSTAKGVLQSLIEKHFPAPDRKKLYSLLGIDLTAPSNNSSPRDSPCKENKIKKRKGEEITREAKKARKVGGLTGSSSDDSGSESDASDNEESDYESSKNMSSGDDDDFNPFLDESNEDDENDPWLIRKDHKKNKEKKKKKSIDPDSIQSALLASGLGSKRPSFSSTPVISPAPNSTPANSNTNSNSSLITSQDAVERAQQMKKDLLDKLEKLAEDLPPNTLDELIDELGGPENVAEMTGRKGRVVSNDDGSISYESRSELDVPVEILNITEKQRFMDGDKNIAIISEAASSGISLQADRRAKNQRRRVHMTLELPWSADRAIQQFGRTHRSNQVTAPEYVFLISELAGEQRFASIVAKRLESLGALTHGDRRATESRDLSRFNFDNKYGRNALEIVMKSIVNLDSPMVSPPPDYPGEFFKDVRQGLIGVGLINVEDRSGILTLDKDYNNIGKFLNRILGMEVHQQNALFQYFADTLTAVVQNAKKNGRYDMGILDLGSGDEKVRKSDVKKFLTPGYSTSGHVELYTISVERGMSWEEATKIWAELTGPDDGFYLSLQIRNNKKTAILVKEVNPKKKLFLVYRPNTGKQLKLEIYADLKKKYKKVVSDDALMHWLDQYNSSADTCTHAYWRGNCKKASLGLVCEIGLRCRTYYVLCGSVLSVWTKVEGVLASVSGTNVKMQIVRLRTEDGQRIVGLIIPANCVSPLVNLLSTSDQSQQLAVQQKQLWQQHHPQSITNLSNA

SEQ ID NO: 13167 - protein, 1073 aa, Homo sapiens
MTDQENNNNISSNPFAALFGSLADAKQFAAIQKEQLKQQSDELPASPDDSDNSVSESLDEFDYSVAEISRSFRSQQEICEQLNINHMIQRIFLITLDNSDPSLKSGNGIPSRCVYLEEMAVELEDQDWLDMSNVEQALFARLLLQDPGNHLINMTSSTTLNLSADRDAGERHIFCYLYSCFQRAKEEITKVPENLLPFAVQCRNLTVSNTRTVLLTPEIYVDQNIHEQLVDLMLEAIQGAREYMNKIYFEDVTEFLEEVIEALILDEEVRTFPEVMIPVFDILLGRIKDLELCQILLYAYLDILLYFTRQKDMAKVFVEYIQPKDPTNGQMYQKTLLGVILSISCLLKTPGVVENHGYFLNPSRSSPQEIKVQEANIHQFMAQFHEKIYQMLKNLLQLSPETKHCILSWLGNCLHANAGRTKIWANQMPEIFFQMYASDAFFLNLGAALLKLCQPFCKPRSSRLLTFNPTYCALKELNDEERKIKNVHMRGLDKETCLIPAVQEPKFPQNYNLVTENLALTEYTLYLGFHRLHDQMVKINQNLHRLQVAWRDAQQSSSPAADNLREQFERLMTIYLSTKTAMTEPQMLQNCLNLQVSMAVLLVQLAIGNEGSQPIELTFPLPDGYSSLAYVPEFFADNLGDFLIFLRRFADDILETSADSLEHVLHFITIFTGSIERMKNPHLRAKLAEVLEAVMPHLDQTPNPLVSSVFHRKRVFCNFQYAPQLAEALIKVFVDIEFTGDPHQFEQKFNYRRPMYPILRYMWGTDTYRESIKDLADYASKNLEAMNPPLFLRFLNLLMNDAIFLLDEAIQYLSKIKIQQIEKDRGEWDSLTPEARREKEAGLQMFGQLARFHNIMSNETIGTLAFLTSEIKSLFVHPFLAERIISMLNYFLQHLVGPKMGALKVKDFSEFDFKPQQLVSDICTIYLNLGDEENFCATVPKDGRSYSPTLFAQTVRVLKKINKPGNMIMAFSNLAERIKSLADLQQQEEETYADACDEFLDPIMSTLMCDPVVLPSSRVTVDRSTIARHLLSDQTDPFNRSPLTMDQIRPNTELKEKIQRWLAERKQQKEQLE

SEQ ID NO: 13168 - protein, 681 aa, Homo sapiens
MDIKHHQNGTRGQRRKQPHTTVQRLLTWGLPVSCSWFLWRQPGEFPVTALLLGAGAGGLLAIGLGAMGWGTSPHIRCASLLLVPKMLGKEGRLFVLGYALAAIYVGPVANLRHNLNNVIASLGCTVELQINNTRAAWRISTAPLRAMFKDLLSSKELLRAETRNISATFEDLDAQVNSETGYTPEDTMDSGETAQGREARQAPASRLHLSTQKMYELKTKLRCSYVVNQAILSCRRWFDRKHEQCMKHIWVPLLTHLLCLPMKFKFFCGIAKVMEVWCRNRIPVEGNFGQTYDSLNQSIRGLDGEFSANIDFKEEKQAGVLGLNTSWERVSTEVRDYVYRQEARLEWALGLLHVLLSCTFLLVLHASFSYMDSYNHDIRFDNIYISTYFCQIDDRRKKLGKRTLLPLRKAEEKTVIFPCKPTIQASEMSNVVRELLETLPILLLLVVLCGLDWALYSIFDTIRHHSFLQYSFRSSHKLEVKVGGDSMLARLLRKTIGALNTSSETVMESNNMPCLPQPVGLDARAYWRAAVPIGLLVCLCLLQAFGYRLRRVIAAFYFPKREKKRILFLYNDLLKKRAAFTKLRRAAILRRERQQKAPRHPLADILHRGCPLLRRWLCRRCVVCQAPETPESYVCRTLDCEAVYCWSCWDDMRQRCPVCTPREELSSSAFSDSNDDTAYAG

SEQ ID NO: 13169 - protein, 1038 aa, Homo sapiens
MANDSPAKSLVDIDLSSLRDPAGIFELVEVVGNGTYGQVYKGRHVKTGQLAAIKVMDVTEDEEEEIKLEINMLKKYSHHRNIATYYGAFIKKSPPGHDDQLWLVMEFCGAGSITDLVKNTKGNTLKEDWIAYISREILRGLAHLHIHHVIHRDIKGQNVLLTENAEVKLDETEYEYSGSEEEEEEVPEQEGEPSSIVNVPGESTLRRDFLRLQQENKERSEALRRQQLLQEQQLREQEEYKRQLLAERQKRIEQQKEQRRRLEEQQRREREARRQQEREQRRREQEEKRRLEELERRRKEEEERRRAEEEKRRVEREQEYIRRQLEEEQRHLEVLQQQLLQEQAMLLECRWREMEEHRQAERLQRQLQQEQAYLLSLQHDHRRPHPQHSQQPPPPQQERSKPSFHAPEPKAHYEPADRAREVPVRTTSRSPVLSRRDSPLQGSGQQNSQAGQRNSTSIEPRLLWERVEKLVPRPGSGSSSGSSNSGSQPGSHPGSQSGSGERFRVRSSSKSEGSPSQRLENAVKKPEDKKEVFRPLKPADLTALAKELRAVEDVRPPHKVTDYSSSSEESGTTDEEDDDVEQEGADESTSGPEDTRAASSLNLSNGETESVKTMIVHDDVESEPAMTPSKEGTLIVRQTQSASSTLQKHKSSSSFTPFIDPRLLQISPSSGTTVTSVVGFSCDGMRPEAIRQDPTRKGSVVNVNPTNTRPQSDTPEIRKYKKRFNSEILCAALWGVNLLVGTESGLMLLDRSGQGKVYPLINRRRFQQMDVLEGLNVLVTISGKKDKLRVYYLSWLRNKILHNDPEVEKKQGWTTVGDLEGCVHYKVVKYERIKFLVIALKSSVEVYAWAPKPYHKFMAFKSFGELVHKPLLVDLTVEEGQRLKVIYGSCAGFHAVDVDSGSVYDIYLPTHIQCSIKPHAIIILPNTDGMELLVCYEDEGVYVNTYGRITKDVVLQWGEMPTSVAYIRSNQTMGWGEKAIEIRSVETGHLDGVFMHKRAQRLKFLCERNDKVFFASVRSGGSSQVYFMTLGRTSLLSW

SEQ ID NO: 13170 - protein, 351 aa, Homo sapiens
MEDSQETSPSSNNSSEELSSALHLSKGMSIFLDILRRADKNDDGKLSFEEFKAYFADGVLSGEELHELFHTIDTHNTNNLDTEELCEYFSQHLGEYENVLAALEDLNLSILKAMGKTKKDYQEASNLEQFVTRFLLKETLNQLQSLQNSLECAMETTEEQTRQERQGPAKPEVLSIQWPGKRSSRRVQRHNSFSPNSPQFNVSGPGLLEEDNQWMTQINRLQKLIDRLEKKDLKLEPPEEEIIEGNTKSHIMLVQRQMSVIEEDLEEFQLALKHYVESASSQSGCLRISIQKLSNESRYMIYEFWENSSVWNSHLQTNYSKTFQRSNVDFLETPELTSTMLVPASWWILNN

SEQ ID NO: 13171 - protein, 235 aa, Homo sapiens
MQTFPSGEIIGGHEAKPHSRPYMAYLMIWDQKSLKRCGGFLIRDDFVLTAAHCWGSSINVTLGAHNIKEQEPTQQFIPVKRPIPHPAYNPKNFSNDIMLLQLERKAKRTRAVQPLRLPSNKAQVKPGQTCSVAGWGQTAPLGKHSHTLQEVKMTVQEDRKCESDLRHYYDSTIELCVGDPEIKKTSFKGDSGGPLVCNKVAQGIVSYGRNNGMPPRACTKVSSFVHWIKKTMKRY

SEQ ID NO: 13172 - protein, 293 aa, Homo sapiens
MNHDFQALALESRGMGELLPTKKFWEPDDSTKDGQKGIFLGDDEWRETAWGASHHSMSQPIMVQRRSGQGFHGNSEVNAILSPRSESGGLGVSMVEYVLSSSPADKLDSRFRKGNFGTRDAETDGPEKGDQKGKASPFEEDQNRDLKQGDDDDSKINGRGLPNGMDADCKDFNRTPGSRQASPTEVVERLGPNTNPSEGLGPLPNPTANKPLVEEFSNPETQNLDAMEQVGLESLQFDYPGNQVPMDSSGATVGLFDYNSQQQLFQRTNALTVQQLTAAQQQQYALAAAQQPH

SEQ ID NO: 13173 - protein, 700 aa, Homo sapiens
MSRRKQGNPQHLSQRELITRKDEPSSYICTTCKQPFNSAWFLLQHAQNTHGFRIYLEPGPASSSLTPRLTIPPPLGPEAVAQSPLMNFLGDSNPFNLLRMTGPILRDHPGFGEGRLPGTPPLFSPPPRHHLDPHRLSAEEMGLVAQHPSAFDRVMRLNPMAIDSPAMDFSRRLRELAGNSSTPPPVSPGRGNPMHRLLNPFQPSPKSPFLSTPPLPPMPPGGTPPPQPPAKSKSCEFCGKTFKFQSNLIVHRRSHTGEKPYKCQLCDHACSQASKLKRHMKTHMHKAGSLAGRSDDGLSAASSPEPGTSELAGEGLKAADGDFRHHESDPSLGHEPEEEDEEEEEEEEELLLENESRPESSFSMDSELSRNRENGGGGVPGVPGAGGGAAKALADEKALVLGKVMENVGLGALPQYGELLADKQKRGAFLKRAAGGGDAGDDDDAGGCGDAGAGGAVNGRGGGFAPGTEPFPGLFPRKPAPLPSPGLNSAAKRIKVEKDLELPPAALIPSENVYSQWLVGYAASRHFMKDPFLGFTDARQSPFATSSEHSSENGSLRFSTPPGDLLDGGLSGRSGTASGGSTPHLGGPGPGRPSSKEGRRSDTCEYCGKVFKNCSNLTVHRRSHTGERPYKCELCNYACAQSSKLTRHMKTHGQIGKEVYRCDICQMPFSVYSTLEKHMKKWHGEHLLTNDVKIEQAERS

SEQ ID NO: 13174 - protein, 636 aa, Homo sapiens
MAAAALGSSSGSASPAVAELCQNTPETFLEASKLLLTYADNILRNPNDEKYRSIRIGNTAFSTRLLPVRGAVECLFEMGFEEGETHLIFPKKASVEQLQKIRDLIAIERSSRLDGSNKSHKVKSSQQPAASTQLPTTPSSNPSGLNQHTRNRQGQSSDPPSASTVAADSAILEVLQSNIQHVLVYENPALQEKALACIPVQELKRKSQEKLSRARKLDKGINISDEDFLLLELLHWFKEEFFHWVNNVLCSKCGGQTRSRDRSLLPSDDELKWGAKEVEDHYCDACQFSNRFPRYNNPEKLLETRCGRCGEWANCFTLCCRAVGFEARYVWDYTELQRTLSLKLTTLKEIGKTFLRISKRQKLIQVVDVTWRYSCKHEEVIARRTKVKEALLRDTINGLNKQRQLFLSENRRKELLQRIIVELVEFISPKTPKPGELGGRISGSVAWRVARGEMGLQRKETLFIPCENEKISKQLHLCYNIVKDRYVRVSNNNQTISGWENGVWKMESIFRKVETDWHMVYLARKEGSSFAYISWKFECGSVGLKVDSISIRTSSQTFQTGTVEWKLRSDTAQVELTGDNSLHSYADFSGATEVILEAELSRGDGDVAWQHTQLFRQSLNDHEENCLEIIIKFSDL

SEQ ID NO: 13175 - protein, 359 aa, Homo sapiens
MKPALFSVLCEIKEKTGLSIRGAQEEDPPDPQLMRLDNMLLAEGVSGPEKGGGSAAAAAAAAASGGSSDNSIEHSDYRAKLTQIRQIYHTELEKYEQACNEFTTHVMNLLREQSRTRPISPKEIERMVGIIHRKFSSIQMQLKQSTCEAVMILRSRFLDARRKRRNFSKQATEILNEYFYSHLSNPYPSEEAKEELAKKCSITVSQVSNWFGNKRIRYKKNIGKFQEEANLYAAKTAVTAAHAVAAAVQNNQTNSPTTPNSGSSGSFNLPNSGDMFMNMQSLNGDSYQGSQVGANVQSQVDTLRHVINQTGGYSDGLGGNSLYSPHNLNANGGWQDATTPSSVTSPTEGPGSVHSDTSN

SEQ ID NO: 13176 - protein, 871 aa, Homo sapiens
MSFSEMNRRTLAFRGGGLVTASGGGSTNNNAGGEASAWPPQPQPRQPPPPAPPALQPPNGRGADEEVELEGLEPQDLEASAGPAAGAAEEAKELLLPQDAGGPTSLGGGAGGPLLAERNRRTLAFRGGGGGGLGNNGSSRGRPETSVWPLRHFNGRGPATVDLELDALEGKELMQDGASLSDSTEDEEEGASLGDGSGAEGGSCSSSRRSGGDGGDEVEGSGVGAGEGETVQHFPLARPKSLMQKLQCSFQTSWLKDFPWLRYSKDTGLMSCGWCQKTPADGGSVDLPPVGHDELSRGTRNYKKTLLLRHHVSTEHKLHEANAQESEIPSEEGYCDFNSRPNENSYCYQLLRQLNEQRKKGILCDVSIVVSGKIFKAHKNILVAGSRFFKTLYCFSNKESPNQNNTTHLDIAAVQGFSVILDFLYSGNLVLTSQNAIEVMTVASYLQMSEVVQTCRNFIKDALNISIKSEAPESVVVDYNNRKPVNRDGLSSSRDQKIASFWATRNLTNLASNVKIENDGCNVDEGQIENYQMNDSSWVQDGSPEMAENESEGQTKVFIWNNMGSQGIQETGKTRRKNQTTKRFIYNIPPNNETNLEDCSVMQPPVAYPEENTLLIKEEPDLDGALLSGPDGDRNVNANLLAEAGTSQDGGDAGTSHDFKYGLMPGPSNDFKYGLIPGTSNDFKYGLIPGASNDFKYGLLPESWPKQETWENGESSLIMNKLKCPHCSYVAKYRRTLKRHLLIHTGVRSFSCDICGKLFTRREHVKRHSLVHKKDKKYKCMVCKKIFMLAASVGIRHGSRRYGVCVDCADKSQPGGQEGVDQGQDTEFPRDEEYEENEVGEADEELVDDGEDQNDPSRWDESGEVCMSLDD

SEQ ID NO: 13177 - protein, 161 aa, Homo sapiens
MALQLWALTLLGLLGAGASLRPRKLDFFRSEKELNHLAVDEASGVVYLGAVNALYQLDAKLQLEQQVATGPALDNKKCTPPIEASQCHEAEMTDNVNQLLLLDPPRKRLVECGSLFKGICALRALSNISLRLFYEDGSGEKSFVASNDEGVATVGLVSSTG

SEQ ID NO: 13178 - protein, 746 aa, Homo sapiens
MDQLEDLLVLFINYVPTDGNAGLLAEPQIAMFCGRLNMHMNVQNGKWDSDPSGTKTCIDTKEGILQYCQEVYPELQITNVVEANQPVTIQNWCKRGRKQCKTHPHFVIPYRCLVGEFVSDALLVPDKCKFLHQERMDVCETHLHWHTVAKETCSEKSTNLHDYGMLLPCGIDKFRGVEFVCCPLAEESDNVDSADAEEDDSDVWWGGADTDYADGSEDKVVEVAEEEEVAEVEEEEADDDEDDEDGDEVEEEAEEPYEEATERTTSIATTTTTTTESVEEVVREVCSEQAETGPCRAMISRWYFDVTEGKCAPFFYGGCGGNRNNFDTEEYCMAVCGSAIPTTAASTPDAVDKYLETPGDENEHAHFQKAKERLEAKHRERMSQVMREWEEAERQAKNLPKADKKAVIQHFQEKVESLEQEAANERQQLVETHMARVEAMLNDRRRLALENYITALQAVPPRPRHVFNMLKKYVRAEQKDRQHTLKHFEHVRMVDPKKAAQIRSQVMTHLRVIYERMNQSLSLLYNVPAVAEEIQDEVDELLQKEQNYSDDVLANMISEPRISYGNDALMPSLTETKTTVELLPVNGEFSLDDLQPWHSFGADSVPANTENEVEPVDARPAADRGLTTRPGSGLTNIKTEEISEVKMDAEFRHDSGYEVHHQKLVFFAEDVGSNKGAIIGLMVGGVVIATVIVITLVMLKKKQYTSIHHGVVEVDAAVTPEERHLSKMQQNGYENPTYKFFEQMQN

SEQ ID NO: 13179 - protein, 366 aa, Homo sapiens
MKKKLVVLGLLAVVLVLVIVGLCLWLPSASKEPDNHVYTRAAVAADAKQCSKIGRDALRDGGSAVDAAIAALLCVGLMNAHSMGIGGGLFLTIYNSTTRKAEVINAREVAPRLAFATMFNSSEQSQKGGLSVAVPGEIRGYELAHQRHGRLPWARLFQPSIQLARQGFPVGKGLAAALENKRTVIEQQPVLCEVFCRDRKVLREGERLTLPQLADTYETLAIEGAQAFYNGSLTAQIVKDIQAAGGIVTAEDLNNYRAELIEHPLNISLGDVVLYMPSAPLSGPVLALILNILKGYNFSRESVESPEQKGLTYHRIVEAFRFAYAKRTLLGDPKFVDVTEASSGVSAGGPQHDLRVLRCPAPGPDL

SEQ ID NO: 13180 - protein, 205 aa, Homo sapiens
WVGSLSMGMIFFCCPIVSVFTDLFGCRKTAVVGAAVGFVGLMSSSFVSSIEPLYLTYGIIFACGCSFAYQPSLVILGHYFKKRLGLVNGIVTAGSSVFTILLPLLLRVLIDSVGLFYTLRVLCIFMFVLFLAGFTYRPLATSTKDKESGGSGSSLFSRKKFSPPKKIFNFAIFKVTAYAVWAVGIPLALFGYFVPYVHLVSMLLH

SEQ ID NO: 13181 - protein, 555 aa, Homo sapiens
MDMFPLTWVFLALYFSRHQVRGQPDPPCGGRLNSKDAGYITSPGYPQDYPSHQNCEWIVYAPEPNQKIVLNFNPHFEIEKHDCKYDFIEIRDGDSESADLLGKHCGNIAPPTIISSGSMLYIKFTSDYARQGAGFSLRYEIFKTGSEDCSKNFTSPNGTIESPGFPEKYPHNLDCTFTILAKPKMEIILQFLIFDLEHDPLQVGEGDCKYDWLDIWDGIPHVGPLIGKYCGTKTPSELRSSTGILSLTFHTDMAVAKDGFSARYYLVHQEPLENFQCNVPLGMESGRIANEQISASSTYSDGRWTPQQSRLHGDDNGWTPNLDSNKEYLQVDLRFLTMLTAIATQGAISRETQNGYYVKSYKLEVSTNGEDWMVYRHGKNHKVFQANNDATEVVLNKLHAPLLTRFVRIRPQTWHSGIALRLELFGCRVTDAPCSNMLGMLSGLIADSQISASSTQEYLWSPSAARLVSSRSGWFPRIPQAQPGEEWLQVDLGTPKTVKGVIIQGARGGDSITAVEARAFVRKFKVSYSLNGKDWEYIQDPRTQQPKVGCSWRPL

SEQ ID NO: 13182 - protein, 339 aa, Homo sapiens
MSYFPILFFFFLKRCPSYTEPQNLTGVSEFLLLGLSEDPELQPVLAGLFLSMYLVTVLGNLLIILAVSSDSHLHTPMYFFLSNLSLADIGFTSTTVPKMIVDMQTHSRVISYEGCLTQMSFFVLFACMDDMLLSVMAYDRFVAICHPLHYRIIMNPRLCGFLILLSFFISLLDSQLHNLIMLQLTCFKDVDISNFFCDPSQLLHLRCSDTFINEMVIYFMGAIFGCLPISGILFSYYKIVSPILRVPTSDGKYKAFSTCGSHLAVVCLFYGTGLVGYLSSAVLPSPRKSMVASVMYTVVTPMLNPFIYSLRNKDIQSALCRLHGRIIKSHHLHPFCYMG

SEQ ID NO: 13183 - protein, 266 aa, Homo sapiens [sequence omitted]

SEQ ID NO: 13184 - protein, 1007 aa, Homo sapiens
MVSKMIIENFEALKSWLSKTLEPICDADPSALAKYVLALVKKDKSEKELKALCIDQLDVFLQKETQIFVEKLFDAVNTKSYLPPPEQPSSGSLKVEFFPHQEKDIKKEEITKEEEREKKFSRRLNHSPPQSSSRYRENRSRDERKKDDRSRKRDYDRNPPRRDSYRDRYNRRRGRSRSYSRSRSRSWSKERLRERDRDRSRTRSRSRTRSRERDLVKPKYDLDRTDPLENNYTPVSSVPSISSGHYPVPTLSSTITVIAPTHHGNNTTESWSEFHEDQVDHNSYVRPPMPKKRCRDYDEKGFCMRGDMCPFDHGSDPVVVEDVNLPGMLPFPAQPPVVEGPPPPGLPPPPPILTPPPVNLRPPVPPPGPLPPSLPPVTGPPPPLPPLQPSGMDAPPNSATSSVPTVVTTGIHHQPPPAPPSLFTADTYDTDGYNPEAPSITNTSRPMYRHRVHAQRPNLIGLTSGDMDLPPREKPPNKSSMRIVVDSESRKRTIGSGEPGVPTKKTWFDKPNFNRTNSPGFQKKVQFGNENTKLELRKVPPELNNISKLNEHFSRFGTLVNLQVAYNGDPEGALIQFATYEEAKKAISSTEAVLNNRFIKVYWHREGSTQQLQTTSPKVMQPLVQQPILPVVKQSVKERLGPVPSSTIEPAEAQSASSDLPQNVTKLSVKDRLGFVSKPSVSATEKVLSTSTGLTKTVYNPAALKAAQKTLLVSTSAVDNNEAQKKKQEALKLQQDVRKRKQEILEKHIETQKMLISKLEKNKTMKSEDKAEIMKTLEVLTKNITKLKDEVKAASPGRCLPKSIKTKTQMQKELLDTELDLYKKMQAGEEVTELRRKYTELQLEAAKRGILSSGRGRGIHSRGRGAVHGRGRGRGRGRGVPGHAVVDHRPRALEISAFTESDREDLLPHFAQYGEIEDCQIDDSSLHAVITFKTRAEAEAAAVHGARFKGQDLKLAWNKPVTNISAVETEEVEPDEEEFQEESLVDDSLLQDDDEEEEDNESRSWRR

SEQ ID NO: 13185 - protein, 623 aa, Homo sapiens
MPPPQGDVTALFLGPPGLGKSALIAALCDKDVETLEAPEGRPDSGVPSLRAAGPGLFLGELSCPPAAPGPWAAEANVLVLVLPGPEGNGEPLAPALGEAALAALARGTPLLAVRNLRPGDSQTAAQARDQTAALLNSAGLGAADLFVLPANCGSSDGCEELERLRAALQSQAEALRRLLPPAQDGFEVLGAAELEAVREAFETGGLEAALSWVRSGLERLGSARLDLAVAGKADVGLVVDMLLGLDPGDPGAAPASVPTAPTPFPAPERPNVVLWTVPLGHTGTATTAAAASHPTHYDALILVTPGAPTEKDWAQVQALLLPDAPLVCVRTDGEGEDPECLGEGKMENPKGESLKNAGGGGLENALSKGREKCSAGSQKAGSGEGPGKAGSEGLQQVVGMKKSGGGDSERAAALSPEDETWEVLEEAPPPVFPLRPGGLPGLCEWLRRALPPAQAGALLLALPPASPSAARTKAAALRAGAWRPALLASLAAAAAPLPGLGWACDVALLRGQLAEWRRGLGLEPTALARRERALGLASGELAARAHFPGPVTRAEVEARLGAWAGEGTAGGAALGALSFLWPAGGAAATGGLGYRAAHGVLLQALDEMRADAEAVLAPPEPAQ

SEQ ID NO: 13186 - protein, 461 aa, Homo sapiens
MQSWSRVYCSLAKRGHFNRISHGLQGLSAVPLRTYADQPIDADVTVIGSGPGGYVAAIKAAQLGFKTVCIEKNETLGGTCLNVGCIPSKALLNNSHYYHMAHGKDFASRGIEMSEVRLNLDKMMEQKSTAVKALTGGIAHLFKQNKIDEDTIVSSTGALSLKKVPEKMVVIGAGVIGVELGSVWQRLGADVTAVEFLGHVGGVGIDMEISKNFQRILQKQGFKFKLNTKVTGATKKSDGKIDVSIEAASGGKAEVITCDVLLVCIGRRPFTKNLGLEELGIELDPRGRIPVNTRFQTKIPNIYAIGDVVAGPMLAHKAEDEGIICVEGMAGGAVHIDYNCVPSVIYTHPEVAWVGKSEEQLKEEGIEYKVGKFPFAANSRAKTNADTDGMVKILGQKSTDRVLGAHILGPGAGEMVNEAALALEYGASCEDIARVCHAHPTLSEAFREANLAASFGKSINF

SEQ ID NO: 13187 - protein, 332 aa, Homo sapiens
QKTDVLCADEEEDCQAASLLQKYTDNSEKPSGKRLCKTKHLIPQESRRGLPLTGEYYVENADGKVTVRRFRKRPEPSSDYDLSPAKQEPKPFDRLQQLLPASQSTQLPCSSSPQETTQSRPMPPEARRLIVNKNAGETLLQRAARLGYEEVVLYCLENKICDVNHRDNAGYCALHEACARGWLNIVRHLLEYGADVNCSAQDGTRPLHDAVENDHLEIVRLLLSYGADPTLATYSGRTIMKMTHSELMEKFLTDYLNDLQGRNDDDASGTWDFYGSSVCEPDDESGYDVLANPPGPEDQDDDDDAYSDVFEFEFSETPLLPCYNIQVSVAQG

SEQ ID NO: 13188 - protein, 459 aa, Homo sapiens
MRTPQLALLQVFFLVFPDGVRPQPSSSPSGAVPTSLELQRGTDGGTLQSPSEATATRPAVPGLPTVVPTLVTPSAPGNRTVDLFPVLPICVCDLTPGACDINCCCDRDCYLLHPRTVFSFCLPGSVRSSSWVCVDNSVIFRSNSPFPSRVFMDSNGIRQFCVHVNNCFLESKSTTCTRFFKNLASSCTLDSALNAASYYNFTVLKVPRSMTDPQNMEAFQQSTAASLTSPRSGNPGYIVGKPLLALTDDISYSMTLLQSQGNGSCSVKRHEVQFGVNAISGCKLRLKKADCSHLQQEIYQTLHGRPRPEYVAIFGNADPAQKGGWTRILNRHCSISAINCTSCCLIPVSLEIQVLWAYVGLLSNPQAHVSGVRFLYQCQSIQDSQQVTEVSLTTLVNFVDITQKPQPPRGQPKMDWKWPFDFFPFKVAFSRGVFSQKCSVSPILILCLLLLGVLNLETM

SEQ ID NO: 13189 - protein, 2154 aa, Homo sapiens
MPGLDRPLSRQNPHDGVVTPAASPSLPQPGLQMPGQWGPVQGGPQPSGQHRSPCPEGPVPSGVPCATSVPHFPTPSILHQGPGHEQHSPLVAPPAALPSDGRDEVSHLQSGSHLANNSDPESTFRQNPRIVNHWASPELRQNPGVKNEHRPASALVNPLARGDSPENRTHHPLGAGAGSGCAPLEADSGASGALAMFFQGGETENEENLSSEKAGLSGQADFDDFCSSPGLGRPPAPTHVGAGSLCQALLPGPSNEAAGDVWGDTASTGVPDASGSQYENVENLEFVQNQEVLPSEPLNLDPSSPSDQFRYGPLPGPAVPRHGAVCHTGAPDATLHTVHPDSVSSSYSSRSHGRLSGSARPQELVGTFIQQEVGKPEDEASGSFFKQIDSSPVGGETDETTVSQNYRGSVSQPSTPSPPKPTGIFQTSANSSFEPVKSHLVGVKPFEADRANVVGEVRETCVRQKQCRPAAALPDASPGNLEQPPDNMETLCAPQVCPLPLNSTTEAVHMLPHAGAPPLDTVYPAPEKRPSARTQGPVKCESPATTLWAQSELPDFGGNVLLAPAAPALYVCAKPQPPVVQPPEEAMSGQQSRNPSSAAPVQSRGGIGASENLENPPKMGEEEALQSQASSGYASLLSSPPTESLQNPPVLIAQPDHSYNLAQPINFSVSLSNSHEKNQSWREALVGDRPAVSSWALGGDSGENTSLSGIPTSSVLSLSLPSSVAQSNFPQGSGASEMVSNQPANLLVQPPSQPVPENLVPESQKDRKAGSALPGFANSPAGSTSVVLVPPAHGTLVPDGNKANHSSHQEDTYGALDFTLSRTLENPVNVYNPSHSDSLASQQSVASHPRQSGPGAPNLDRFYQQVTKDAQGQPGLERAQQELVPPQQQASPPQLPKAMFSELSNPESLPAQGQAQNSAQSPASLVLVDAGQQLPPRPPQSSSVSLVSSGSGQAAVPSEQPWPQPVPALAPGPPPQDLAAYYYYRPLYDAYQPQYSLPYPPEPGAASLYYQDVYSLYEPRYRPYDGAASAYAQNYRYPEPERPSSRASHSSERPPPRQGYPEGYYSSKSGWSSQSDYYASYYSSQYDYGDPGHWDRYHYSARVRDPRTYDRRYWCDAEYDAYRREHSAFGDRPEKRDNNWRYDPRFTGSFDDDPDPHRDPYGEEVDRRSVHSEHSARSLHSAHSLASRRSSLSSHSHQSQIYRSHNVAAGSYEAPLPPGSFHGDFAYGTYRSNFSSGPGFPEYGYPADTVWPAMEQVSSRPTSPEKFSVPHVCARFGPGGQLIKVIPNLPSEGQPALVEVHSMEALLQHTSEQEEMRAFPGPLAKDDTHKVDVINFAQNKAMKCLQNENLIDKESASLLWNFIVLLCRQNGTVVGTDIAELLLRDHRTVWLPGKSPNEANLIDFTNEAVEQVEEEESGEAQLSFLTGGPAAAASSLERETERFRELLLYGRKKDALESAMKNGLWGHALLLASKMDSRTHARVMTRFANSLPINDPLQTVYQLMSGRMPAASTCCGDEKWGDWRPHLAMVLSNLNNNMDVESRTMATMGDTLASRGLLDAAHFCYLMAQAGFGVYTKKTTKLVLIGSNHSLPFLKFATNEAIQRTEAYEYAQSLGAETCPLPSFQVFKFIYSCRLAEMGLATQAFHYCEAIAKSILTQPHLYSPVLISQLVQMASQLRLFDPQLKEKPEEESLAAPTWLVHLQQVERQIKEGAGVWHQDGALPQQCPGTPSSEMEQLDRPGLSQPGALGIANPLLAVPAPSPEHSSPSVRLLPSAPQTLPDGPLASPARVPMFPVPLPPGPLEPGPGCVTPGPALGFLEPSGPGLPPGVPPLQERRHLLQEARSPDPGIVPQEAPVGNSLSELSEENFDGKFANLTPSRTVPDSEAPPGWDRADSGPTQPPLSLSPAPETKRPGQAAKKETKEPKKGESWFFRWLPGKKKTEAYLPDDKNKSIVWDEKKNQWVNLNEPEEEKKAPPPPPTSMPKTVQAAPPALPGPPGAPVNMYSRRAAGTRARYVDVLNPSGTQRSEPALAPADFVAPLAPLPIPSNLFVPTPDAEEPQLPDGTGREGPAAARGLANPEPAPEPKLSRCSSMSSLSREVSQHFNQAPGDLPAAGGPPSGAMPFYNPAQLAQACATSGSSRLGRIGQRKHLVLN

SEQ ID NO: 13190 - protein, 1990 aa, Homo sapiens
MFRNSLKMLLTGGKSSRKNRSSDGGSEEPPDRRQSSVDSRQSRSGQGGISTESDCAFEPDYAVPPLPVSEGDAEQELGPPPSVDEAANTLMTRLGFLLGEKVTEVQPGDQYSMEVQDENQTSAITQRISPCSTLTSSTASPPASSPCSTLPPISTNATAKDCSYGAVTSPTSTLESRDSGIIATLTSYSENVERTKYAGESSKELGSGGNIKPWQSQKSSMDSCLYRVDENMTASTYSLNKIPERNLETVLSQSVQSIPLYLMPRPNSVAATSSAHLEDLAYLDEQRHTPLRTSLRMPRQSMGGARTQQDLRVRFAPYRPPDISLKPLLFEVPSITTESVFVGRDWVFHEIDAQLQSSNASVNQGVVIVGNIGFGKTAIISRLVALSCHGTRMRQIASDSPHASPKHVDANRELPLTQPPSAHSSITSGSCPGTPEMRRRQEEAMRRLASQVVAYHYCQADNAYTCLVPEFVHNVAALLCRSPQLTAYREQLLREPHLQSMLSLRSCVQDPMASFRRGVLEPLENLHKERKIPDEDFIILIDGLNEAEFHKPDYGDTIVSFLSKMIGKFPSWLKLIVTVRTSLQEITKLLPFHRIFLDRLEENEAIDQDLQAYILHRIHSSSEIQNNISLNGKMDNTTFGKLSSHLKTLSQGSYLYLKLTFDLIEKGYLVLKSSSYKVVPVSLSEVYLLQCNMKFPTQSSFDRVMPLLNVAVASLHPLTDEHIFQAINAGSIEGTLEWEDFQQRMENLSMFLIKRRDMTRMFVHPSFREWLIWREEGEKTKFLCDPRSGHTLLAFWFSRQEGKLNRQQTIELGHHILKAHIFKGLSKKVGVSSSILQGLWISYSTEGLSMALASLRNLYTPNIKVSRLLILGGANINYRTEVLNNAPILCVQSHLGYTEMVALLLEFGANVDASSESGLTPLGYAAAAGYLSIVVLLCKKRAKVDHLDKNGQCALVHAALRGHLEVVKFLIQCDWTMAGQQQGVFKKSHAIQQALIAAASMGYTEIVSYLLDLPEKDEEEVERAQINSFDSLWGETALTAAAGRGKLEVCRLLLEQGAAVAQPNRRGAVPLFSTVRQGHWQIVDLLLTHGADVNMADKQGRTPLMMAASEGHLGTVDFLLAQGASIALMDKEGLTALSWACLKGHLSVVRSLVDNGAATDHADKNGRTPLDLAAFYGDAEVVQFLVDHGAMIEHVDYSGMRPLDRAVGCRNTSVVVTLLKKGAKIGPATWAMATSKPDIMIILLSKLMEEGDMFYKKGKVKEAAQRYQYALKKFPREGFGEDLKTFRELKVSLLLNLSRCRRKMNDFGMAEEFATKALELKPKSYEAYYARARAKRSSRQFAAALEDLNEAIKLCPNNREIQRLLLRVEEECRQMQQPQQPPPPPQPQQQLPEEAEPEPQHEDIYSVQDIFEEEYLEQDVENVSIGLQTEARPSQGLPVIQSPPSSPPHRDSAYISSSPLGSHQVFDFRSSSSVGSPTRQTYQSTSPALSPTHQNSHYRPSPPHTSPAHQGGSYRFSPPPVGGQGKEYPSPPPSPLRRGPQYRASPPAESMSVYRSQSGSPVRYQQETSVSQLPGRPKSPLSKMAQRPYQMPQLPVAVPQQGLRLQPAKAQIVRSNQPSPAVHSSTVIPTGAYGQVAHSMASKYQSSQGDIGVSQSRLVYQGSIGGIVGDGRPVQHVQASLSAGAICQHGGLTKEDLPQRPSSAYRGGVRYSQTPQIGRSQSASYYPVCHSKLDLERSSSQLGSPDVSHLIRRPISVNPNEIKPHPPTPRPLLHSQSVGLRFSPSSNSISSTSNLTPTFRPSSSIQQMEIPLKPAYERSCDELSPVSPTQGGYPSEPTRSRTTPFMGIIDKTARTQQYPHLHQQNRTWAVSSVDTVLSPTSPGNLPQPESFSPPSSISNIAFYNKTNNAQNGHLLEDDYYSPHGMLANGSRGDLLERVSQASSYPDVKVARTLPVAQAYQDNLYRQLSRDSRQGQTSPIKPKRPFVESNV

SEQ ID NO: 13191 - protein, 172 aa, Homo sapiens
MWSLLLCGLSIALPLSVTADGCKDIFMKNEILSASQPFAFNCTFPPITSGEVSVTWYKNSSKIPVSKIIQSRIHQDETWILFLPMEWGDSGVYQCVIKGRDSCHRIHVNLTVFEKHWCDTSIGGLPNLSDEYKQILHLGKDDSLTCHLHFPKSCVLGPIKWYKDCNEIKGER

SEQ ID NO: 13192 - protein, 939 aa, Homo sapiens; identical to SEQ ID NO: 12861

SEQ ID NO: 13193 - protein, 441 aa, Homo sapiens
MSLLTNYEGLRHQIERLVRENEELKKLVRLIRENHELKSAIKTQAGGLGISGFTSGLGEATAGLSSRQNNGVFLPPSPAVANERVLEEVGIMALAPLAEMLTSLQPSATPGSLMSPLTGTLSTLLSGPAPTSQSSPLTSFLTSPIAGPLTGTLASSLGLPSTGTLTPSSLVAGPVAMSQSSPLIAPVMGTVAVSLSSPLLSSTATPPGVSQNLLANPMSNLVLPEAPRLRLAEPLRGGPTGPQSPACVVPTATTKVPLSTEPPQSTQDPEPLSMAFAGAPLQTSTPIGAMGTPAPKTAFSFNTSDTQAQPSAAQEQVVPASVPTSPTTSPTVTVLASAPALAPQVATSYTPSSTTHIAQGAPHPPSRMHNSPTQNLPVPHCPPHNAHSPPRTSSSPASVNDSRGPRTTEPSTKSMMEVERKLAHRKTSKFPENPRGFPEPQ

SEQ ID NO: 13194 - protein, 2067 aa, Homo sapiens
MMPQKKRRRKKDIDFLALYEAELLNYASEDDEGELEHEYYKARVYEVVTATGDVRGAGTDANVFITLFGENGLSPKLQLTSKSKSAFEKGNVDVFRVRTNNVGLIYKVRIEHDNTGLNASWYLDHVIVTDMKRPHLRYYFNCNNWLSKVEGDRQWCRDLLASFNPMDMPRGNKYEVKVYTGDVIGAGTDADVFINIFGEYGDTGERRLENEKDNFEKGAEDRFILDAPDLGQLMKINVGHNNKGGSAGWFLSQIVIEDIGNKRKYDFPLNRWLALDEDDGKIQRDILVGGAETTAITYIVTVFTGDVRGAGTKSKIYLVMYGARGNKNSGKIFLEGGVFDRGRTDIFHIELAVLLSPLSRVSVGHGNVGVNRGWFCEKVVILCPFTGIQQTFPCSNWLDEKKADGLIERQLYEMVSLRKKRLKKFPWSLWVWTTDLKKAGTNSPIFIQIYGQKGRTDEILLNPNNKWFKPGIIEKFRIELPDLGRFYKIRVWHDKRSSGSGWHLERMTLMNTLNKDKYNFNCNRWLDANEDDNEIVREMTAEGPTVRRIMGMARYHVTVCTGELEGAGTDANVYLCLFGDVGDTGERLLYNCRNNTDLFEKGNADEFTIESVTMRNVRRVRIRHDGKGSGSGWYLDRVLVREEGQPESDNVEFPCLRWLDKDKDDGQLVRELLPSDSSATLKNFRYHISLKTGDVSGASTDSRVYIKLYGDKSDTIKQVLLVSDNNLKDYFERGRVDEFTLETLNIGNINRLVIGHDSTGMHASWFLGSVQIRVPRQGKQYTFPANRWLDKNQADGRLEVELYPSEVVEIQKLVHYEVEIWTGDVGGAGTSARVYMQIYGEKGKTEVLFLSSRSKVFERASKDTFQTDTFTIYAIDLGALTKIRIRHDNTGNRAGWFLDRIDITDMNNEITYYFPCQRWLAVEEDDGQLSRELLPVDESYVLPQSEEGRGGGDNNPLDNLALEQKDKSTTFSVTIKTGVKKNAGTDANVFITLFGTQDDTGMTLLKSSKTNSDKFERDSIEIFTVETLDLGDLWKVRLGHDNTGKAPGWFVDWVEVDAPSLGKCMTFPCGRWLAKNEDDGSIIRDLFHAELQTRLYTPFVPYEITLYTSDVFAAGTDANIFIIIYGCDAVCTQQKYLCTNKREQKQFFERKSASRFIVELEDVGEIIEKIRIGHNNTGMNPGWHCSHVDIRRLLPDKDGAETLTFPCDRWLATSEDDKKTIRELVPYDIFTEKYMKDGSLRQVYKEVEEPLDIVLYSVQIFTGNIPGAGTDAKVYITIYGDLGDTGERYLGKSENRTNKFERGTADTFIIEAADLGVIYKIKLRHDNSKWCADWYVEKVEIWNDTNEDEFLFLCGRWLSLKKEDGRLERLFYEKEYTGDRSSNCSSPADFWEIALSSKMADVDISTVTGPMADYVQEGPIIPYYVSVTTGKHKDAATDSRAFIFLIGEDDERSKRIWLDYPRGKRGFSRGSVEEFYVAGLDVGIIKKIELGHDGASPESCWLVEELCLAVPTQGTKYMLNCNCWLAKDRGDGITSRVFDLLDAMVVNIGVKVLYEMTVWTGDVVGGGTDSNIFMTLYGINGSTEEMQLDKKKARFEREQNDTFIMEILDIAPFTKMRIRIDGLGSRPEWFLERILLKNMNTGDLTMFYYGDWLSQRKGKKTLVCEMCAVIDEEEMMEWTSYTVAVKTSDILGAGTDANVFIIIFGENGDSGTLALKQSANWNKFERNNTDTFNFPDMLSLGHLCKLRVWHDNKGIFPGWHLSYVDVKDNSRDETFHFQCDCWLSKSEGDGQTVRDFACANNKICDELEETTYEIVIETGNGGETRENVWLILEGRKNRSKEFLMENSSRQRAFRKGTTDTFEFDSIYLGDIASLCVGHLAREDRFIPKRELAWHVKTITITEMEYGNVYFFNCDCLIPLKRKRKYFKVFEVTKTTESFASKVQSLVPVKYEVIVTTGYEPGAGTDANVFVTIFGANGDTGKRELKQKMRNLFERGSTDRFFLETLELGELRKVRLEHDSSGYCSGWLVEKVEVTNTSTGVATIFNCGRWLDKKRGDGLTWRDLFPSV

SEQ ID NO: 13195 - protein, 445 aa, Homo sapiens
MFKKLKQKISEEQQQLQQALAPAQASSNSSTPTRMRSRTSSFTEQLDEGTPNRENASTHASKSPDSVNGSEPSIPQSGDTQSFAQKLQLRVPSVESLFRSPIKESLFRSSSKESLVRTSSRESLNRLDLDSSTASFDPPSDMDSEAEDLVGNSDSLNKEQLIQRLRRMERSLSSYRGKYSEGILSQSQDKSLRRIAELRELQMDQQAKKHLQEEFDASLEEKDQYISVLQTQVSLLKQRLRNGPMNVDVLKPLPQLEPQAEVFTKEENPESDGEPVVEDGTSVKTLETLQQRVKRQENLLKRCKETIQSHKEQCTLLTSEKEALQEQLDERLQELEKIKDLHMAEKTKLITQLRDAKNLIEQLEQDKGMVIAETKRQMHETLEMKEEEIAQLRSRIKQMTTQGEELREQKEKSERAAFEELEKALSTAQKTEEARRKLKAEMDEQ

SEQ ID NO: 13196 - protein, 426 aa, Homo sapiens
MNGVAGDGMINIDMTGEKRSLDLPYPSSFAPVSAPRNQTFTYMGKFSIDPQYPGASCYPEGIINIVSAGILQGVTSPASTTASSSVTSASPNPLATGPLGVCTMSQTQPDLDHLYSPPPPPPPYSGCAGDLYQDPSAFLSAATTSTSSSLAYPPPPSYPSPKPATDPGLFPMIPDYPGFFPSQCQRDLHGTAGPDRKPFPCPLDTLRVPPPLTPLSTIRNFTLGGPSAGVTGPGASGGSEGPRLPGSSSAAAAAAAAAAYNPHHLPLRPILRPRKYPNRPSKTPVHERPYPCPAEGCDRRFSRSDELTRHIRIHTGHKPFQCRICMRNFSRSDHLTTHIRTHTGEKPFACDYCGRKFARSDERKRHTKIHLRQKERKSSAPSASVPAPSTASCSGGVQPGGTLCSSNSSSLGGGPLAPCSSRTRTP

SEQ ID NO: 13197 - protein, 2068 aa, Homo sapiens
MAAQVAPAAASSLGNPPPPPPSELKKAEQQQREEAGGEAAAAAAAERGEMKAAAGQESEGPAVGPPQPLGKELQDGAESNGGGGGGGAGSGGGPGAEPDLKNSNGNAGPRPALNNNLTEPPGGGGGGSSDGVGAPPHSAAAALPPPAYGFGQPYGRSPSAVAAAAAAVFHQQHGGQQSPGLAALQSGGGGGLEPYAGPQQNSHDHGFPNHQYNSYYPNRSAYPPPAPAYALSSPRGGTPGSGAAAAAGSKPPPSSSASASSSSSSFAQQRFGAMGGGGPSAAGGGTPQPTATPTLNQLLTSPSSARGYQGYPGGDYSGGPQDGGAGKGPADMASQCWGAAAAAAAAAAASGGAQQRSHHAPMSPGSSGGGGQPLARTPQPSSPMDQMGKMRPQPYGGTNPYSQQQGPPSGPQQGHGYPGQPYGSQTPQRYPMTMQGRAQSAMGGLSYTQQIPPYGQQGPSGYGQQGQTPYYNQQSPHPQQQQPPYSQQPPSQTPHAQPSYQQQPQSQPPQLQSSQPPYSQQPSQPPHQQSPAPYPSQQSTTQQHPQSQPPYSQPQAQSPYQQQQPQQPAPSTLSQQAAYPQPQSQQSQQTAYSQQRFPPPQELSQDSFGSQASSAPSMTSSKGGQEDMNLSLQSRPSSLPDLSGSIDDLPMGTEGALSPGVSTSGISSSQGEQSNPAQSPFSPHTSPHLPGIRGPSPSPVGSPASVAQSRSGPLSPAAVPGNQMPPRPPSGQSDSIMHPSMNQSSIAQDRGYMQRNPQMPQYSSPQPGSALSPRQPSGGQIHTGMGSYQQNSMGSYGPQGGQYGPQGGYPRQPNYNALPNANYPSAGMAGGINPMGAGGQMHGQPGIPPYGTLPPGRMSHASMGNRPYGPNMANMPPQVGSGMCPPPGGMNRKTQETAVAMHVAANSIQNRPPGYPNMNQGGMMGTGPPYGQGINSMAGMINPQGPPYSMGGTMANNSAGMAASPEMMGLGDVKLTPATKMNNKADGTPKTESKSKKSSSSTTTNEKITKLYELGGEPERKMWVDRYLAFTEEKAMGMTNLPAVGRKPLDLYRLYVSVKEIGGLTQVNKNKKWRELATNLNVGTSSSAASSLKKQYIQCLYAFECKIERGEDPPPDIFAAADSKKSQPKIQPPSPAGSGSMQGPQTPQSTSSSMAEGGDLKPPTPASTPHSQIPPLPGMSRSNSVGIQDAFNDGSDSTFQKRNSMTPNPGYQPSMNTSDMMGRMSYEPNKDPYGSMRKAPGSDPFMSSGQGPNGGMGDPYSRAAGPGLGNVAMGPRQHYPYGGPYDRVRTEPGIGPEGNMSTGAPQPNLMPSNPDSGMYSPSRYPPQQQQQQQQRHDSYGNQFSTQGTPSGSPFPSQQTTMYQQQQQVSSPAPLPRPMENRTSPSKSPFLHSGMKMQKAGPPVPASHIAPAPVQPPMIRRDITFPPGSVEATQPVLKQRRRLTMKDIGTPEAWRVMMSLKSGLLAESTWALDTINILLYDDNSIMTFNLSQLPGLLELLVEYFRRCLIEIFGILKEYEVGDPGQRTLLDPGRFSKVSSPAPMEGGEEEEELLGPKLEEEEEEEVVENDEEIAFSGKDKPASENSEEKLISKFDKLPVKIVQKNDPFVVDCSDKLGRVQEFDSGLLHWRIGGGDTTEHIQTHFESKTELLPSRPHAPCPPAPRKHVTTAEGTPGTTDQEGPPPDGPPEKRITATMDDMLSTRSSTLTEDGAKSSEAIKESSKFPFGISPAQSHRNIKILEDEPHSKDETPLCTLLDWQDSLAKRCVCVSNTIRSLSFVPGNDFEMSKHPGLLLILGKLILLHHKHPERKQAPLTYEKEEEQDQGVSCNKVEWWWDCLEMLRENTLVTLANISGQLDLSPYPESICLPVLDGLLHWAVCPSAEAQDPFSTLGPNAVLSPQRLVLETLSKLSIQDNNVDLILATPPFSRLEKLYSTMVRFLSDRKNPVCREMAVVLLANLAQGDSLAARAIAVQKGSIGNLLGFLEDSLAATQFQQSQASLLHMQNPPFEPTSVDMMRRAARALLALAKVDENHSEFTLYESRLLDISVSPLMNSLVSQVICDVLFLIGQS

SEQ ID NO: 13198 - protein, 374 aa, Homo sapiens
MILRPYQPCGTVKEFDTNFTYVQQSEFYLEPNIKYVFQVRCQETGKRYWQPWSSLFFHKTPETVPQVTSKAFQHDTWNSGLTVASISTGHLTSDNRGDIGLLLGMIVFAVMLSILSLIGIFNRSFRTGIKRRILLLIPKWLYEDIPNMKNSNVVKMLQENSELMNNNSSEQVLYVDPMITEIKEIFIPEHKPTDYKKENTGPLETRDYPQNSLFDNTTVVYIPDLNTGYKPQISNFLPEGSHLSNNNEITSLTLKPPVDSLDSGNNPRLQKHPNFAFSVSSVNSLSNTIFLGELSLILNQGECSSPDIQNSVEEETTMLLENDSPSETIPEQTLLPDEFVSCLGIVNEELPSINTYFPQNILESHFNRISLLEK

SEQ ID NO: 13199 - protein, 1236 aa, Homo sapiens
MSTAAFHISSLLEKMTSSDKDFRFMATSDLMSELQKDSIQLDEDSERKVVKMLLRLLEDKNGEVQNLAVKCLGPLVVKVKEYQVETIVDTLCTNMRSDKEQLRDIAGIGLKTVLSELPPAATGSGLATNVCRKITGQLTSAIAQQEDVAVQLEALDILSDMLSRLGVPLGAFHASLLHCLLPQLSSPRLAVRKRAVGALGHLAAACSTDLFVELADHLLDRLPGPRVPTSPTAIRTLIQCLGSVGRQAGHRLGAHLDRLVPLVEDFCNLDDDELRESCLQAFEAFLRKCPKEMGPHVPNVTSLCLQYIKHDPNYNYDSDEDEEQMETEDSEFSEQESEDEYSDDDDMSWKVRRAAAKCIAALISSRPDLLPDFHCTLAPVLIRRFKEREENVKADVFTAYIVLLRQTQPPKGWLEAMEEPTQTGSNLHMLRGQVPLVVKALQRQLKDRSVRARQGCFSLLTELAGVLPGSLAEHMPVLVSGIIFSLADRSSSSTIRMDALAFLQGLLGTEPAEAFHPHLPILLPPVMACVADSFYKIAAEALVVLQELVRALWPLHRPRMLDPEPYVGEMSAVTLARLRATDLDQEVKERAISCMGHLVGHLGDRLGDDLEPTLLLLLDRLRNEITRLPAIKALTLVAVSPLQLDLQPILAEALHILASFLRKNQRALRLATLAALDALAQSQGLSLPPSAVQAVLAELPALVNESDMHVAQLAVDFLATVTQAQPASLVEVSGPVLSELLRLLRSPLLPAGVLAAAEGFLQALVGTRPPCVDYAKLISLLTAPVYEQAVDGGPGLHKQVFHSLARCVAALSAACPQEAASTASRLVCDARSPHSSTGVKVLAFLSLAEVGQVAGPGHQRELKAVLLEALGSPSEDVRAAASYALGRVGAGSLPDFLPFLLEQIEAEPRRQYLLLHSLREALGAAQPDSLKPYAEDIWALLFQRCEGAEEGTRGVVAECIGKLVLVNPSFLLPRLRKQLAAGRPHTRSTVITAVKFLISDQPHPIDPLLKSFIGEFMESLQDPDLNVRRATLAFFNSAVHNKPSLVRDLLDDILPLLYQETKIRRDLIREVEMGPFKHTVDDGLDVRKAAFECMYSLLESCLGQLDICEFLNHVEDGLKDHYDIRMLTFIMVARLATLCPAPVLQRVDRLIEPLRATCTAKVKAGSVKQEFEKQDELKRSAMRAVAALLTIPEVGKSPIMADFSSQIRSNPELAALFESIQKDSASAPSTDSMELS

SEQ ID NO: 13200 - protein, 449 aa, Homo sapiens
MWKSVVGHDVSVSVETQGDDWDTDPDFVNDISEKEQRWGAKTIEGSGRTEHINIHQLRNKVSEEHDVLRKKEMESGPKASHGYGGRFGVERDRMDKSAVGHEYVAEVEKHSSQTDAAKGFGGKYGVERDRADKSAVGFDYKGEVEKHTSQKDYAKGFGGQYGIQKDRVDKSAVGFNEMEAPTTAYKKTTPIEAASSGTRGLKAKFESMAEEKRKREEEEKAQQVARRQQERKAVTKRSPEAPQPVIAMEEPAVPAPLPKKISSEAWPPVGTPPSSESEPVRTSREHPVPLLPIRQTLPEDNEEPPALPPRTLEGLQVEEEPVYEAEPEPEPEPEPEPENDYEDVEEMDRHEQEDEPEGDYEEVLEPEDSSFSSALAGSSGCPAGAGAGAVALGISAVAVYDYQGEGSDELSFDPDDVITDIEMVDEGWWRGRCHGHFGLFPANYVKLLE

SEQ ID NO: 13201 - protein, 532 aa, Homo sapiens
RKAWGWGFSPGVWTGQGAVVHPQRQPAQLSHTVSSPVGAWQRHRHAMAWLSAFPRGRGFMWPKQALVWMDLASQMKGALMEIIQLASLDSDPWVLMVADILKSFPDTGSLNLELEEQNPNVQDILGELREKVGECEASAMLPLECQYLNKNALTTLAGPLTPPVKHFQLKRKPKSATLRAELLQKSTETAQQLKRSAGVPFHAKGRGLLRKMDTTTPLKGIPKQAPFRSPTAPSVFSPTGNRTPIPPSRTLLRKERGVKLLDISELDMVGAGREAKRRRKTLDAEVVEKPAKEETVVENATPDYAAGLVSTQKLGSLNNEPALPSTSYLPSTPSVVPASSYIPSSETPPAPSSREASRPPEEPSAPSPTLPAQFKQRAPMYNSGLSPATPTPAAPTSPLTPTTPPAVAPTTQTPPVAMVAPQTQAPAQQQPKKNLSLTREQMFAAQEMFKTANKVTRPEKALILGFMAGSRENPCQEQGDVIQIKLSEHTEDLPKADGQGSTTMLVDTVFEMNYATGQWTRFKKYKPMTNVS

SEQ ID NO: 13202 - protein, 280 aa, Homo sapiens
MMKEKEKTIAIVKVIDTSKLKLLSGSILDVYSGEQGISPINMGLTSASCPSSLPMKREITETDTRALAKERQKKDNHNLIERRRRYNINYRIKELGTLIPKSNDPDMRWNKGTILKASVEYIKWLQKEQQRARELEHRQKKLEQANRRLLLRIQELEIQARTHGLPTLASLGTVDLGAHVTKQQSHPEQNSVDYCQQLTVSQGPSPELCDQAIAFSDPLSYFTDLSFSAALKEEQRLDGMLLDDTISPFGTDPLLSATSPAVSKESSRRSSFSSDDGDEL

SEQ ID NO: 13203 - protein, 505 aa, Homo sapiens
MGRVVAELVSSLLGLWLLLCSCGCPEGAELRAPPDKIAIIGAGIGGTSAAYYLRQKFGKDVKIDLFEREEVGGRLATMMVQGQEYEAGGSVIHPLNLHMKRFVKDLGLSAVQASGGLLGIYNGETLVFEESNWFIINVIKLVWRYGFQSLRMHMWVEDVLDKFMRIYRYQSHDYAFSSVEKLLHALGGDDFLGMLNRTLLETLQKAGFSEKFLNEMIAPVMRVNYGQSTDINAFVGAVSLSCSDSGLWAVEGGNKLVCSGLLQASKSNLISGSVMYIEEKTKTKYTGNPTKMYEVVYQIGTETRSDFYDIVLVATPLNRKMSNITFLNFDPPIEEFHQYYQHIVTTLVKGELNTSIFSSRPIDKFGLNTVLTTDNSDLFINSIGIVPSVREKEDPEPSTDGTYVWKIFSQETLTKAQILKLFLSYDYAVKKPWLAYPHYKPPEKCPSIILHDRLYYLNGIECAASAMEMSAIAAHNAALLAYHRWNGHTDMIDQDGLYEKLKTEL

SEQ ID NO: 13204 - protein, 1319 aa, Homo sapiens
MAGLRGNAVAGLLWMLLLWSGGGGCQAQRAGCKSVHYDLVFLLDTSSSVGKEDFEKVRQWVANLVDTFEVGPDRTRVGVVRYSDRPTTAFELGLFGSQEEVKAAARRLAYHGGNTNTGDALRYITARSFSPHAGGRPRDRAYKQVAILLTDGRSQDLVLDAAAAAHRAGIRIFAVGVGEALKEELEEIASEPKSAHVFHVSDFNAIDKIRGKLRRRLCENVLCPSVRVEGDRFKHTNGGTKEITGFDLMDLFSVKEILGKRENGAQSSYVRMGSFPVVQSTEDVFPQGLPDEYAFVTTFRFRKTSRKEDWYIWQVIDQYSIPQVSIRLDGENKAVEYNAVAGPQGEKGDVGPAGPPGVPGSVVQQEGLKGEQGAPGPRGHQGAPGPPGARGPIGPEGRDGPPGLQGLRGKKGDMGPPGIPGLLGLQGPPGPPGVPGPPGPGGSPGLPGEIGFPGKPGPPGPTGPPGKDGPNGPPGPPGTKGEPGERGEDGLPGKPGLRGEIGEQGLAGRPGEKGEAGLPGAPGFPGVRGEKGDQGEKGELGLPGLKGDRGEKGEAGPAGPPGLPGTTSLFTPHPRMPGEQGPKGEKGDPGLPGEPGLQGRPGELGPQGPTGPPGAKGQEGAHGAPGAAGNPGAPGHVGAPGPSGPPGSVGAPGLRGTPGKDGERGEKGAAGEEGSPGPVGPRGDPGAPGLPGPPGKGKDGEPGLRGSPGLPGPLGTKGDRGAPGIPGSPGSRGDPGIGVAGPPGPSGPPGDKGSPGSRGLPGFPGPQGPAGRDGAPGNPGERGPPGKPGLSSLLSPGDINLLAKDVCNDCPPGPPGLPGLPGFKGDKGVPGKPGREGTEGKKGEAGPPGLPGPPGIAGPQGSQGERGADGEVGQKGDQGHPGVPGFMGPPGNPGPPGADGIAGAAGPPGIQGSPGKEGPPGPQGPSGLPGIPGEEGKEGRDGKPGPPGEPGKAGEPGLPGPEGARGPPGFKGHTGDSGAPGPRGESGAMGLPGQEGLPGKDGDTGPTGPQGPQGPRGPPGKNGSPGSPGEPGPSGTPGQKGSKGENGSPGLPGFLGPRGPPGEPGEKGVPGKEGVPGKPGEPGFKGERGDPGIKGDKGPPGGKGQPGDPGIPGHKGHTGLMGPQGLPGENGPVGPPGPPGQPGFPGLRGESPSMETLRRLIQEELGKQLETRLAYLLAQMPPAYMKSSQGRPGPPGPPGKDGLPGRAGPMGEPGRPGQGGLEGPSGPIGPKGERGAKGDPGAPGVGLRGEMGPPGIPGQPGEPGYAKDGLPGIPGPQGETGPAGHPGLPGPPGPPGQCDPSQCAYFASLAARPGNVKGP

SEQ ID NO: 13205 - protein, 772 aa, Homo sapiens
MQRPCTCDFLHGPRTQRRAAAQIAQALLGAEERKVEIAFYRKDGSCFLCLVDVVPVKNEDGAVIMFILNFEVVMEKDMVVDVDLTPAAPSSESLALDEVTAMDNHVAGLGPAEERRALVGPGSPPRSAPGQLPSPRAHSLNPDASGSSCSLARTRSRESCASVRRASSADDIEAMRAGVLPPPPRHASTGAMHPLRSGLLNSTSDSDLVRYRTISKIPQITLNFVDLKGDPFLASPTSDREIIAPKIKERTHNVTEKVTQVLSLGADVLPEYKLQAPRIHRWTILHYSPFKAVWDWLILLLVIYTAVFTPYSAAFLLKETEEGPPATECGYACQPLAVVDLIVDIMFIVDILINFRTTYVNANEEVVSHPGRIAVHYFKGWFLIDMVAAIPFDLLIFGSGSEELIGLLKTARLLRLVRVARKLDRYSEYGAAVLFLLMCTFALIAHWLACIWYAIGNMEQPHMDSRIGWLHNLGDQIGKPYNSSGLGGPSIKDKYVTALYFTFSSLTSVGFGNVSPNTNSEKIFSICVMLIGSLMYASIFGNVSAIIQRLYSGTARYHTQMLRVREFIRFHQIPNPLRQRLEEYFQHAWSYTNGIDMNAVLKGFPECLQADICLHLNRSLLQHCKPFRGATKGCLRALAMKFKTTHAPPGDTLVHAGDLLTALYFISRGSIEILRGDVVVAILGMGWGAGTGLEMPSAASRGASLLNMQSLGLWTWDCLQGHWAPLIHLNSGPPSGAMERSPTWGEAAELWGSHILLPFRIRHKQTLFASLK

SEQ ID NO: 13206 - protein, 624 aa, Homo sapiens
IEAKLQELCLKNLNDLSSLDLIKMDEGVNFKPTEAGRLMAWYYITFETVKKFYTISGKETLSDLVTLIAGCKEFLDIQLRINEKKTLNTLNKDPNRITIRFPMEGRIKTREMKVNCLIQAQLGCIPIQDFALTQDTAKIFRHGSRITRCITLSNAIVNAGLTSFKKIEETDARELELILNRHPPFGTQIKETVMYLPKYELKVEQITRYSDTTAEILVTVILRNFEQLQTKRTASDSHYVTLIIGDADNQVVYLHKITDSVLLKAGSWAKKIAVKRALKSEDLSINLISSEFVGLDIQQKLTVFYLEPKRFGNQITMQRKSETQISHSKHSDISTIAGPNKGTTASKKPGNRECNHLCKSKHTCGHDCCKIGVAQKSEIKESTISSYLSDLRNRNAVSSVPPVKRLKIQMNKSQSVDLKEFGFTPKPSLPSISRSEYLNISELPIMEQWDQPEIYGKVRQEPSEYQDKEVLNVNFELGNEVWDDFDDENLEVTSFSTDTEKTKISGFGNTLSSSTRGSKLPLQESKSKFQREMSNSFVSSHEMSDISLSNSAMPKFSASSMTKLPQQAGNAVIVHFQERKPQNLSPEIEKQCFTFSEKNPNSSNYKKVDFFIRNSECKKEVDFR

SEQ ID NO: 13207 - protein, 742 aa, Homo sapiens
MDSKESLTPGREENPSSVLAQERGDVMDFYKTLRGGATVKVSASSPSLAVASQSDSKQRRLLVDFPKGSVSNAQQPDLSKAVSLSMGLYMGETETKVMGNDLGFPQQGQISLSSGETDLKLLEESIANLNRSTSVPENPKSSASTAVSAAPTEKEFPKTHSDVSSEQQHLKGQTGTNGGNVKLYTTDQSTFDILQDLEFSSGSPGKETNESPWRSDLLIDENCLLSPLAGEDDSFLLEGNSNEDCKPLILPDTKPKIKDNGDLVLSSPSNVTLPQVKTEKEDFIELCTPGVIKQEKLGTVYCQASFPGANIIGNKMSAISVHGVSTSGGQMYHYDMNTASLSQQQDQKPIFNVIPPIPVGSENWNRCQGSGDDNLTSLGTLNFPGRTVFSNGYSSPSMRPDVSSPPSSSSTATTGPPPKLCLVCSDEASGCHYGVLTCGSCKVFFKRAVEGQHNYLCAGRNDCIIDKIRRKNCPACRYRKCLQAGMNLEARKTKKKIKGIQQATTGVSQETSENPGNKTIVPATLPQLTPTLVSLLEVIEPEVLYAGYDSSVPDSTWRIMTTLNMLGGRQVIAAVKWAKAIPGFRNLHLDDQMTLLQYSWMFLMAFALGWRSYRQSSANLLCFAPDLIINEQRMTLPCMYDQCKHMLYVSSELHRLQVSYEEYLCMKTLLLLSSVPKDGLKSQELFDEIRMTYIKELGKAIVKREGNSSQNWQRFYQLTKLLDSMHENVMWLKPESTSHTLI

SEQ ID NO: 13208 - protein, 529 aa, Homo sapiens
MTLKWTSVLLLIHLSCYFSSGSCGKVLVWAAEYSHWMNMKTILKELVQRGHEVTVLASSASILFDPNDASTLKFEVYPTSLTKTEFENIIMQQVKRWSDIRKDSFWLYFSQEQEILWELYDIFRNFCKDVVSNKKVMKKLQESRFDIVFADAVFPCGELLAALLNIRFVYSLRFTPGYTIERHSGGLIFPPSYIPIVMSKLSDQMTFMERVKNMIYVLYFDFWFQMSDMKKWDQFYSEVLGRPTTLFETMGKADIWLMRNSWSFQFPHPFLPNVDFVGGFHCKPAKPLPKEMEEFVQSSGENGVVVFSLGSVISNMTAERANVIATALAKIPQKVLWRFDGNKPDALGLNTRLYKWIPQNDLLGHPKTRAFITHGGANGIYEAIYHGIPMVGIPLFFDQPDNIAHMKAKGAAVRLDFNTMSSTDLLNALKTVINDPLYKENIMKLSRIQHDQPVKPLDRAVFWIEFVMPHKGAKHLRVAAHDLTWFQYHSLDVIGFLLACVATVIFIITKFCLFCFWKFARKGKKGKRD

SEQ ID NO: 13209 - protein, 1139 aa, Homo sapiens
MSRRFTVTSLPPAGPARSPDPESRRHSVADPRHLPGEDVKGDGNPKESSPFINSTDTEKGKEYDGKNMALFEEEMDTSPMVSSLLSGLANYTNLPQGSREHEEAENNEGGKKKPVQAPRMGTFMGVYLPCLQNIFGVILFLRLTWVVGIAGIMESFCMVFICCSCTMLTAISMSAIATNGVVPAGGSYYMISRSLGPEFGGAVGLCFYLGTTFAGAMYILGTIEILLAYLFPAMAIFKAEDASGEAAAMLNNMRVYGTCVLTCMATVVFVGVKYVNKFALVFLGCVILSILAIYAGVIKSAFDPPNFPICLLGNRTLSRHGFDVCAKLAWEGNETVTTRLWGLFCSSRFLNATCDEYFTRNNVTEIQGIPGAASGLIKENLWSSYLTKGVIVERSGMTSVGLADGTPIDMDHPYVFSDMTSYFTLLVGIYFPSVTGIMAGSNRSGDLRDAQKSIPTGTILAIATTSAVYISSVVLFGACIEGVVLRDKFGEAVNGNLVVGTLAWPSPWVIVIGSFFSTCGAGLQSLTGAPRLLQAISRDGIVPFLQVFGHGKANGEPTWALLLTACICEIGILIASLDEVAPILSMFFLMCYMFVNLACAVQTLLRTPNWRPRFRYYHWTLSFLGMSLCLALMFICSWYYALVAMLIAGLIYKYIEYRGAEKEWGDGIRGLSLSAARYALLRLEEGPPHTKNWRPQLLVLVRVDQDQNVVHPQLLSLTSQLKAGKGLTIVGSVLEGTFLENHPQAQRAEESIRRLMEAEKVKGFCQVVISSNLRDGVSHLIQSGGLGGLQHNTVLVGWPRNWRQKEDHQTWRNFIELVRETTAGHLALLVTKNVSMFPGNPERFSEGSIDVWWIVHDGGMLMLLPFLLRHHKVWRKCKMRIFTVAQMDDNSIQMKKDLTTFLYHLRITAEVEVVEMHESDISAYTYEKTLVMEQRSQILKQMHLTKNEREREIQSITDESRGSIRRKNPANTRLRLNVPEETAGDSEEKPEEEVQLIHDQSAPSCPSSSPSPGEEPEGEGETDPEKVHLTWTKDKSVAEKNKGPSPVSSEGIKDFFSMKPEWENLNQSNVRRMHTAVRLNEVIVKKSRDAKLVLLNMPGPPRNRNGDENYMEFLEVLTEHLDRVMLVRGGGREVITIYS

SEQ ID NO: 13210 - protein, 607 aa, Homo sapiens
MLENYSHLISLGSSISKPDVITLLEQEKEPWMVVRKETSRRYPDLELKYGPEKVSPENDTSEVNLPKQVIKQISTTLGIEAFYFRNDSEYRQFEGLQGYQEGNINQKMISYEKLPTHTPHASLICNTHKPYECKECGKYFSRSANLIQHQSIHTGEKPFECKECGKAFRLHIQFTRHQKFHTGEKPFECNECGKAFSLLTLLNRHKNIHTGEKLFECKECGKSFNRSSNLVQHQSIHSGVKPYECKECGKGFNRGAHLIQHQKIHSNEKPFVCKECGMAFRYHYQLIEHCQIHTGEKPFECKECGKAFTLLTKLVRHQKIHTGEKPFECRECGKAFSLLNQLNRHKNIHTGEKPFECKECGKSFNRSSNLVQHQSIHAGIKPYECKECGKGFNRGAHLIQHQKIHSNEKPFVCRECEMAFRYHCQLIEHSRIHTGDKPFECQDCGKAFNRGSSLVQHQSIHTGEKPYECKECGKAFRLYLQLSQHQKTHTGEKPFECKECGKFFRRGSNLNQHRSIHTGKKPFECKECGKAFRLHMHLIRHQKLHTGEKPFECKECGKAFRLHMQLIRHQKLHTGEKPFECKECGKVFSLPTQLNRHKNIHTGEKAS

SEQ ID NO: 13211 - protein, 185 aa, Homo sapiens
MSRLGLPEEPVRNSLLDDAKARLRKYDIGGKYSHLPYNKYSVLLPLVAKEGKLHLLFTVRSEKTDTLITPFVGLIDHNFQAQPNPAEVKDVFLVPLAYFLHPQVHDQHYVTRLGHRFINHIFEYTNPEDGVTYQIKGMTANLAVLVAFIILEKKPTFEVQFNLNDVLASSEELFLKVHKKATSRL

SEQ ID NO: 13212 - protein, 756 aa, Homo sapiens
MFEEKASSPSGKMGGEEKPIGAGEEKQKEGGKKKNKEGSGDGGRAELNPWPEYIYTRLEMYNILKAEHDSILAEKAEKDSKPIKVTLPDGKQVDAESWKTTPYQIACGISHTASCKNLSSLASLLASVAIPSSGMPWPPLFFLQGLADNTVIAKVNNVVWDLDRPLEEDCTLELLKFEDEEAQAVYWHSSAHIMGEAMERVYGGCLCYGPPIENGFYYDMYLEEGGVSSNDFSSLEALCKKIIKEKQAFERLEVKKETLLAMFKYNKFKCRILNEKVNTPTTTVYRCGPLIDLCRGPHVRHTGKIKALKIHKNSSTYWEGKADMETLQRIYGISFPDPKMLKEWEKFQEEAKNRDHRKIGRDQELYFFHELSPGSCFFLPKGAYIYNALIEFIRSEYRKRGFQEVVTPNIFNSRLWMTSGHWQHYSENMFSFEVEKELFALKPMNCPGHCLMFDHRPRSWRELPLRLADFGVLHRNELSGALTGLTRVRRFQQDDAHIFCAMEQIEDEIKGCLDFLRTVYSVFGFSFKLNLSTRPEKFLGDIEVWDQAEKQLENSLNEFGEKWELNSGDGAFYGPKIDIQIKDAIGRYHQCATIQLDFQLPIRFNLTYVSHDGDDKKRPVIVHRAILGSVERMIAILTENYGGKWPFWLSPRQVMVVPVGPTCDEYAQKVRQQFHDAKFMADIDLDPGCTLNKKIRNAQLAQYNFILVVGEKEKISGTVNIRTRDNKVHGERTISETIERLQQLKEFRSKQAEEEF

SEQ ID NO: 13213 - protein, 810 aa, Homo sapiens
MNKVEQKSQESVSFKDVTVGFTQEEWQHLDPSQRALYRDVMLENYSNLVSVGYCVHKPEVIFRLQQGEEPWKQEEEFPSQSFPVWTADHLKERSQENQSKHLWEVVFINNEMLTKEQGDVIGIPFNVDVSSFPSRKMFCQCDSCGMSFNTVSELVISKINYLGKKSDEFNACGKLLLNIKHDETHTQEKNEVLKNRNTLSHHEETLQHEKIQTLEHNFEYSICQETLLEKAVFNTQKRENAEENNCDYNEFGRTLCDSSSLLFHQISPSRDNHYEFSDCEKFLCVKSTLSKPHGVSMKHYDCGESGNNFRRKLCLSHLQKGDKGEKHFECNECGKAFWEKSHLTRHQRVHTGQKPFQCNECEKAFWDKSNLTKHQRSHTGEKPFECNECGKAFSHKSALTLHQRTHTGEKPYQCNACGKTFCQKSDLTKHQRTHTGLKPYECYECGKSFRVTSHLKVHQRTHTGEKPFECLECGKSFSEKSNLTQHQRIHIGDKSYECNACGKTFYHKSLLTRHQIIHTGWKPYECYECGKTFCLKSDLTVHQRTHTGQKPFACPECGKFFSHKSTLSQHYRTHTGEKPYECHECGKIFYNKSYLTKHNRTHTGEKPYECNECGKAFYQKSQLTQHQRIHIGEKPYKCNECGKAFCHKSALIVHQRTHTQEKPYKCNECGKSFCVKSGLIFHERKHTGEKPYECNECGKFFRHKSSLTVHHRAHTGEKSCQCNECGKIFYRKSELAQHQRSHTGEKPYECNTCRKTFSQKSNLIVHQRRHIGENLMNEMDIRNFQPQVSLHNASEYSHCGESPDDILNVQ

SEQ ID NO: 13214 - protein, 236 aa, Homo sapiens
MTGRDSLSDGRTSSRALVPGGSPRGSRPRGFAITDLLGLEAELPAPAGPGQGSGCEGPAVAPCPGPGLDGSSLARGALPLGLGLLCGFGTQPPAAARAPCLLLADVPFLPPRGPEPAAPLAPSRPPPALGRQKRSDSVSTSDEDSQSEDRNDLKASPTLGKRKKRRHRTVFTAHQLEELEKAFSEAHYPDVYAREMLAVKTELPEDRIQCKLLLLEAPVHWTLQETHRLPRPRGGA

SEQ ID NO: 13215 - protein, 746 aa, Homo sapiens
MAAADGSLFDNPRTFSRRPPAQASRQAKATKRKYQASSEAPPAKRRNETSFLPAKKTSVKETQRTFKGNAQKMFSPKKHSVSTSDRNQEERQCIKTSSLFKNNPDIPELHRPVVKQVQEKVFTSAAFHELGLHPHLISTINTVLKMSSMTSVQKQSIPVLLEGRDALVRSQTGSGKTLAYCIPVVQSLQAMESKIQRSDGPYALVLVPTRELALQSFDTVQKLLKPFTWIVPGVLMGGEKRKSEKARLRKGINILISTPGRLVDHIKSTKNIHFSRLRWLVFDEADRILDLGFEKDITVILNAVNAECQKRQNVLLSATLTEGVTRLADISLHDPVSISVLDKSHDQLNPKDKAVQEVCPPPAGDKLDSFAIPESLKQHVTVVPSKLRLVCLAAFILQKCKFEEDQKMVVFFSSCELVEFHYSLFLQTLLSSSGAPASGQLPSASMRLKFLRLHGGMEQEERTAVFQEFSHSRRGVLLCTDVAARGLDLPQVTWIVQYNAPSSPAEYIHRIGRTARIGCHGSSLLILAPSEAEYVNSLASHKINVSEIKMEDILCVLTRDDCFKGKRWGAQKSHAVGPQEIRERATVLQTVFEDYVHSSERRVSWAKKALQSFIQAYATYPRELKHIFHVRSLHLGHVAKSFGLRDAPRNLSALTRKKRKAHVKRPDLHKKTQSKHSLAEILRSEYSSGMEADIAKVKKQNAPGEPGGRPLQHSLQPTPCFGRGKTLKWRKTQKGVQRDSKTSQKV

SEQ ID NO: 13216 - protein, 956 aa, Homo sapiens
MWRAKLRRGTCEPAVKGSPSACYSPSSPVQVLEDSTYFSPDFQLYSGRHETSALTVEATSSIREKVVEDPLCNFHSPNFLRISEVEMRGSEDAAAGTVLQRLIQEQLRYGTPTENMNLLAIQHQATGSAGPAHPTNNFSSTENLTQEDPQMVYQSARQEPQGQEHQVDNTVMEKQVRSTQPQQNNEELPTYEEAKAQSQFFRGQQQQQQQQGAVGHGYYMAGGTSQKSRTEGRPTVNRANSGQAHKDEALKELKQGHVRSLSERIMQLSLERNGAKQHLPGSGNGKGFKVGGGPSPAQPAGKVLDPRGPPPEYPFKTKQMMSPVSKTQEHGLFYGDQHPGMLHEMVKPYPAPQPVRTDVAVLRYQPPPEYGVTSRPCQLPFPSTMQQHSPMSSQTSSASGPLHSVSLPLPLPMALGAPQPPPAASPSQQLGPDAFAIVERAQQMVEILTEENRVLHQELQGYYDNADKLHKFEKELQRISEAYESLVKSTTKRESLDKAMRNKLEGEIRRLHDFNRDLRDRLETANRQLSSREYEGHEDKAAEGHYASQNKEFLKEKEKLEMELAAVRTASEDHRRHIEILDQALSNAQARVIKLEEELREKQAYVEKVEKLQQALTQLQSACEKREQMERRLRTWLERELDALRTQQKHGNGQPANMPEYNAPALLELVREKEERILALEADMTKWEQKYLEESTIRHFAMNAAATAAAERDTTIINHSRNGSYGESSLEAHIWQEEEEVVQANRRCQDMEYTIKNLHAKIIEKDAMIKVLQQRSRKDAGKTDSSSLRPARSVPSIAAATGTHSRQTSLTSSQLAEEKKEEKTWKGSIGLLLGKEHHEHASAPLLPPPPTSALSSIASTTAASSAHAKTGSKDSSTQTDKSAELFWPSMASLPSRGRLSTTPAHSPVLKHPAAKGTAEKLENSPGHGKSPDHRGRVSSLLHKPEFPDGEMMEVLI

SEQ ID NO: 13217 - protein, 209 aa, Homo sapiens
LQTTQGIAMALSLEEFVHSLDLRTLPRVLEIQAGIYLEGSIYEMFGNECCFSTGEVIKITGLKVKKIIAEICEQIEGCESLQPFELPMNFPVRKDIIRILPSLDVEVKDITDSYDANWFLQLLSTEDLFEMTSKEFPIVTEVIEAPEGNHLPQSILQPGKTIVIHKKYQASRILASEIRSNFPKRHFLIPTSYKGKFKRRPREFPTAYD

SEQ ID NO: 13218 - protein, 627 aa, Homo sapiens
MAFGGGLELALGCHYRIAHAEAQVGLPEVTLGLLPGARGTQLLPRLTGVPAALDLITSGRRILADEALKLGILDKVVNSDPVEEAIRFAQRVSDQPLESRRLCNKPIQSLPNMDSIFSEALLKMRRQHPGCLAQEACVRAVQAAVQYPYEVGIKKEEELFLYLLQSGQARALQYAFFAERKANKWSTPSGASWKTASARPVSSVGVVGLGTMGRGIVISFARARIPVIAVDSDKNQLATANKMITSVLEKEASKMQQSGHPWSGPKPRLTSSVKELGGVDLVIEAVFEEMSLKKQVFAELSAVCKPEAFLCTNTSALDVDEIASSTDRPHLVIGTHFFSPAHVMKLLEVIPSQYSSPTTIATVMNLSKKIKKIGVVVGNCFGFVGNRMLNPYYNQAYFLLEEGSKPEEVDQVLEEFGFKMGPFRVSDLAGLDVGWKSRKGQGLTGPTLLPGTPARKRGNRRYCPIPDVLCELGRFGQKTGKGWYQYDKPLGRIHKPDPWLSKFLSRYRKTHHIEPRTISQDEILERCLYSLINEAFRILGEGIAASPEHIDVVYLHGYGWPRHKGGPMFYASTVGLPTVLEKLQKYYRQNPDIPQLEPSDYLKKLASQGNPPLKEWQSLAGSPSSKL

SEQ ID NO: 13219 - protein, 1460 aa, Homo sapiens
MGSKRRRATSPSSSVSGDFDDGHHSVSTPGPSRKRRRLSNLPTVDPIAVCHELYNTIRDYKDEQGRLLCELFIRAPKRRNQPDYYEVVSQPIDLMKIQQKLKMEEYDDVNLLTADFQLLFNNAKSYYKPDSPEYKAACKLWDLYLRTRNEFVQKGEADDEDDDEDGQDNQGTVTEGSSPAYLKEILEQLLEAIVVATNPSGRLISELFQKLPSKVQYPDYYAIIKEPIDLKTIAQRIQNGSYKSIHAMAKDIDLLAKNAKTYNEPGSQVFKDANSIKKIFYMKKAEIEHHEMAKSSLRMRTPSNLAAARLTGPSHSKGSLGEERNPTSKYYRNKRAVQGGRLSAITMALQYGSESEEDAALAAARYEEGESEAESITSFMDVSNPFYQLYDTVRSCRNNQGQLIAEPFYHLPSKKKYPDYYQQIKMPISLQQIRTKLKNQEYETLDHLECDLNLMFENAKRYNVPNSAIYKRVLKLQQVMQAKKKELARRDDIEDGDSMISSATSDTGSAKRKSKKNIRKQRMKILFNVVLEAREPGSGRRLCDLFMVKPSKKDYPDYYKIILEPMDLKIIEHNIRNDKYAGEEGMIEDMKLMFRNARHYNEEGSQVYNDAHILEKLLKEKRKELGPLPDDDDMASPKLKLSRKSGISPKKSKYMTPMQQKLNEVYEAVKNYTDKRGRRLSAIFLRLPSRSELPDYYLTIKKPMDMEKIRSHMMANKYQDIDSMVEDFVMMFNNACTYNEPESLIYKDALVLHKVLLETRRDLEGDEDSHVPNVTLLIQELIHNLFVSVMSHQDDEGRCYSDSLAEIPAVDPNFPNKPPLTFDIIRKNVENNRYRRLDLFQEHMFEVLERARRMNRTDSEIYEDAVELQQFFIKIRDELCKNGEILLSPALSYTTKHLHNDVEKERKEKLPKEIEEDKLKREEEKRAEKSEDSSGAAGLSGLHRTYSQDCSFKNSMYHVGDYVYVEPAEANLQPHIVCIERLWEDSAGEKWLYGCWFYRPNETFHLATRKFLEKEVFKSDYYNKVPVSKILGKCVVMFVKEYFKLCPENFRDEDVFVCESRYSAKTKSFKKIKLWTMPISSVRFVPRDVPLPVVRVASVFANADKGDDEKNTDNSEDSRAEDNFNLEKEKEDVPVEMSNGEPGCHYFEQLHYNDMWLKVGDCVFIKSHGLVRPRVGRIEKVWVRDGAAYFYGPIFIHPEETEHEPTKMFYKKEVFLSNLEETCPMTCILGKCAVLSFKDFLSCRPTEIPENDILLCESRYNESDKQMKKFKGLKRFSLSAKVVDDEIYYFRKPIVPQKEPSPLLEKKIQLLEAKFAELEGGDDDIEEMGEEDSEVIEPPSLPQLQTPLASELDLMPYTPPQSTPKSAKGSAKKEGSKRKINMSGYILFSSEMRAVIKAQHPDYSFGELSRLVGTEWRNLETAKKAEYEGMMGGYPPGLPPLQGPVDGLVSMGSMQPLHPG

SEQ ID NO: 13220 - protein, 164 aa, Homo sapiens
MSSVAVLTQESFAEHRSGLVPQQIKVATLNSEEESDPPTYKDAFPPLPEKAACLESAQEPAGAWGNKIRPIKASVITQVFHVPLEERKYKDMNQFGEGEQAKICLEIMQRTGAHLELSLAKDQGLSIMVSGKLDAVMKARKDIVARLQTQASATVAIPKEHHRF

SEQ ID NO: 13221 - protein, 278 aa, Homo sapiens
MADHSFSDGVPSDSVEAAKNASNTEKLTDQVMQNPRVLAALQERLDNVPHTPSSYIETHEDVVFLTPFFSLPKAVKRRINALKQLQVRCAHIEAKFYEEVHDLERKYAALYQPLFDKRREFITGDVEPTDAESEWHSENEEEEKLAGDMKSKVVVTEKAAATAEEPDPKGIPEFWFTIFRNVDMLSELVQEYDEPILKHLQDIKVKFSDPGQPMSFVLEFHFEPNDYFTNSVLTKTYKMKSEPDKADPFSFEGPEIVDCDGCTIDWKKGKNVTVKTIK

SEQ ID NO: 13222 - protein, 682 aa, Homo sapiens
MSRIKSTLNSVSKAVFGNQNEMISRLAQFKPSSQILRKVSDSGWLKQKNIKQAIKSLKKYSDKSAEKSPFPEEKSHIIDKEEDIGKRSLFHYTSSITTKFGDSFYFLSNHINSYFKRKEKMSQQKENEHFRDKSELEDKKVEEGKLRSPDPGILAYKPGSESVHTVDKPTSPSAIPDVLQVSTKQSIANFLSRPTEGVQALVGGYIGGLVPKLKYDSKSQSEEQEEPAKTDQAVSKDRNAEEKKRLSLQREKIIARVSIDNRTRALVQALRRTTDPKLCITRVEELTFHLLEFPEGKGVAVKERIIPYLLRLRQIKDETLQAAVREILALIGYVDPVKGRGIRILSIDGGGTRGVVALQTLRKLVELTQKPVHQLFDYICGVSTGAILAFMLGLFHMPLDECEELYRKLGSDVFSQNVIVGTVKMSWSHAFYDSQTWENILKDRMGSALMIETARNPTCPKVAAVSTIVNRGITPKAFVFRNYGHFPGINSHYLGGCQYKMWQAIRASSAAPGYFAEYALGNDLHQDGGLLLNNPSALAMHECKCLWPDVPLECIVSLGTGRYESDVRNTVTYTSLKTKLSNVINSATDTEEVHIMLDGLLPPDTYFRFNPVMCENIPLDESRNEKLDQLQLEGLKYIERNEQKMKKVAKILSQEKTTLQKINDWIKLKTDMYEGLPFFSKL

SEQ ID NO: 13223 - protein, 116 aa, Homo sapiens
MKKKLVVLGLLAVVLVLVIVGLCLWLPSASKEPDNHVYTRAAVAADAKQCSKIGRDALRDGGSAVDAAIAALLCVGLMNAHSMGIGGGLFLTIYNSTTRKAEVINAREVAPRLAFA

SEQ ID NO: 13224 - protein, 657 aa, Homo sapiens
IMKCPMLRSRLGQESVHCGPMFIQVSRPLPLWRDNRQTPWLLSLRGELVASLEDASLMGLYVDMNATTVTVQSPRQGLLQRWEVSGGQQALPGVSFQPESEVLVHIPKQRLGLVKRGSYIEETLSLRFLRVHQSNIFMVTENKDFVVVSIPAAGVLQVQRCQEVGGTPGTQAFYRVDLSLEFAEMAAPVLWTVESFFQCVGSGTESPASTAALRTTPSPPSPGPETPPAGVPPAASSQVWAAGPAAQEWLSRDLLHRPSDALAKKGLGPFLQTAKPARRGQTSASILPRVVQAQRGPQPPPGEAGIPGHPTPPATLPSEPVEGVQASPWRPRPVLPTHPALTLPVSSDASSPSPPAPRPERPESLLVSGPSVTLTEGLGTVRPEQDPAKSPGSPLLLRGLSSGDVAAPEPIMGEPGQASEEFQPLARPWRATLAAEELVSHRSPGEPQETCSGTEVERPRQTGPGLPREGARGHMDLSSSEPSQDIEGPGLSILPARDATFSTPSVRQPDPSAWLSSGPELTGMPRVRLAAPLAVLPMEPLPPEPVRPAALLTPEASSVGGPDQARYLESAPGWPVGQEEWGVAHTSSPPSTQTLSLWAPTGVLLPSLVELEYPFQAGRGASLQQELTEPTLALSAESHRPPELQDSVEGLSERPSR

SEQ ID NO: 13225 - protein, 951 aa, Homo sapiens
MSLPSRQTAIIVNPPPPEYINTKKNGRLTNQLQYLQKVVLKDLWKHSFSWPFQRPVDAVKLQLPDYYTIIKNPMDLNTIKKRLENKYYAKASECIEDFNTMFSNCYLYNKPGDDIVLMAQALEKLFMQKLSQMPQEEQVVGVKERIKKGKAGGTQQNIAVSSAKEKSSPSATEKVFKQQEIPSVFPKTSISPLNVVQGASVNSSSQTAAQVTKGVKRKADTTTPATSAVKASSEFSPTFTEKSVALPPIKENMPKNVLPDSQQQYNVVKTVKVTEQLRHCSEILKEMLAKKHFSYAWPFYNPVDVNALGLHNYYDVVKNPMDLGTIKEKMDNQEYKDAYKFAADVRLMFMNCYKYNPPDHEVVTMARMLQDVFETHFSKIPIEPVESMPLCYIKTDITETTGRENTNEASSEGNSSDDSEDERVKRLAKLQEQLKAVHQQLQVLSQVPFRKLNKKKEKSKKEKKKEKVNNSNENPRKMCEQMRLKEKSKRNQPKKRKQQFIGLKSEDEDNAKPMNYDEKRQLSLNINKLPGDKLGRVVHIIQSREPSLSNSNPDEIEIDFETLKASTLRELEKYVSACLRKRPLKPPAKKIMMSKEELHSQKKQELEKRLLDVNNQLNSRKRQTKSDKTQPSKAVENVSRLSESSSSSSSSSESESSSSDLSSSDSSDSESEMFPKFTEVKPNDSPSKENVKKMKNECIPPEGRTGVTQIGYCVQDTTSANTTLVHQTTPSHVMPPNHHQLAFNYQELEHLQTVKNISPLQILPPSGDSEQLSNGITVMHPSGDSDTTMLESECQAPVQKDIKIKNADSWKSLGKPVKPSGVMKSSDELFNQFRKAAIEKEVKARTQELIRKHLEQNTKELKASQENQRDLGNGLTVESFSNKIQNKCSGEEQKEHQQSSEAQDKSKLWLLKDRDLARQKEQERRRREAMVGTIDMTLQSDIMTMFENNFD

SEQ ID NO: 13226 - protein, 1336 aa, Homo sapiens
MELMFAEWEDGERFSFEDSDRFEEDSLCSFISEAESLCQNWRGWRKQSAGPNSPTGGGGGGGSGGTRMRDGLVIPLVELSAKQVAFHIPFEVVEKVYPPVPEQLQLRIAFWSFPENEEDIRLYSCLANGSADEFQRGDQLFRMRAVKDPLQIGFHLSATVVPPQMVPPKGAYNVAVMFDRCRVTSCSCTCGAGAKWCTHVVALCLFRIHNASAVCLRAPVSESLSRLQRDQLQKFAQYLISELPQQILPTAQRLLDELLSSQSTAINTVCGAPDPTAGPSASDQSTWYLDESTLTDNIKKTLHKFCGPSPVVFSDVNSMYLSSTEPPAAAEWACLLRPLRGREPEGVWNLLSIVREMFKRRDSNAAPLLEILTDQCLTYEQITGWWYSVRTSASHSSASGHTGRSNGQSEVAAHACASMCDEMVTLWRLAVLDPALSPQRRRELCTQLRQWQLKVIENVKRGQHKKTLERLFPGFRPAVEACYFNWEEAYPLPGVTYSGTDRKLALCWARALPSRPGASRSGGLEESRDRPRPLPTEPAVRPKEPGTKRKGLGEGVPSSQRGPRRLSAEGGDKALHKMGPGGGKAKALGGAGSGSKGSAGGGSKRRLSSEDSSLEPDLAEMSLDDSSLALGAEASTFGGFPESPPPCPLHGGSRGPSTFLPEPPDTYEEDGGVYFSEGPEPPTASVGPPGLLPGDVCTQDDLPSTDESGNGLPKTKEAAPAVGEEDDDYQAYYLNAQDGAGGEEEKAEGGAGEEHDLFAGLKPLEQESRMEVLFACAEALHAHGYSSEASRLTVELAQDLLANPPDLKGKKNKVSTSRQTWVATNTLSKAAFLLTVLSERPEHHNLAFRVGMFALELQRPPASTKALEVKLAYQESEVAALLKKIPLGPSEMSTMRCRAEELREGTLCDYRPVLPLMLASFIFDVLCAPVVSPTGSRPPSRNWNSETPGDEELGFEAAVAALGMKTTVSEAEHPLLCEGTRREKGDLALALMITYKDDQAKLKKILDKLLDRESQTHKPQTLSSFYSSSRPTTASQRSPSKHGGPSAPGALQPLTSGSAGPAQPGSVAGAGPGPTEGFTEKNVPESSPHSPCEGLPSEAALTPRPEGKVPSRLALGSRGGYNGRGWGSPGRPKKKHTGMASIDSSAPETTSDSSPTLSRRPLRGGWAPTSWGRGQDSDSISSSSSDSLGSSSSSGSRRASASGGARAKTVEVGRSVQGPPPRESCPSCTQSAIRGSCTLLLRAGEDSADQGRGQQQHFHFHTSIFLRGPPGSSPQPAPLRLRDWALCPWPAQLCFSQLALTYLFFPRFLDYRPGHGDRQRSPDYTGRMLGWAPDTP

SEQ ID NO: 13227 - protein, 355 aa, Homo sapiens
RDENGSLYPGVTAIDMMYKEGLHGVDNGILIFDKVRIPRENLLDKFGSVAPDGQYHSPIRNKSARFNAMLAALTPSRLAVAFQAMGAMKLGLTIAIRYSHSRRQFGPKTKEEVKIIEHQTQTLRLMPHLATALALTFVSRYAGALLDEDVFQGKELVNSRSLQALVAGLKAYSTWENIRCLQDCRECTGGMVVGRELLAQYTKQYEEKPLFGLLQNWAESVGDKLRTSFLAFNMDTVDDLAFLLKAVKFRERVLQRGLVARIYYKVKTKKEDFFHAWNSCLHHVASLSLAHTHRVTLEQFSLAVKSCPDQEDQTLLMKFCLLYGTKLVFQERAWYLEHKYLTPMASTRIRNQERC

SEQ ID NO: 13228 - protein, 707 aa, Homo sapiens
MRNGGPCQPLAAGPRAEGASVNWSVTAWGPGTQACIDENLEVVRFLVEQGATVNQADNEGWTPLHVAASCGYLDIARYLLSHGANIAAVNSDGDLPLDLAESDAMEGLLKAEIARRGVDVEAAKRAEEELLLHDTRCWLNGGAMPEARHPRTGASALHVAAAKGYIEVMRLLLQAGYDPELRDGDGWTPLHAAAHWGVEDACRLLAEHGGGMDSLTHAGQRPCDLADEEVLSLLEELARKQEDLRNQKEASQSRGQEPQAPSSSKHRRSSVCRLSSREKISLQDLSKERRPGGAGGPPIQDEDEGEEGPTEPPPAEPRTLNGVSSPPHPSPKSPVQLEEAPFSRRFGLLKTGSSGALGPPERRTAEGAPGAGLQRSASSSWLEGTSTQAKELRLARITPTPSPKLPEPSVLSEVTKPPPCLENSSPPSRIPEPESPAKPNVPTASTAPPADSRDRRRSYQMPVRDEESESQRKARSRLMRQSRRSTQGVTLTDLKEAEKAAGKAPESEKPAQSLDPSRRPRVPGVENSDSPAQREAPDGQGPGPQAAREHRKVGKEWRGPAEGEEAEPADRSQESSTLEGGPSARRQRWQRDLNPEPEPESEEPDGGFRTLYAELRRENERLREALTETTLRLAQLKVELERATQRQERFAERPALLELERFERRALERKAAELEEELKALSDLRADNQRLKDENAALIRVISKLSK

SEQ ID NO: 13229 - protein, 501 aa, Homo sapiens
MLYLENNAQTQFSEYSTELKKLYCQIAKTCPIQIKVMTPPPQGAVIRAMPVYKKAEHVTEVVKRCPNHELSREFNEGQIAPPSHLIRVEGNSHAQYVEDPITGRQSVLVPYEPPQVGTEFTTVLYNFMCNSSCVGGMNRRPILIIVTLETRDGQVLGRRCFEARICACPGRDRKADEDSIRKQQVSDSTKNGDGTKRPFRQNTHGIQMTSIKKRRSPDDELLYLPVRGRETYEMLLKIKESLELMQYLPQHTIETYRQQQQQQHQHLLQKQTSIQSPSSYGNSSPPLNKMNSMNKLPSVSQLINPQQRNALTPTTIPDGMGANIPMMGTHMPMAGDMNGLSPTQALPPPLSMPSTSHCTPPPPYPTDCSIVSFLARLGCSSCLDYFTTQGLTTIYQIEHYSMDDLASLKIPEQFRHAIWKGILDHRQLHEFSSPSHLLRTPSSASTVSVGSSETRGERVIDAVRFTLRQTISFPPRDEWNDFNFDMDARRNKQQRIKEEGE

SEQ ID NO: 13230 - protein, 692 aa, Homo sapiens
MQGKKPGGSSGGGRSGELQGDEAQRNKKKKKKVSCFSNIKIFLVSECALMLAQGTVGAYLVSVLTTLERRFNLQSADVGVIASSFEIGNLALILFVSYFGARGHRPRLIGCGGIVMALGALLSALPEFLTHQYKYEAGEIRWGAEGRDVCAANGSGGDEGPDPDLICRNRTATNMMYLLLIGAQVLLGIGATPVQPLGVSYIDDHVRRKDSSLYIGILFTMLVFGPACGFILGSFCTKIYVDAVFIDTSNLDITPDDPRWIGAWWGGFLLCGALLFFSSLLMFGFPQSLPPHSEPAMESEQAMLSEREYERPKPSNGVLRHPLEPDSSASCFQQLRVIPKVTKHLLSNPVFTCIILAACMEIAVVAGFAAFLGKYLEQQFNLTTSSANQLLGMTAIPCACLGIFLGGLLVKKLSLSALGAIRMAMLVNLVSTACYVSFLFLGCDTGPVAGVTVPYGNSTAPGSALDPYSPCNNNCECQTDSFTPVCGADGITYLSACFAGCNSTNLTGCACLTTVPAENATVVPGKCPSPGCQEAFLTFLCVMCICSLIGAMAQTPSVIILIRTVSPELKSYALGVLFLLLRLLGFIPPPLIFGAGIDSTCLFWSTFCGEQGACVLYDNVVYRYLYVSIAIALKSFAFILYTTTWQCLRKNYKRYIKNHEGGLSTSTEYQDIETEKTCPESHSPSEDSFVRS

SEQ ID NO: 13231 - protein, 326 aa, Homo sapiens
MGPLSAPPCTQRITWKGVLLTASLLNFWNPPTTAQVTIEAQPPKVSEGKDVLLLVHNLPQNLAGYIWYKGQMTYLYHYITSYVVDGQRIIYGPAYSGRERVYSNASLLIQNVTQEDAGSYTLHIIKRRDGTGGVTGHFTFTLHPKLSKPYITINNLNPRENKDVLTFTCEPKSKNYTYIWWLNGQSLPVSPRVKRPIENRILILPNVTRNETGPYQCEIRDRYGGIRSDPVTLNVLYGPDLPSIYPSFTYYRSGENLYLSCFAESNPRAQYSWTINGKFQLSGQKLSIPQITTKHSGLYACSVRNSATGKESSKSITVKVSDWILP

SEQ ID NO: 13232 - protein, 828 aa, Homo sapiens
MRLEGEGRSARAGQNLSRAGSARRGAPRDLSMNNLTELQPGLFHHLRFLEELRLSGNHLSHIPGQAFSGLYSLKILMLQNNQLGGIPAEALWELPSLQSLDLNYNKLQEFPVAIRTLGRLQELGFHNNNIKAIPEKAFMGNPLLQTIHFYDNPIQFVGRSAFQYLPKLHTLSLNGAMDIQEFPDLKGTTSLEILTLTRAGIRLLPSGMCQQLPRLRVLELSHNQIEELPSLHRCQKLEEIGLQHNRIWEIGADTFSQLSSLQALDLSWNAIRSIHPEAFSTLHSLVKLDLTDNQLTTLPLAGLGGLMHLKLKGNLALSQAFSKDSFPKLRILEVPYAYQCCPYGMCASFFKASGQWEAEDLHLDDEESSKRPLGLLARQAENHYDQDLDELQLEMEDSKPHPSVQCSPTPGPFKPCEYLFESWGIRLAVWAIVLLSVLCNGLVLLTVFAGGPVPLPPVKFVVGAIAGANTLTGISCGLLASVDALTFGQFSEYGARWETGLGCRATGFLAVLGSEASVLLLTLAAVQCSVSVSCVRAYGKSPSLGSVRAGVLGCLALAGLAAALPLASVGEYGASPLCLPYAPPEGQPAALGFTVALVMMNSFCFLVVAGAYIKLYCDLPRGDFEAVWDCAMVRHVAWLIFADGLLYCPVAFLSFASMLGLFPVTPEAVKSVLLVVLPLPACLNPLLYLLFNPHFRDDLRRLRPRAGDSGPLAYAAAGELEKSSCDSTQALVAFSDVDLILEASEAGRPPGLETYGFPSVTLISCQQPGAPRLEGSHCVEPEGNHFGNPQPSMDGELLLRAEGSTPAGGGLSGGGGFQPSGLAFASHV

SEQ ID NO: 13233 - protein, 1234 aa, Homo sapiens
MKEEVKGIPVRVALRCRPLVPKEISEGCQMCLSFVPGETQVVVGTDKSFTYDFVFDPCTEQEEVFNKAVAPLIKGIFKGYNATVLAYGQTGSGKTYSMGGAYTAEQENEPTVGIIPRVIQLLFKEIDKKSDFEFTLKVSYLEIYNEEILDLLCPSREKAQINIREDPKEGIKIVGLTEKTVLVALDTVSCLEQGNNSRTVASTAMNSQSSRSHAIFTISIEQRKKSDKNCSFRSKLHLVDLAGSERQKKTKAEGDRLKEGININRGLLCLGNVISALGDDKKGSFVPYRDSKLTRLLQDSLGGNSHTLMIACVSPADSNLEETLSTLRYADRARKIKNKPIVNIDPHTAELNHLKQQVQQLQVLLLQAHGGTLPGSINAEPSENLQSLMEKNQSLVEENEKLSRCLSKAAGQTAQMLERIILTEQVNEKLNAKLEELRQHVACKLDLQKLVETLEDQELKENVEIICNLQQLITQLSDETVACTAAAIDTAVEEEAQVETSPETSRSSDAFTTQHALHQAQMSKEVVELNNALALKEALVRKMTQNDNQLQPIQFQYQDNIKNLELEVINLQKEKEELVRELQTAKKNVNQAKLSEHRHKLLQELEGQIADLKKKLNEQSKLLKLKESTERTVSKLNQEIWMMKNQRVQLMRQMKEDAEKFRQWKQKKDKEVIQLKERDRKRQYELLKLERNFQKQSSVLRRKTEEAAAANKRLKDALQKQREVTDKRKETQSHGKEGIAARVRNWLGNEIEVMVSTEEAKRHLNDLLEDRKILAQDVVQLKEKKESRENPPPKLRKCTFSLSEVHGQVLESEDCITKQIESLETEMELRSAQIADLQQKLLDAESEDRPKQCWENIATILEAKCALKYLIGELVSSKIHVTKLENSLRQSKASCADMQKMLFEEQNHFSEIETELQAELVRMEQQHQEKVLYLVSQLQESQMAEKQLEKSASEKEQQLVSTLQCQDEELEKMREVCEQNQQLLQENEIIKQKLILLQVASRQKHLPNDTLLSPDSSFEYIPPKPKPSRVKEKFLEQSMDIEDLKYCSEHSVNEHEDGDGDGDSDEGDDEEWKPTKLVKVSRKNIQGCSCKGWCGNKQCGCRKQKSDCGVDCSCDPTKCRNRQQGKDSLGTVEQTQDSEGSFKLEDPTEVTPGLSFFNPVCATPNSKILKEMCDMEQVLSKKTAPAPSPFDLPESKHGATEYQQNKPPGKKKKRALASNTSFFSGCSPIEEEAH

SEQ ID NO: 13234 - protein, 297 aa, Homo sapiens
NFLNEAVDYVIRHLIQENNRVKTRIFLHVLSELKEVEPKLAAWIQKLNSFGLDATGTFFSRYGASLKLLDFSIMTFLWNEKYGHKLDSIEGKQLDYFSEPASLKEARCLIWLLEEHRDKFPALHSALDEFFDIMDIFTASWERLHVTLTESINSRCTVLRKQDSGEAPFSSTKVKNKSKKKKPKDSKPMLVGSGTTSVTSNNEIITSSEDHSNRNSDSAGPFAVPDHLRQDVEEFEALYDQHSNEYVVRNKKLWDMNPKQKCSTLYDYFSQFLEEHGPLDMSNKMFSAEYEFFPEET

SEQ ID NO: 13235 - protein, 256 aa, Homo sapiens
MSILDEPGEPPSPSLTTTSTSQWKKHWFVLTDSSLKYYRDSTAEEADELDGEIDLRSCTDVTEYAVQRNYGFQIHTKDAVYTLSAMTSGIRRNWIEALRKTVRPTSAPDVTKLSDSNKENALHSYSTQKGPLKAGEQRAGSEVISRGGPRKADGQRQALDYVELSPLTQASPQRARTPARTPDRLAKQEELERDLAQRSEERRKWFEATDSRTPEVPAGEGPRRGLGAPLTEDQQNRLSEEIEKKWQELEKLPLRE

SEQ ID NO: 13236 - protein, 363 aa, Homo sapiens
MAAGTAVGAWVLVLSLWGAVVGAQNITARIGEPLVLKCKGAPKKPPQRLEWKLNTGRTEAWKVLSPQGGGPWDSVARVLPNGSLFLPAVGIQDEGIFRCQAMNRNGKETKSNYRVRVYQIPGKPEIVDSASELTAGVPNKVVEESRRSRKRPCEQEVGTCVSEGSYPAGTLSWHLDGKPLVPNEKGVSVKEQTRRHPETGLFTLQSELMVTPARGGDPRPTFSCSFSPGLPRHRALRTAPIQPRVWEPVPLEEVQLVVEPEGGAVAPGGTVTLTCEVPAQPSPQIHWMKDGVPLPLPPSPVLILPEIGPQDQGTYSCVATHSSHGPQESRAVSISIIEPGEEGPTAGEGFDKVREAEDSPQHM

SEQ ID NO: 13237 - protein, 444 aa, Homo sapiens
MACLNPVLWETKVLQSKATEDFFRNSIQSPLFTLQLPHSLHQTLQSSTASLVIPAGRTLPSFTTAELGTSNSSANFTFPGYPIHVPAGVTLQTVSGHLYKVNVPIMVTETSGRAGILQHPIQQVFQQLGQPSVIQTSVPQLNPWSLQATTEKSQRIETVLQQPAILPSGPVDRKHLENATSDILVSPGNEHKIVPEALLCHQESSHYISLPGVVFSPQVSQTNSNVESVLSGSASMAQNLHDESLSTSPHGALHQHVTDIQLHILKNRMYGCDSVKQPRNIEEPSNIPVSEKDSNSQVDLSIRVTDDDIGEIIQVDGSGDTSSNEEIGSTRDADENEFLGNIDGGDLKVPEEEADSISNEDSATNSSDNEDPQVNIVEEDPLNSGDDVSEQDVPDLFDTDNVIVCQYDKIHRSKNKWKFYLKDGVMCFGGRDYVFAKAIGDAEW

SEQ ID NO: 13238 - protein, 544 aa, Homo sapiens
MRIFIAFEGSFEPFDVSADETVEVVKLMIKDYFHIPLSEDKQGRRYLELMYAGAALKDSWSLADVGISFCSTLKCFVKEEDKPTLYVFNAVTQDTMPVMESISLLDKTVSDLRTLVTLRCGLPVSVYCLRTPRGLEMYDCNTLKDYQTDIGTTLRLDVWDGWKEFLMGCLLGQKLKVQRYLSKEGPVLKYQKRVALYIAAFCGYIELTEWALKQGARPHEAVGVHPYRAWCHEALHADVSKCPIHAAAEAGQLLILKAFVNYSVLCLECKNAAGQTPLTIVFKHKHKDCVLYLLSKMWSTVSFPKISVPMRIYIKIKQWILRAQSHSLHKSQFCGARVFGAKVGDTVMVDGFTKPKMTSKSWHKAGNSDSQSIVLKLPSLSKQTASSKPVNPLAISQPDTRKQALKFHPLVNASSFSELQKHQQQNQKKITATARKKEKLIKNTYLPQVPLPPVSRVGYSHPSFFYATPSADFLLKSSFSSFLEHSGKTPWENAIYCLAVASAFKEKRWLQQLEIARVLAKKSISNLTTRGGLTACENSLETVL

SEQ ID NO: 13239 - protein, 447 aa, Homo sapiens
MSLWLGAPVPDIPPDSAVELWKPGAQDASSQAQGGSSCILREEARMPHSAGGTAGVGLEAAEPTALLTRAEPPSEPTEIRPQKRKKGPAPKMLGNELCSVCGDKASGFHYNVLSCEGCKGFFRRSVIKGAHYICHSGGHCPMDTYMRRKCQECRLRKCRQAGMREECVLSEEQIRLKKLKRQEEEQAHATSLPPRASSPPQILPQLSPEQLGMIEKLVAAQQQCNRRSFSDRLRVTPWPMAPDPHSREARQQRFAHFTELAIVSVQEIVDFAKQLPGFLQLSREDQIALLKTSAIEVMLLETSRRYNPGSESITFLKDFSYNREDFAKAGLQVEFINPIFEFSRAMNELQLNDAEFALLIAISIFSADRPNVQDQLQVERLQHTYVEALHAYVSIHHPHDRLMFPRMLMKLVSLRTLSSVHSEQVFALRLQDKKLPPLLSEIWDVHE

SEQ ID NO: 13240 - protein, 503 aa, Homo sapiens
MMMKPSCSWCKDYEQFEENKQLSILVNCYKKLCEYITQTTLARDIIEAVDCSSDILALLNDGSLFCEETEKPSDSSFTLCLTHSPLPSTSEPTTDPQASLSPMSESTLSIAIGSSVINGLPTYNGLSIDRFGINIPSPEHSNTIDVCNTVDIKTEDLSDSLPPVCDTVATDLCSTGIDICSFSEDIKPGDSLLLSVEEVLRSLETVSNTEVCCPNLQPNLEATVSNGPFLQLSSQSLSHNVFMSTSPALHGLSCTAATPKIAKLNRKRSRSESDSEKVQPLPISTIIRGPTLGASAPVTVKRESKISLQPIATVPNGGTTPKISKTVLLSTKSMKKSHEHGSKKSHSKTKPGILKKDKAVKEKIPSHHFMPGSPTKTVYKKPQEKKGCKCGRATQNPSVLTCRGQRCPCYSNRKACLDCICRGCQNSYMANGEKKLEAFAVPEKALEQTRLTLGINVTSIAVRNASTSTSVINVTGSPVTTFLAASTHDDKSLDEAIDMRFDC

SEQ ID NO: 13241 - protein, 1061 aa, Homo sapiens
MPNEGIPHSSQTQEQDCLQSQPVSNNEEMAIKQESGGDGEVEEYLSFRSVGDGLSTSAVGCASAAPRRGPALLHIDRHQIQAVEPSAQALELQGLGVDVYDQDVLEQGVLQQVDNAIHEASRASQLVDVEKEYRSVLDDLTSCTTSLRQINKIIEQLSPQAATSRDINRKLDSVKRQKYNKEQQLKKITAKQKHLQAILGGAEVKIELDHASLEEDAEPGPSSLGSMLMPVQETAWEELIRTGQMTPFGTQIPQKQEKKPRKIMLNEASGFEKYLADQAKLSFERKKQGCNKRAARKAPAPVTPPAPVQNKNKPNKKARVLSKKEERLKKHIKKLQKRALQFQGKVGLPKARRPWESDMRPEAEGDSEGEESEYFPTEEEEEEEDDEVEGAEADLSGDGTDYELKPLPKGGKRQKKVPVQEIDDDFFPSSGEEAEAASVGEGGGGGRKVGRYRDDGDEDYYKQRLSPKMPRTLSLHEITDLLETDDSIEASAIVIQPPENATAPVSDEESGDEEGGTINNLPGSLLHTAAYLIQDGSDAESDSDDPSYAPKDDSPDEVPSTFTVQQPPPSRRRKMTKILCKWKKADLTVQPVAGRVTAPPNDFFTVMRTPTEILELFLDDEVIELIVKYSNLYACSKGVHLGLTSSEFKCFLGIIFLSGYVSVPRRRMFWEQRTDVHNVLVSAAMRRDRFETIFSNLHVADNANLDPVDKFSKLRPLISKLNERCMKFVPNETYFSFDEFMVPYFGRHGCKQFIRGKPIRFGYKFWCGATCLGYICWFQPYQGKNPNTKHEEYGVGASLVLQFSEALTEAHPGQYHFVFNNFFTSIALLDKLSSMGHQATGTVRKDHIDRVPLESDVALKKKERGTFDYRIDGKGNIVCRWNDNSVVTVASSGAGIHPLCLVSRYSQKLKKKIQVQQPNMIKVYNQFMGGVDRADENIDKYRASIRGKKWYSSPLLFCFELVLQNAWQLHKTYDEKPVDFLEFRRRVVCHYLETHGHPPEPGQKGRPQKRNIDSRYDGINHVIVKQGKQTRCAECHKNTTFRCEKCDVALHVKCSVEYHTE

SEQ ID NO: 13242 - protein, 426 aa, Homo sapiens
MSNSVPLLCFWSLCYCFAAGSPVPFGPEGRLEDKLHKPKATQTEVKPSVRFNLRTSKDPEHEGCYLSVGHSQPLEDCSFNMTAKTFFIIHGWTMSGIFENWLHKLVSALHTREKDANVVVVDWLPLAHQLYTDAVNNTRVVGHSIARMLDWLQEKDDFSLGNVHLIGYSLGAHVAGYAGNFVKGTVGRITAITEVVKCEHERAVHLFVDSLVNQDKPSFAFQCTDSNRFKKGICLSCRKNRCNSIGYNAKKMRNKRNSKMYLKTRAGMPFRVYHYQMKIHVFSYKNMGEIEPTFYVTLYGTNADSQTLPLEIVERIEQNATNTFLVYTEEDLGDLLKIQLTWEGASQSWYNLWKEFRSYLSQPRNPGRELNIRRIRVKSGETQRKLTFCTEDPENTSISPGRELWFRKCRDGWRMKNETSPTVELP

SEQ ID NO: 13243 - protein, 246 aa, Homo sapiens
MPRSCCSRSGALLLALLLQASMEVRGWCLESSQCQDLTTESNLLECIRACKPDLSAETPMFPGNGDEQPLTENPRKYVMGHFRWDRFGRRNSSSSGSSGAGQKREDVSAGEDCGPLPEGGPEPRSDGAKPGPREGKRSYSMEHFRWGKPVGKKRRPVKVYPNGAEDESAEAFPLEFKRELTGQRLREGDGPDGPADDGAGAQADLEHSLLVAAEKKDEGPYRMEHFRWGSPPKDKRYGGFMTSEKS

SEQ ID NO: 13244 - protein, 414 aa, Homo sapiens
MMDLRNTPAKSLDKFIEDYLLPDTCFRMQINHAIDIICGFLKERCFRGSSYPVCVSKVVKGGSSGKGTTLRGRSDADLVVFLSPLTTFQDQLNRRGEFIQEIRRQLEACQRERAFSVKFEVQAPRWGNPRALSFVLSSLQLGEGVEFDVLPAFDALGQLTGGYKPNPQIYVKLIEECTDLQKEGEFSTCFTELQRDFLKQRPTKLKSLIRLVKHWYQNCKKKLGKLPPQYALELLTVYAWERGSMKTHFNTAQGFRTVLELVINYQQLCIYWTKYYDFKNPIIEKYLRRQLTKPRPVILDPADPTGNLGGGDPKGWRQLAQEAEAWLNYPCFKNWDGSPVSSWILLTQHTPGSIHPTGRRGLDLHHPLNASASWGKGLQCYLDQFLHFQVGLLIQRGQSSSVSWCIIQDRTQVS

SEQ ID NO: 13245 - protein, 830 aa, Homo sapiens
MKRGRLPSSSEDSDDNGSLSTTWSQNSRSQHRRSSCSRHEDRKPSEVFRTDLITAMKLHDSYQLNPDEYYVLADPWRQEWEKGVQVPVSPGTIPQPVARPKKYIVSSGSEPPELGYVDIRTLADSVCRYDLNDMDAAWLELTNEEFKEMGMPELDEYTMERVLEEFEQRCYDNMNHAIETEEGLGIEYDEDVVCDVCQSPDGEDGNEMVFCDKCNICVHQACYGILKVPEGSWLCRTCALGVQPKCLLCPKKGGAMKPTRSGTKWVHVSCALWIPEVSIGSPEKMEPITKVSHIPSSRWALVCSLCNEKFGASIQCSVKNCRTAFHVTCAFDRGLEMKTILAENDEVKFKSYCPKHSSHRKPEESLGKGAAQENGAPECSPRNPLEPFASLEQNREEAHRVSVRKQKLQQLEDEFYTFVNLLDVARALRLPEEVVDFLYQYWKLKRKVNFNKPLITPKKDEEDNLAKREQDVLFRRLQLFTHLRQDLERVRNLTYMVTRREKIKRSVCKVQEQIFNLYTKLLEQERVSGVPSSCSSSSLENMLLFNSPSVGPDAPKIEDLKWHSAFFRKQMGTSLVHSLKKPHKRDPLQNSPGSEGKTLLKQPDLCGRREGMVVPESFLGLEKTFAEARLISAQQKNGVVMPDHGKRRDNRFHCDLIKGDLKDKSFKQSHKPLRSTDVSQRHLDNTRAATSPGVGQSAPGTRKEIVPKCNGSLIKVNYNQTAVKVPTTPASPVKNWGGFRIPKKGERQQQGEAHDGACHQHSDYPYLGLGRVPAKERAKSKLKSDNENDGYVPDVEMSDSESEASEKKCIHTSSTISRRTDIIRRSILAS

SEQ ID NO: 13246 - protein, 509 aa, Homo sapiens
ELTGGGTTFSVRKTAYCDVHTPPGCTRRPLNIYGDVEMKNGVCRKESSVKTVRSTSKVRKKAKKAKKALAEPCAVLPTVCAPYIPPQRLNRIANQVAIQRKKQFVERAHSYWLLKRLSRNGAPLLRRLQSSLQSQRSSQQRENDEEMKAAKEKLKYWQRLRHDLERARLLIELLRKREKLKREQVKVEQVAMELRLTPLTVLLRSVLDQLQDKDPARIFAQPVSLKEVPDYLDHIKHPMDFATMRKRLEAQGYKNLHEFEEDFDLIIDNCMKYNARDTVFYRAAVRLRDQGGVVLRQARREVDSIGLEEASGMHLPERPAAAPRRPFSWEDVDRLLDPANRAHLGLEEQLRELLDMLDLTCAMKSSGSRSKRAKLLKKEIALLRNKLSQQHSQPLPTGPGLEGFEEDGAALGPEAGEEARDQNLFVCSPSEVGDSSAAKEKVAEHMRRLRGGGGVPRKAPGRRSHQRLWGCEERAGAGRRPGEEGHTPTTLCLRVQHLLQQQPALRLEL

SEQ ID NO: 13247 - protein, 1033 aa, Homo sapiens
MPGEQMDPTGSQLDSDFSQQDTPCLIIEDSQPESQVLEDDSGSHFSMLSRHLPNLQTHKENPVLDVVSNPEQTAGEERGDGNSGFNEHLKENKVADPVDSSNLDTCGSISQVIEQLPQPNRTSSVLGMSVESAPAVEEEKGEELEQKEKEKEEDTSGNTTHSLGAEDTASSQLGFGVLELSQSQDVEENTVPYEVDKEQLQSVTTNSGYTRLSDVDANTAIKHEEQSNEDIPIAEQSSKDIPVTAQPSKDVHVVKEQNPPPARSEDMPFSPKASVAAMEAKEQLSAQELMESGLQIQKSPEPEVLSTQEDLFDQSNKTVSSDGCSTPSREEGGCSLASTPATTLHLLQLSGQRSLVQDSLSTNSSDLVAPSPDAFRSTPFIVPSSPTEQEGRQDKPMDTSVLSEEGGEPFQKKLQSGEPVELENPPLLPESTVSPQASTPISQSTPVFPPGSLPIPSQPQFSHDIFIPSPSLEEQSNDGKKDGDMHSSSLTVECSKTSEIEPKNSPEDLGLSLTGDSCKLMLSTSEYSQSPKMESLSSHRIDEDGENTQIEDTEPMSPVLNSKFVPAENDSILMNPAQDGEVQLSQNDDKTKGDDTDTRDDISILATGCKGREETVAEDVCIDLTCDSGSQAVPSPATRSEALSSVLDQEEAMEIKEHHPEEGSSGSEVEEIPETPCESQGEELKEENMESVPLHLSLTETQSQGLCLQKEMPKKECSEAMEVETSVISIDSPQKLAILDQELEHKEQEAWEEATSEDSSVVIVDVKEPSPRVDVSCEPLEGVEKCSDSQSWEDIAPEIEPCAENRLDTKEEKSVEYEGDLKSGTAETEPVEQDSSQPSLPLVRADDPLRLDQELQQPQTQEKTSNSLTEDSKMANAKQLSSDAEAQKLGKPSAHASQSFCESSSGISNYPESTIATSDVMSESMVETHDPILGSGKGDSGAAPDVDDKLCLRMKLVSPETEASEESLQFNLEKPATGERKNGSTAVAESVASPQKTMSVLSCICEARQENEARSEDPPTTPIRGNLLHFPSS

SEQ ID NO: 13248 - protein, 624 aa, Homo sapiens
MISSVCVSSYRGRKSGNKPPSKTCLKEEMAKGEASEKIIINVGGTRHETYRSTLRTLPGTRLAWLADPDGGGRPETDGGGVGSSGSSGGGGCEFFFDRHPGVFAYVLNYYRTGKLHCPADVCGPLFEEELTFWGIDETDVEPCCWMTYRQHRDAEEALDIFESPDGGGSGAGPSDEAGDDERELALQRLGPHEGGAGHGAGSGGCRGWQPRMWALFEDPYSSRAARVVAFASLFFILVSITTFCLETHEAFNIDRNVTEILRVGNITSVHFRREVETEPILTYIEGVCVLWFTLEFLVRIVCCPDTLDFVKNLLNIIDFVAILPFYLEVGLSGLSSKAARDVLGFLRVVRFVRILRIFKLTRHFVGLRVLGHTLRASTNEFLLLIIFLALGVLIFATMIYYAERIGARPSDPRGNDHTDFKNIPIGFWWAVVTMTTLGYGDMYPKTWSGMLVGALCALAGVLTIAMPVPVIVNNFGMYYSLAMAKQKLPKKRKKHVPRPAQLESPMYCKSEETSPRDSTCSDTSPPAREEGMIERKRADSKQNGDANAVLSDEEGAGLTQPLASSPTPEERRALRRSTTRDRNKKAAACFLLSTGDYACADGSVRKEGNVEPKACVPVSHTCAL

SEQ ID NO: 13249 - protein, 209 aa, Homo sapiens
MASGILVNVKEEVTCPICLELLTQPLSLDCGHSFCQACLTANHKKSMLDKGESSCPVCRISYQPENIRPNRHVANIVEKLREVKLSPEGQKVDHCARHGEKLLLFCQEDGKVICWLCERSQEHRGHHTFLTEEVAREYQVKLQAALEMLRQKQQEAEELEADIREEKASWKTQIQYDKTNVLADFEQLRDILDWEESNELQNLEKEEED

SEQ ID NO: 13250 - protein, 1428 aa, Homo sapiens
MQGPPLLTAAHLLCVCTAALAVAPGPRFLVTAPGIIRPGGNVTIGVELLEHCPSQVTVKAELLKTASNLTVSVLEAEGVFEKGSFKTLTLPSLPLNSADEIYELRVTGRTQDEILFSNSTRLSFETKRISVFIQTDKALYKPKQEVKFRIVTLFSDFKPYKTSLNILIKDPKSNLIQQWLSQQSDLGVISKTFQLSSHPILGDWSIQVQVNDQTYYQSFQVSEYVLPKFEVTLQTPLYCSMNSKHLNGTITAKYTYGKPVKGDVTLTFLPLSFWGKKKNITKTFKINGSANFSFNDEEMKNVMDSSNGLSEYLDLSSPGPVEILTTVTESVTGISRNVSTNVFFKQHDYIIEFFDYTTVLKPSLNFTATVKVTRADGNQLTLEERRNNVVITVTQRNYTEYWSGSNSGNQKMEAVQKINYTVPQSGTFKIEFPILEDSSELQLKAYFLGSKSSMAVHSLFKSPSKTYIQLKTRDENIKVGSPFELVVSGNKRLKELSYMVVSRGQLVAVGKQNSTMFSLTPENSWTPKACVIVYYIEDDGEIISDVLKIPVQLVFKNKIKLYWSKVKAEPSEKVSLRISVTQPDSIVGIVAVDKSVNLMNASNDITMENVVHELELYNTGYYLGMFMNSFAVFQECGLWVLTDANLTKDYIDGVYDNAEYAERFMEENEGHIVDIHDFSLGSSPHVRKHFPETWIWLDTNMGYRIYQEFEVTVPDSITSWVATGFVISEDLGLGLTTTPVELQAFQPFFIFLNLPYSVIRGEEFALEITIFNYLKDATEVKVIIEKSDKFDILMTSNEINATGHQQTLLVPSEDGATVLFPIRPTHLGEIPITVTALSPTASDAVTQMILVKAEGIEKSYSQSILLDLTDNRLQSTLKTLSFSFPPNTVTGSERVQITAIGDVLGPSINGLASLIRMPYGCGEQNMINFAPNIYILDYLTKKKQLTDNLKEKALSFMRQGYQRELLYQREDGSFSAFGNYDPSGSTWLSAFVLRCFLEADPYIDIDQNVLHRTYTWLKGHQKSNGEFWDPGRVIHSELQGGNKSPVTLTAYIVTSLLGYRKYQPNIDVQESIHFLESEFSRGISDNYTLALITYALSSVGSPKAKEALNMLTWRAEQEGGMQFWVSSESKLSDSWQPRSLDIEVAAYALLSHFLQFQTSEGIPIMRWLSRQRNSLGGFASTQDTTVALKALSEFAALMNTERTNIQVTVTGPSSPSPLAVVQPTAVNISANGFGFAICQLNVVYNVKASGSSRRRRSIQNQEAFDLDVAVKENKDDLNHVDLNVCTSFSGPGRSGMALMEVNLLSGFMVPSEAISLSETVKKVEYDHGKLNLYLDSVNETQFCVNIPAVRNFKVSNTQDASVSIVDYYEPRRQAVRSYNSEVKLSSCDLCSDVQGCRPCEDGASGSHHHSSVIFIFCFKLLYFMELWL

SEQ ID NO: 13251 - protein, 559 aa, Homo sapiens
MSEETVPEAASPPPPQGQPYFDRFSEDDPEYMRLRNRAADLRQDFNLMEQKKRVTMILQSPSFREELEGLIQEQMKKGNNSSNIWALRQIADFMASTSHAVFPTSSMNVSMMTPINDLHTADSLNLAKGERLMRCKISSVYRLLDLYGWAQLSDTYVTLRVSKEQDHFLISPKGVSCSEVTASSLIKVNILGEVVEKGSSCFPVDTTGFCLHSAIYAARPDVRCIIHLHTPATAAVSAMKWGLLPVSHNALLVGDMAYYDFNGEMEQEADRINLQKCLGPTCKILVLRNHGVVALGDTVEEAFYKIFHLQAACEIQVSALSSAGGVENLILLEQEKHRPHEVGSVQWAGSTFGPMQKSRLGEHEFEALMRMLDNLGYRTGYTYRHPFVQEKTKHKSEVEIPATVTAFVFEEDGAPVPALRQHAQKQQKEKTRWLNTPNTYLRVNVADEVQRSMGSPRPKTTWMKADEVEKSSSGMPIRIENPNQFVPLYTDPQEVLEMRNKIREQNRQDVKSAGPQSQLLASVIAEKSRSPVEQRLPLTGGETCLPSGSSVPGAGLQDP

SEQ ID NO: 13252 - protein, 1142 aa, Homo sapiens
MATLLSHPQQRPPFLRQAIKIRRRRVRDLQDPPPQMAPEIQPPSHHFSPEQRALLYEDALYTVLHRLGHPEPNHVTEASELLRYLQEAFHVEPEEHQQTLQRVRELEKPIFCLKATVKQAKGILGKDVSGFSDPYCLLGIEQGVGVPGGSPGSRHRQKAVVRHTIPEEETHRTQVITQTLNPVWDETFILEFEDITNASFHLDMWDLDTVESVRQKLGELTDLHGLRRIFKEARKDKGQDDFLGNVVLRLQDLRCREDQWYPLEPRTETYPDRGQCHLQFQLIHKRRATSASRSQPSYTVHLHLLQQLVSHEVTQHEAGSTSWDGSLSPQAATVLFLHATQKDLSDFHQSMAQWLAYSRLYQSLEFPSSCLLHPITSIEYQWIQGRLKAEQQEELAASFSSLLTYGLSLIRRFRSVFPLSVSDSPARLQSLLRVLVQMCKMKAFGELCPNTAPLPQLVTEALQTGTTEWFHLKQQHHQPMVQGIPEAGKALLGLVQDVIGDLHQCQRTWDKIFHNTLKIHLFSMAFRELQWLVAKRVQDHTTVVGDVVSPEMGESLFQLYISLKELCQLRMSSSERDGVLALDNFHRWFQPAIPSWLQKTYNEALARVQRAVQMDELVPLGELTKHSTSAVDLSTCFAQISHTARQLDWPDPEEAFMITVKFVEDTCRLALVYCSLIKARARELSSGQKDQGQAANMLCVVVNDMEQLRLVIGKLPAQLAWEALEQRVGAVLEQGQLQNTLHAQLQSALAGLGHEIRTGVRTLAEQLEVGIAKHIQKLVGVRESVLPEDAILPLMKFLEVELCYMNTNLVQENFSSLLTLLWTHTLTVLVEAAASQRSSSLASNRLKIALQNLEICFHAEGCGLPPKALHTATFQALQRDLELQAASSRELIRKYFCSRIQQQAETTSEELGAVTVKASYRASEQKLRVELLSASSLLPLDSNGSSDPFVQLTLEPRHEFPELAARETQKHKKDLHPLFDETFEFLVPAEPCRKAGACLLLTVLDYDTLGADDLEGEAFLPLREVPGLSGSEEPGEVPQTRLPLTYPAPNGDPILQLLEGRKGDREAQVFVRLRRHRAKQGIGPSVSWPWPICLLAFLFQPLGWGPGSLGPGLQAQSLLEKGEGTLPKMRLQLPWGEGGGHY

SEQ ID NO: 13253 - protein, 453 aa, Homo sapiens
DLVPSVTVKVTLQNRVILQKAKLSVYVQPPLELTCDQFTFEFMTPDLTRTVSFSVYLKRSYTPSELEGNAVVSYSRPTDRNPDGIPRVIQCKFRLPLKLICLPGQPSKTASHKITIDTNKSPVSLLSLFPGFASQSDDDQVNVMGFHFLGGARITVLASKTSQRYRIQSEQFEDLWLITNELILRLQEYFEKQGVKDFACSFSGSIPLQEYFELIDHHFELRINGEKLEELLSERAVQFRAIQRRLLARFKDKTPAPLQHLDTLLDGTYKQVIALADAVEENQGNLFQSFTRLKSATHLVILLIALWQKLSADQVAILEAAFLPLQEDTQELGWEETVDAAISHLLKTCLSKSSKEQALNLNSQLNIPKDTSQLKKHITLLCDRLSKGGRLCLSTDAAAPQTMVMPGGCTTIPESDLEERSVEQDSTELFTNHRHLTAETPRPGKRLDGLHKR

SEQ ID NO: 13254 - protein, 327 aa, Homo sapiens
MTPILTVLICLGLSLGPRTHVQAGHLPKPTLWAEPGSVIIQGSPVTLRCQGSLQAEEYHLYRENKSASWVRRIQEPGKNGQFPIPSITWEHAGRYHCQYYSHNHSSEYSDPLELVVTGAYSKPTLSALPSPVVTSGGNVTLQCVSQVAFDGFILCKEGEDEHPQRLNSHSHARGWSWAIFSVGPVSPSRRWSYRCYAYDSNSPYVWSLPSDLLELLVPGVSKKPSLSVQPGPMVAPGESLTLQCVSDVGYDRFVLYKEGERDFLQRPGWQPQAGLSQANFTLGPVSPSHGGQYRCYSAHNLSSEWSAPSDPLDILITGQFYDRPSLS

SEQ ID NO: 13255 - protein, 367 aa, Homo sapiens
MQNSHSGVNQLGGVFVNGRPLPDSTRQKIVELAHSGARPCDISRILQTHADAKVQVLDNQNVSNGCVSSINRVLRNLASEKQQMGADGMYDKLRMLNGQTGSWGTRPGWYPGTSVPGQPTQDGCQQQEGGGENTNSISSNGEDSDEAQMRLQLKRKLQRNRTSFTQEQIEALEKEFERTHYPDVFARERLAAKIDLPEARIQVWFSNRRAKWRREEKLRNQRRQASNTPSHIPISSSFSTSVYQPIPQPTTPVSSFTSGSMLGRTDTALTNTYSALPPMPSFTMANNLPMQPPVPSQTSSYSCMLPTSPSVNGRSYDTYTPPHMQTHMNSQPMGTSGTTSTGLISPGVSVPVQVPGSEPDMSQYWPR

SEQ ID NO: 13256 - protein, 113 aa, Homo sapiens
MGSSGLGKAATLDELLCTCIEMFDDNGELDNSYLPRIVLLMHRWYLSSTELAEKLLCMYRNATGESCNEFRLKICYFMRYWILKFPAEFNLDLGLIRMTEEFREVASQLGYEK

SEQ ID NO: 13257 - protein, 303 aa, Homo sapiens
MAKMEVKTSLLDNMIGVGDMVLLEPLNEETFINNLKKRFDHSEIYTYIGSVVISVNPYRSLPIYSPEKVEEYRNRNFYELSPHIFALSDEAYRSLRDQDKDQCILITGESGAGKTEASKLVMSYVAAVCGKGAEVNQVKEQLLQSNPVLEAFGNAKTVRNDNSSRFGKYMDIEFDFKGDPLGGVISNYLLEKSRVVKQPRGERNFHVFYQLLSGASEELLNKLKLERDFSRYNYLSLDSAKVNGVDDAANFRTVRNAMQIVGFMDHEAESVLAVVAAVLKLGNIEFKPESRVNGLDESKIKDK

SEQ ID NO: 13258 - protein, 624 aa, Homo sapiens
MEKSGPSSTISEQQLQRQEGWINTKTDLAEQSLISSEKWLQLHGLKSNKLTLKQILSQIGFPHCEDYVASLGRPVASRYADGLFPQLYRAEDGRVYNLTAKSELIYQFVEHLTQAVESYKQRMDWLTSKSRQIFGVILEQCVTIVLDFGGILEGELDLCREALTMVLQEQVAHITEFNIIRVSQEPVKWQENATPVTEQSIATAISWVEKLTVELTVSEAGRLDALLEAGRDKTIESIYYFVVGDVPEESKELLLQRALEIPCPVYTVSFNARGEGTIAFLKDLSAKTHSRFHAFAERTECVEFPAFSTKDGDNVMTWNSRKLKGKLPPGAGVREDVFLVWQEMEEACSTLAQIQRLVAEPPKPDVATVDCESETTSVEIASNPEDTWDSKTWLQKYGLKAQKLSLYDVLADCSFRHADGVVDIKAKPENESVQTSAETNKKTVHAKYCSRFVHAPWKDGSLVHVNITKEKCKWYSERIHTALARIRRRIKWLQDGSQSLFGRLHNDCIYILIDTSHSMKSKLDLVKDKIIQFIQEQLKYKSKFNFVKFDGQAVAWREQLAEVNEDNLEQAQSWIRDIKIGSSTNTLSALKTAFADKETQAIYLLTDGRPDQGTSSHLLLTAAV

SEQ ID NO: 13259 - protein, 473 aa, Homo sapiens
MNYDKLSRALRYYYNKRILHKTKGKRFTYKFNFNKLVLVNYPFIDVGLAGGAVPQSAPPVPSGGSHFRFPPSTPSEVLSPTEDPRSPPACSSSSSSLFSAVVARRLGRGSVSDCSDGTSELEEPLGEDPRARPPGPPDLGAFRGPPLARLPHDPGVFRVYPRPRGGPEPLSPFPVSPLAGPGSLLPPQLSPALPMTPTHLAYTPSPTLSPMYPSGGGGPSGSGGGSHFSFSPEDMKRYLQAHTQSVYNYHLSPRAFLHYPGLVVPQPQRPDKCPLPPMAPETPPVPSSASSSSSSSSSPFKFKLQPPPLGRRQRAAGEKAVAGADKSGGSAGGLAEGAGALAPPPPPPQIKVEPISEGESEEVEVTDISDEDEEDGEVFKTPRAPPAPPKPEPGEAPGASQCMPLKLRFKRRWSEDCRLEGGGGPAGGFEDEGEDKKVRGEGPGEAGGPLTPRRVSSDLQHATAQLSLEHRDS

SEQ ID NO: 13260 - protein, 422 aa, Homo sapiens
MTESSMKKLASTLLDAITDKDPLVQEQVCSALCSLGEARPVETLRACEEYLRQHDKLAHPYRAAVLRAMERVLSSRASELDKDTASTIILLASSEMTKTKDLVWDWQQAASGVLVAVGRQFISKVMEELLRRLHPGTLPHCAVLHTLASLSVANAFGVVPFLPSVLSSLLPVLGVAKQDTVRVAFCSALQRFSEGALEYLANLDRAPDPTVRKDAFATDIFSAYDVLFHQWLQSREAKLRLAVVEALGPMSHLLPSERLEEQLPKLLPGILALYKKHAETFYLSKSLGQILEAAVSVGSRTLETQLDALLAALHSQICVPVESSSPLVMSNQKEVLRCFTVLACSSPDRLLAFLLPRLDTSNERTRVGTLQVVRHVINSAGSTNTRITLMLPSAVTRLKHEDCPARAAPQPADLTAAPASVA

SEQ ID NO: 13261 - protein, 4574 aa, Homo sapiens
MSGEDAEVRAVSEDVSNGSSGSPSPGDTLPWNLGKTQRSRRSGGGAGSNGSVLDPAERAVIRIADERDRVQKKTFTKWVNKHLIKAQRHISDLYEDLRDGHNLISLLEVLSGDSLPREKGRMRFHKLQNVQIALDYLRHRQVKLVNIRNDDIADGNPKLTLGLIWTIILHFQISDIQVSGQSEDMTAKEKLLLWSQRMVEGYQGLRCDNFTSSWRDGRLFNAIIHRHKPLLIDMNKVYRQTNLENLDQAFSVAERDLGVTRLLDPEDVDVPQPDEKSIITYVSSLYDAMPRVPDVQDGVRANELQLRWQEYRELVLLLLQWMRHHTAAFEERRFPSSFEEIEILWSQFLKFKEMELPAKEADKNRSKGIYQSLEGAVQAGQLKVPPGYHPLDVEKEWGKLHVAILEREKQLRSEFERLECLQRIVTKLQMEAGLCEEQLNQADALLQSDVRLLAAGKVPQRAGEVERDLDKADSMIRLLFNDVQTLKDGRHPQGEQMYRRVYRLHERLVAIRTEYNLRLKAGVAAPATQVAQVTLQSVQRRPELEDSTLRYLQDLLAWVEENQHRVDGAEWGVDLPSVEAQLGSHRGLHQSIEEFRAKIERARSDEGQLSPATRGAYRDCLGRLDLQYAKLLNSSKARLRSLESLHSFVAAATKELMWLNEKEEEEVGFDWSDRNTNMTAKKESYSALMRELELKEKKIKELQNAGDRLLREDHPARPTVESFQAALQTQWSWMLQLCCCIEAHLKENAAYFQFFSDVREAEGQLQKLQEALRRKYSCDRSATVTRLEDLLQDAQDEKEQLNEYKGHLSGLAKRAKAVVQLKPRHPAHPMRGRLPLLAVCDYKQVEVTVHKGDECQLVGPAQPSHWKVLSSSGSEAAVPSVCFLVPPPNQEAQEAVTRLEAQHQALVTLWHQLHVDMKSLLAWQSLRRDVQLIRSWSLATFRTLKPEEQRQALHSLELHYQAFLRDSQDAGGFGPEDRLMAEREYGSCSHHYQQLLQSLEQGAQEESRCQRCISELKDIRLQLEACETRTVHRLRLPLDKEPARECAQRIAEQQKAQAEVEGLGKGVARLSAEAEKVLALPEPSPAAPTLRSELELTLGKLEQVRSLSAIYLEKLKTISLVIRGTQGAEEVLRAHEEQLKEAQAVPATLPELEATKASLKKLRAQAEAQQPTFDALRDELRGAQEVGERLQQRHGERDVEVERWRERVAQLLERWQAVLAQTDVRQRELEQLGRQLRYYRESADPLGAWLQDARRRQEQIQAMPLADSQAVREQLRQEQALLEEIERHGEKVEECQRFAKQYINAIKDYELQLVTYKAQLEPVASPAKKPKVQSGSESVIQEYVDLRTHYSELTTLTSQYIKFISETLRRMEEEERLAEQQRAEERERLAEVEAALEKQRQLAEAHAQAKAQAEREAKELQQRMQEEVVRREEAAVDAQQQKRSIQEELQQLRQSSEAEIQAKARQAEAAERSRLRIEEEIRVVRLQLEATERQRGGAEGELQALRARAEEAEAQKRQAQEEAERLRRQVQDESQRKRQAEVELASRVKAEAEAAREKQRALQALEELRLQAEEAERRLRQAEVERARQVQVALETAQRSAEAELQSKRASFAEKTAQLERSLQEEHVAVAQLREEAERRAQQQAEAERAREEAERELERWQLKANEALRLRLQAEEVAQQKSLAQAEAEKQKEEAEREARRRGKAEEQAVRQRELAEQELEKQRQLAEGTAQQRLAAEQELIRLRAETEQGEQQRQLLEEELARLQREAAAATQKRQELEAELAKVRAEMEVLLASKARAEEESRSTSEKSKQRLEAEAGRFRELAEEAARLRALAEEAKRQRQLAEEDAARQRAEAERVLAEKLAAIGEATRLKTEAEIALKEKEAENERLRRLAEDEAFQRRRLEEQAAQHKADIEERLAQLRKASDSELERQKGLVEDTLRQRRQVEEEILALKASFEKAAAGKAELELELGRIRSNAEDTLRSKEQAELEAARQRQLAAEEERRRREAEERVQKSLAAEEEAARQRKAALEEVERLKAKVEEARRLRERAEQESARQLQLAQEAAQKRLQAEEKAHAFAVQQKEQELQQTLQQEQSVLDQLRGEAEAARRAAEEAEEARVQAEREAAQSRRQVEEAERLKQSAEEQAQARAQAQAAAEKLRKEAEQEAARRAQAEQAALRQKQAADAEMEKHKKFAEQTLRQKAQVEQELTTLRLQLEETDHQKNLLDEELQRLKAEATEAARQRSQVEEELFSVRVQMEELSKLKARIEAENRALILRDKDNTQRFLQEEAEKMKQVAEEAARLSVAAQEAARLRQLAEEDLAQQRALAEKMLKEKMQAVQEATRLKAEAELLQQQKELAQEQARRLQEDKEQMAQQLAEETQGFQRTLEAERQRQLEMSAEAERLKLRVAEMSRAQARAEEDAQRFRKQAEEIGEKLHRTELATQEKVTLVQTLEIQRQQSDHDAERLREAIAELEREKEKLQQEAKLLQLKSEEMQTVQQEQLLQETQALQQSFLSEKDSLLQRERFIEQEKAKLEQLFQDEVAKAQQLREEQQRQQQQMEQERQRLVASMEEARRRQHEAEEGVRRKQEELQQLEQQRRQQEELLAEENQRLREQLQLLEEQHRAALAHSEEVTASQVAATKTLPNGRDALDGPAAEAEPEHSFDGLRRKVSAQRLQEAGILSAEELQRLAQGHTTVDELARREDVRHYLQGRSSIAGLLLKATNEKLSVYAALQRQLLSPGTALILLEAQAASGFLLDPVRNRRLTVNEAVKEGVVGPELHHKLLSAERAVTGYKDPYTGQQISLFQAMQKGLIVREHGIRLLEAQIATGGVIDPVHSHRVPVDVAYRRGYFDEEMNRVLADPSDDTKGFFDPNTHENLTYLQLLERCVEDPETGLCLLPLTDKAAKGGELVYTDSEARDVFEKATVSAPFGKFQGKTVTIWEIINSEYFTAEQRRDLLRQFRTGRITVEKIIKIIITVVEEQEQKGRLCFEGLRSLVPAAELLESRVIDRELYQQLQRGERSVRDVAEVDTVRRALRGANVIAGVWLEEAGQKLSIYNALKKDLLPSDMAVALLEAQAGTGHIIDPATSARLTVDEAVRAGLVGPEFHEKLLSAEKAVTGYRDPYTGQSVSLFQALKKGLIPREQGLRLLDAQLSTGGIVDPSKSHRVPLDVACARGCLDEETSRALSAPRADAKAYSDPSTGEPATYGELQQRCRPDQLTGLSLLPLSEKAARARQEELYSELQARETFEKTPVEVPVGGFKGRTVTVWELISSEYFTAEQRQELLRQFRTGKVTVEKVIKILITIVEEVETLRQERLSFSGLRAPVPASELLASGVLSRAQFEQLKDGKTTVKDLSELGSVRTLLQGSGCLAGIYLEDTKEKVSIYEAMRRGLLRATTAALLLEAQAATGFLVDPVRNQRLYVHEAVKAGVVGPELHEQLLSAEKAVTGYRDPYSGSTISLFQAMQKGLVLRQHGIRLLEAQIATGGIIDPVHSHRVPVDVAYQRGYFSEEMNRVLADPSDDTKGFFDPNTHENLTYRQLLERCVEDPETGLRLLPLKGAEKAEVVETTQVYTEEETRRAFEETQIDIPGGGSHGGSTMSLWEVMQSDLIPEEQRAQLMADFQAGRVTKERMIIIIIEIIEKTEIIRQQGLASYDYVRRRLTAEDLFEARIISLETYNLLREGTRSLREALEAESAWCYLYGTGSVAGVYLPGSRQTLSIYQALKKGLLSAEVARLLLEAQAATGFLLDPVKGERLTVDEAVRKGLVGPELHDRLLSAERAVTGYRDPYTEQTISLFQAMKKELIPTEEALRLLDAQLATGGIVDPRLGFHLPLEVAYQRGYLNKDTHDQLSEPSEVRSYVDPSTDERLSYTQLLRRCRRDDGTGQLLLPLSDARKLTFRGLRKQITMEELVRSQVMDEATALQLREGLTSIEEVTKNLQKFLEGTSCIAGVFVDATKERLSVYQAMKKGIIRPGTAFELLEAQAATGYVIDPIKGLKLTVEEAVRMGIVGPEFKDKLLSAERAVTGYKDPYSGKLISLFQAMKKGLILKDHGIRLLEAQIATGGIIDPEESHRLPVEVAYKRGLFDEEMNEILTDPSDDTKGFFDPNTEENLTYLQLMERCITDPQTGLCLLPLKEKKRERKTSSKSSVRKRRVVIVDPETGKEMSVYEAYRKGLIDHQTYLELSEQECEWEEITISSSDGVVKSMIIDRRSGRQYDIDDAIAKNLIDRSALDQYRAGTLSITEFADMLSGNAGGFRSRSSSVGSSSSYPISPAVSRTQLASWSDPTEETGPVAGILDTETLEKVSITEAMHRNLVDNITGQRLLEAQACTGGIIDPSTGERFPVTDAVNKGLVDKIMVDRINLAQKAFCGFEDPRTKTKMSAAQALKKGWLYYEAGQRFLEVQYLTGGLIEPDTPGRVPLDEALQRGTVDARTAQKLRDVGAYSKYLTCPKTKLKISYKDALDRSMVEEGTGLRLLEAAAQSTKGYYSPYSVSGSGSTAGSRTGSRTGSRAGSRRGSFDATGSGFSMTFSSSSYSSSGYGRRYASGSSASLGGPESAVA

SEQ ID NO: 13262 - protein, 1034 aa, Homo sapiens
MFHLRTCAAKLRPLTASQTVKTFSQNRPAAARTFQQIRCYSAPVAAEPFLSGTSSNYVEEMYCAWLENPKSVHKSWDIFFRNTNAGAPPGTAYQSPLPLSRGSLAAVAHAQSLVEAQPNVDKLVEDHLAVQSLIRAYQVRGHHIAKLDPLGISCVNFDDAPVTVSSNVDLAVFKERLRMLTVGGFYGLDESDLDKVFHLPTTTFIGGQESALPLREIIRRLEMAYCQHIGVEFMFINDLEQCQWIRQKFETPGIMQFTNEEKRTLLARLVRSTRFEEFLQRKWSSEKRFGLEGCEVLIPALKTIIDKSSENGVDYVIMGMPHRGRLNVLANVIRKELEQIFCQFDSKLEAADEGSGDVKYHLGMYHRRINRVTDRNITLSLVANPSHLEAADPVVMGKTKAEQFYCGDTEGKKVMSILLHGDAAFAGQGIVYETFHLSDLPSYTTHGTVHVVVNNQIGFTTDPRMARSSPYPTDVARVVNAPIFHVNSDDPEAVMYVCKVAAEWRSTFHKDVVVDLVCYRRNGHNEMDEPMFTQPLMYKQIRKQKPVLQKYAELLVSQGVVNQPEYEEEISKYDKICEEAFARSKDEKILHIKHWLDSPWPGFFTLDGQPRSMSCPSTGLTEDILTHIGNVASSVPVENFTIHGGLSRILKTRGEMVKNRTVDWALAEYMAFGSLLKEGIHIRLSGQDVERGTFSHRHHVLHDQNVDKRTCIPMNHLWPNQAPYTVCNSSLSEYGVLGFELGFAMASPNALVLWEAQFGDFHNTAQCIIDQFICPGQAKWVRQNGIVLLLPHGMEGMGPEHSSARPERFLQMCNDDPDVLPDLKEANFDINQLYDCNWVVVNCSTPGNFFHVLRRQILLPFRKPLIIFTPKSLLRHPEARSSFDEMLPGTHFQRVIPEDGPAAQNPENVKRLLFCTGKVYYDLTRERKARDMVGQVAITRIEQLSPFPFDLLLKEVQKYPNAELAWCQEEHKNQGYYDYVKPRLRTTISRAKPVWYAGRDPAAAPATGNKKTHLTELQRLLDTAFDLDVFKNFS

SEQ ID NO: 13263 - protein, 711 aa, Homo sapiens
MLSCLKEEMPPQELTRRLATVITHVDEIMQQEVRPLMAVEIIEQLHRQFAILSGGRGEDGAPIITFPEFSGFKHIPDEDFLNVMTYLTSIPSVEAASIGFIVVIDRRRDKWSSVKASLTRIAVAFPGNLQLIFILRPSRFIQRTFTDIGIKYYRNEFKTKVPIIMVNSVSDLHGYIDKSQLTRELGGTLEYRHGQWVNHRTAIENFALTLKTTAQMLQTFGSCLATAELPRSMLSTEDLLMSHTRQRDKLQDELKLLGKQGTTLLSCIQEPATKCPNSKLNLNQLENVTTMERLLVQLDETEKAFSHFWSEHHLKLNQCLQLQHFEHDFCKAKLALDNLLEEQAEFTGIGDSVMHVEQILKEHKKLEEKSQEPLEKAQLLALVGDQLIQSHHYAADAIRPRCVELRHLCDDFINGNKKKWDILGKSLEFHRQLDKVSQWCEAGIYLLASQAVDKCQSREGVDIALNDIATFLGTVKEYPLLSPKEFYNEFELLLTLDAKAKAQKVLQRLDDVQEIFHKRQVSLMKLAAKQTRPVQPVAPHPESSPKWVSSKTSQPSTSVPLARPLRTSEEPYTETELNSRGKEDDETKFEVKSEEIFESHHERGNPELEQQARLGDLSPRRRIIRDLLETEEIYIKEIKSIIDGYITPMDFIWLKHLIPDVLQNNKDFLFGNIRELYEFHNRTFLKELEKCAENPELLAHCFLKRVSLYSQ

SEQ ID NO: 13264 - protein, 731 aa, Homo sapiens
MKTRSPKPLLTGLMWAQQGTTPGTPKLRHTCEQGDGVGPYGWEFHDGLSFGRQHIQDGALRLTTEFVKRPGGQHGGDWSWRVTVEPQDSGTSALPLVSLFFYVVTDGKEVLLPEVGAKGQLKFISGHTSELGDFRFTLLPPTSPGDTAPKYGSYNVFWTSNPGLPLLTEMVKSRLNSWFQHRPPGAPPERYLGLPGSLKWEDRGPSGQGQGQFLIQQVTLKIPISIEFVFESGSAQAGGNQALPRLAGSLLTQALESHAEGFRERFEKTFQLKEKGLSSGEQVLGQAALSGLLGGIGYFYGQGLVLPDIGVEGSEQKVDPALFPPVPLFTAVPSRSFFPRGFLWDEGFHQLVVQRWDPSLTREALGHWLGLLNADGWIGREQILGDEARARVPPEFLVQRAVHANPPTLLLPVAHMLEVGDPDDLAFLRKALPRLHAWFSWLHQSQAGPLPLSYRWRGRDPALPTLLNPKTLPSGLDDYPRASHPSVTERHLDLRCWVALGARVLTRLAEHLGEAEVAAELGPLAASLEAAESLDELHWAPELGVFADFGNHTKAVQLKPRPPQGLVRVVGRPQPQLQYVDALGYVSLFPLLLRLLDPTSSRLGPLLDILADSRHLWSPFGLRSLAASSSFYGQRNSEHDPPYWRGAVWLNVNYLALGALHHYGHLEGPHQARAAKLHGELRANVVGNVWRQYQATGFLWEQYSDRDGRGMGCRPFHGWTSLVLLAMAEDY

SEQ ID NO: 13265 - protein, 305 aa, Homo sapiens
MSFLRITPSTHSSVSSGLLRLSIFLLLSFPDSNGKAIWTAHLNITFQVGNEITSELGESGVFGNHSPLERVSGVVALPEGWNQNACHPLTNFSRPKQADSWLALIERGGCTFTHKINVAAEKGANGVIIYNYQGTGSKVFPMSHQGTENIVAVMISNLKGMEILHSIQKGVYVTVIIEVGRMHMQWVSHYIMYLFTFLAATIAYFYLDCVWRLTPRVPNSFTRRRSQIKTDVKKAIDQLQLRVLKEGDEELDLNEDNCVVCFDTYKPQDVVRILTCKHFFHKACIDPWLLAHRTCPMCKCDILKT

SEQ ID NO: 13266 - protein, 225 aa, Homo sapiens
MGNAESQHVEHEFYGEKHASLGRKHTSRSLRLSHKTRRTRHASSGKVIHRNSEVSTRSSSTPSIPQSLAENGLEPFSQDGTLEDFGSPIWVDRVDMGLRPVSYTDSSVTPSVDSSIVLTAASVQSMPDTEESRLYGDDATYLAEGGRRQHSYTSNGPTFMETASFKKKRSKSADIWREDSLEFSLSDLSQEHLTSNEEILGSAEEKDCEEARGMETRASPRQLST

SEQ ID NO: 13267 - protein, 301 aa, Homo sapiens
TRLVSPRDRGGAGGSLRLKSLFTEPSEPLPEESKPVEMPFHHCHRDPLPPPGLTPERLHARRQLYAACAVCFVFMAGEVVGGYLAHSLAIMTDAAHLLADVGSMMGSLFSLWLSTRPATRTMTFGWHRSEWPLCCTRLGPPTATGLGEQSMHRWRRGLKSPCPWGTPASGRHLCTCWGTSCRALGYWLPPSSSTSSLNTRQPTPSAPSSSPSVPLDPPLPPSETFFESSWKVPPAMWGSNLCGIRCCRCQESGQPMSCTCGPLRSLTMLPLHTWPSTPPLTLKPSWLKPHPGSTPGLDSPA

SEQ ID NO: 13268 - protein, 332 aa, Homo sapiens
DLTDEWRSTHEAYVTVLEGFSGNTTLFSCSHNFWLAIDMSFEPPEFEIVGFTNHINVMVKFPSIVEEELQFDLSLVIEEQSEGIVKKHKPEIKGNMSGNFTYIIDKLIPNTNYCVSVYLEHSDEQAVIKSPLKCTLLPPGQESALGMVPPPENVRMNSVNFKNILQWESPAFAKGNLTFTAQYLSYRIFQDKCMNTTLTECDFSSLSKYGDHTLRVRAEFADEHSDWVNITFCPVDDTIIGPPGMQVEVLADSLHMRFLAPKIENEYETWTMKNVYNSWTYNVQYWKNGTDEKFQITPQYDFEVLRNLEPWTTYCVQVRGFLPDRNKAGEWS

SEQ ID NO: 13269 - protein, 795 aa, Homo sapiens
MDQREILQKFLDEAQSKKITKEEFANEFLKLKRQSTKYKADKTYPTTVAEKPKNIKKNRYKDILPYDYSRVELSLITSDEDSSYINANFIKGVYGPKAYIATQGPLSTTLLDFWRMIWEYSVLIIVMACMEYEMGKKKCERYWAEPGEMQLEFGPFSVSCEAEKRKSDYIIRTLKVKFNSETRTIYQFHYKNWPDHDVPSSIDPILELIWDVRCYQEDDSVPICIHCSAGCGRTGVICAIDYTWMLLKDGIIPENFSVFSLIREMRTQRPSLVQTQEQYELVYNAVLELFKRQMDVIRDKHSGTESQAKHCIPEKNHTLQADSYSPNLPKSTTKAAKMMNQQRTKMEIKESSSFDFRTSEISAKEELVLHPAKSSTSFDFLELNYSFDKNADTTMKWQTKAFPIVGEPLQKHQSLDLGSLLFEGCSNSKPVNAAGRYFNSKVPITRTKSTPFELIQQRETKEVDSKENFSYLESQPHDSCFVEMQAQKVMHVSSAELNYSLPYDSKHQIRNASNVKHHDSSALGVYSYIPLVENPYFSSWPPSGTSSKMSLDLPEKQDGTVFPSSLLPTSSTSLFSYYNSHDSLSLNSPTNISSLLNQESAVLATAPRIDDEIPPPLPVWTPESFIVVEEAGEFSPNVPKSLSSAVKVKIGTSLEWGGTSEPKKFDDSVILRPSKSVKLRSPKSELHQDRSSPPPPLPERTLESFFLADEDCMQAQSIETYSTSYPDTMENSTSSKQTLKTPGKSFTRSKSLKILRNMKKSICNSCPPNKPAESVQSNNSSSFLNFGMCVILLKS

SEQ ID NO: 13270 - protein, 155 aa, Homo sapiens
MLPKRRRARVGSPSGDAASSTPPSTRFPGVAIYLVEPRMGRSRRAFLTGLARSKGFRVLDACSSEATHVVMEETSAEEAVSWQERRMAAAPPGCTPPALLDISWLTESLGAGQPVPVECRHRLEELLEHGVCEEVERVRRSERYQTMKGSSTTRT

SEQ ID NO: 13271 - protein, 1198 aa, Homo sapiens
MNFEGLDPGLAEYAPAMHSALDPVLDAHLNPSLLQNVELDPEGVALEALPVQESVHIMEGVYSELHSVVAEVGVPVSVSHFDLHEEMLWVGSHGGHATSFFGPALERYSSFQVNGSDDIRQIQSLENGILFLTKNNLKYMARGGLIIFDYLLDENEDMHSLLLTDSSTLLVGGLQNHIIEIDLNTVQETQKYAVETPGVTIMRQTNRFFFCGHTSGKVSLRDLRTFKVEHEFDAFSGSLSDFDVHGNLLAACGFSSRLTGLACDRFLKVYDLRMMRAITPLQVHVDPAFLRFIPTYTSRLAIISQSGQCQFCEPTGLANPADIFHVNPVGPLLMTFDVSASKQALAFGDSEGCVHLWTDSPEPSFNPYSRETEFALPCLVDSLPPLDWSQDLLPLSLIPVPLTTDTLLSDWPAANSAPAPRRAPPVDAEILRTMKKVGFIGYAPNPRTRLRNQIPYRLKESDSEFDSFSQVTESPVGREEEPHLHMVSKKYRKVTIKYSKLGLEDFDFKHYNKTLFAGLEPHIPNAYCNCMIQVLYFLEPVRCLIQNHLCQKEFCLACELGFLFHMLDLSRGDPCQGNNFLRAFRTIPEASALGLILADSDEASGKGNLARLIQRWNRFILTQLHQDMQELEIPQAYRGAGGSSFCSSGDSVIGQLFSCEMENCSLCRCGSETVRASSTLLFTLSYPDDKTGKNYDFAQVLKRSICLDQNTQAWCDTCEKYQPTIQTRNIRHLPDILVINCEVNSSKEADFWRMQAEVAFKMAVKKHGGEISKNKEFALADWKELGSPEGVLVCPSIEELKNVWLPFSIRMKMTKNKGLDVCNWTDGDEMQWGPARAEEEHGVYVYDLMATVVHILDSRTGGSLVAHIKVGETYHQRKEGVTHQQWYLFNDFLIEPIDKHEAVQFDMNWKVPAILYYVKRNLNSRYNLNIKNPIEASVLLAEASLARKQRKTHTTFIPLMLNEMPQIGDLVGLDAEFVTLNEEEAELRSDGTKSTIKPSQMSVARITCVRGQGPNEGIPFIDDYISTQEQVVDYLTQYSGIKPGDLDAKISSKHLTTLKSTYLKLRFLIDIGVKFVGHGLQKDFRVINLMVPKDQVLDTVYLFHMPRKRMISLRFLAWYFLDLKIQGETHDSIEDARTALQLYRKYLELSKNGTEPESFHKVLKGLYEKGRKMDWKVPEPEGQTSPKNAAVFSSVLAL

SEQ ID NO: 13272 - protein, 687 aa, Homo sapiens
MERGGGGSGTGSRPEGTARGTSLPGKIAEPGAVRTSQPNYRPQGMEGFLKSDERQRLAKERREEREKCLAAREQQILEKQKRARLQYEKQMEERWRKLEEQRQREDQKRAAVEEKRKQKLREEEERLEAMMRRSLERTQQLELKKKYSWGAPLAIGPGGHDAPLGPLNPSYKSSPTRNIEKKKATSTSTSGAGDVGKEALSGGEASLVEKVKRGQRTATSLPVVNFGSPLRRCEFSGGIPKRPSSPVISKTATKAYPQSPKTTKPPYPGSPVKYRLPALSGQDMPKRKAEKEKSNKEREGTLAQQAAGPQGEEALEKHVVDKHASEKHAAAAGGKAENSAALGKPTAGTTDAGEAAKILAEKRRQARLQKEQEEQERLEKEEQDRLEREELKRKAEEERLRLEEEARKQEEERKRQEEEKKKQEGEEKRKAGEEAKRKAEEELLLKEKQEQEKQEKAMIEKQKEAAETKAREVAEQMRLEREQIMLQIEQERLERKKRIDEIMKRTRKSDVSPQVKKEDPKVGVQPAVCVEKKTKLVVPNKMEINGLNTCQEVNGVDHAAPETYPQDIFSNGLKPAGGLIHLDALDGKSNSLDDSTEEVQSMDVSPVSKEELISIPEFSPVSEMIPGVSLDQNGTGNARALQDLLDFTGPPTFPKRSSENLSLDDCNKNLIEGFNSPGQETPLNTFC

SEQ ID NO: 13273 - protein, 1882 aa, Homo sapiens
MVGRGVPLCAAQPAVAEGGPAREPPPLLEVSPRKRLPAGPDQDPCGSRPAPEGAGAGPEQGHSAGGGGWCRHCHTKLVELKRQAWKLVSGPGTTLRDPCLSALLLDKLPAPGALPACRPEAERRCDVCATHLQQLTREAMHLLQAPASHEDLDAPHGGPSLAPPSTTTSSRDTPGPAGPAGRQPGRAGPDRTKGLAWSPGPSVQVSVAPAGLGGALSTVTIQAQQCLEGMWSVSRVNSFLPPACLAEAAVAAVAVADTVRECPPVAGPDGLSKAWGRGGVCTSALVTPTPGSVGGSTGPSAAASFFIRAMQKLSLASKRKKPHPPPPPATRGTSTYPTDFSGVLQLWPPPAPPCLLRAASKTKDNPGSIGKVKVMLRIWPAQGAQRSAEAMSFLKVDPRKKQVILYDPAAGPPGSAGPRRAATAAVPKMFAFDAVFPQDSEQAEVCSGTVADVLQSVVSGADGCIFSFGHMSLGKSYTMIGKDSSPQSLGIVPCAISWLFRLIEERRERTGTRFSVRVSAVEVCGRDQSLRDLLAEVAPGSLQDTQSPGVYLREDPVCGAQLQNQSELRAPTAEKAAFYLDAALAARSTSRAGCGEDARRSSHMLFTLHVYQYRMEKCGRGGMSGGRSRLHLIDLGSCEAAAGRAGEAAGGPLCLSLSALGSVILALVNGAKHVPYRDHRLTMLLRESLATAGCRTTMIAHVSDAPAQHAETLSTVQLAARIHRLRRKKAKYASSSSGGESSCEEGRARRPPHLRPFHPRTVALDPDRTPPCLPGDPDYSSSSEQSCDTVIYVGPGGAALSDRELTDNEGPPDFVPIIPALSRHRPSKGPRDADHFRCSTFAELQERLECMDGNEGPSGGPGGTDGAQASPARGGRKPSPPEAASPRKAVGTPMAASTPRGSSGPDTHQGTPEPCKAIVWGDQREDSSAWPELLVPEKAAVSGGRRPLPSPAPPPPQLLEACRAPEEPGGGGTDGVARTPPVGMSGQVAGSPMLPGATCPRLAAGSRCPERGLLTTTVTLQRPVELNGEDELVFTVVEELSLGALAGAGRPTSLASFDSDCSLRALASGSRPVSIISSINDEFDAYTSQAPEGGPLEGAAWAGSSHGSSISSWLSEVSVCTADSRDPTPQPRFSPDSLAGLDPGGPPALDGSLGDGSSGFLGPDRPDSPGPTWGPCPGEVAAVAPSRPGREPQAGPSRWASAAQTIHSSLPRKPRTASATTRVGCARLGQSPPGRGGLFEDPWLLRVGECDTQAASAGRAPSPTLGSPRLPEAQVMLACAQRVVDGCEVAARAARRPEAVARIPPLRRGATTLGVTTPAVSWGDAPTEVVACSGSLKASPTSKKGLAPKAGFLPRPSGAAPPAPPTRKSSLEQRSSPASAPPHAVNPARVGAAAVLRGEEEPRPSSRADHSVPRATSSLKARASKVEAAHRLAGHASLERYEGLAHSSSKGREAPGRPPRAVPKLGVPPSSPTHGPAPACRSGAAKAVGAPKPPVGGGKGRGLVAGGSRALGPSVKLSTASVTGRSPGGPVAGPRAAPRAGPSVGAKAGRGTVMGTKQALRAAHSRVHELSASGAPGRGGSSWGSADSDSGHDSGVNVGEERPPTGPALPSPYSKVTAPRRPQRYSSGHGSDNSSVLSGELPPAMGRTALFHHSGGSSGYESLRRDSEATGSASSAPDSMSESGAASPGARTRSLKSPKKRATGLQRRRLIPAPLPDTTALGRKPSLPGQWVDLPPPLAGSLKEPFEIKVYEIDDVERLQRPRPTPREAPTQGLACVSTRLRLAERRQQRLREVQAKHKHLCEELAETQGRLMLEPGRWLEQFEVDPELEPESAEYLAALERATAALEQCVNLCKAHVMMVTCFDISVAASAAIPGPQEVDV

SEQ ID NO: 13274 - protein, 277 aa, Homo sapiens
MAHGIPSQGKVTITVDEYSSNPTQAFTHYNINQSRFQPPHVHMVDPIPYDTPKPAGHTRFVCISDTHSRTDGIQMPYGDILLHTGDFTELGLPSEVKKFNDWLGNLPYEYKIVIAGNHELTFDKEFMADLVKQDYYRFPSVSKLKPEDFDNVQSLLTNSIYLQDSEVTVKGFRIYGAPWTPWFNGWGFNLPRGQSLLDKWNLIPEGIDILMTHGPPLGFRDWVPKELQRVGCVELLNTVQRRVRPKLHVFGGIHEVNPVSISKALRTKICSLPSKTS

SEQ ID NO: 13275 - protein, 490 aa, Homo sapiens
MSSCVSSQPSSNRAAPQDELGGRGSSSSESQKPCEALRGLSSLSIHLGMESFIVVTECEPGCAVDLGLARDRPLEADGQEVPLDTSGSQARPHLSGRKLSLQERSQGGLAAGGSLDMNGRCICPSLPYSPVSSPQSSPRLPRRPTVESHHVSITGMQDCVQLNQYTLKDEIGKGSYGVVKLAYNENDNTYYAMKVLSKKKLIRQAGFPRRPPPRGTRPAPGGCIQPRGPIEQVYQEIAILKKLDHPNVVKLVEVLDDPNEDHLYMVFELVNQGPVMEVPTLKPLSEDQARFYFQDLIKGIEYLHYQKIIHRDIKPSNLLVGEDGHIKIADFGVSNEFKGSDALLSNTVGTPAFMAPESLSETRKIFSGKALDVWAMGVTLYCFVFGQCPFMDERIMCLHSKIKSQALEFPDQPDIAEDLKDLITRMLDKNPESRIVVPEIKILVKTMIRKRSFGNPFEGSRREERSLSAPGNLLTKKPTRECESLSELKT

SEQ ID NO: 13276 - protein, 920 aa, Homo sapiens
MSEDSEKEDYSDRTISDEDESDEDMFMKFVSEDLHRCALLTADSFGDPFFPRTTQILLEYQLGRWVPRLREPRDLYGVSSSGPLSPTRWPYHCEVIDEKVQHIDWTPSCPEPVYIPTGLETEPLYPDSKEATVVYLAEDAYKEPCFVYSRVGGNRTPLKQPVDYRDNTLMFEARFESGNLQKVVKVAEYEYQLTVRPDLFTNKHTQWYYFQVTNMRAGIVYRFTIVNFTKPASLYSRGMRPLFYSEKEAKAHHIGWQRIGDQIKYYRNNPGQDGRHYFSLTWTFQFPHNKDTCYFAHCYPYTYTNLQEYLSGINNDPVRSKFCKIRVLCHTLARNMVYILTITTPLKNSDSRKRKAVILTARVHPGETNSSWIMKGFLDYILGNSSDAQLLRDTFVFKVVPMLNPDGVIVGNYRCSLAGRDLNRNYTSLLKESFPSVWYTRNMVHRLMEKREVILYCDLHGHSRKENIFMYGCDGSDRSKTLYLQQRIFPLMLSKNCPDKFSFSACKFNVQKSKEGTGRVVMWKMGIRNSFTMEATFCGSTLGNKRGTHFSTKDLESMGYHFCDSLLDYCDPDRTKYYRCLKELEEMERHITLEKVFEDSDTPVIDITLDVESSSRGSDSSESIDSLTYLLKLTSQKKHLKTKKERNSTIASHQNARGQEVYDRGHLLQRHTQSNSDVKDTRPNEPDDYMVDYFRRQLPNQGLDLHHNLKSKIKECISFQSKKTGINWTDDEKRSYKDKGIVQTQEILQYLLPIVHSTKNMQTTQIKQLFNPRTNFQIQHQLNPATCRNIKKYSTSWTAPRNHPFVIQGDVMANSSEWVQSKPHRSLESLSPLKGPKKNKHSQIWAIKNEDIKPLSSKWETASSSFGMDANVLKYKSLQAEETNQQSSKHTALHLTKNKDEQANKNDGQPTLYLKFQRES

SEQ ID NO: 13277 - protein, 374 aa, Homo sapiens
MDFNMKKLASDAGIFFTRAVQFTEEKFGQAEKTELDAHFENLLARADSTKNWTEKILRQTEVLLQPNPSARVEEFLYEKLDRKVPSRVTNGELLAQYMADAASELGPTTPYGKTLIKVAEAEKQLGAAERDFIHTASISFLTPLRNFLEGDWKTISKERRLLQNRRLDLDACKARLKKAKAAEAKATLWNDEVDKAEQELRVAQTEFDRQAEVTRLLLEGISSTHVNHLRCLHEFVKSQTTYYAQCYRHMLDLQKQLGRFPGTFVGTTEPASPPLSSTSPTTAAATMPVVPSVASLAPPGEASLCLEEVAPPASGTRKARVLYDYEAADSSELALLADELITVYSLPGMDPDWLIGERGNKKGKVPVTYLELLS

SEQ ID NO: 13278 - protein, 229 aa, Homo sapiens
YFVLGSLIYSDAKSKKNRNCVFITDTDPRVLEKQELQQPTYVALSYINRFMTDAARREQESLKKKIQPKLSLTLSSSVSRGNVSTPPRHSSGSLTPPVTPPITPSSSFRSSTPTGSEYDEEEVDYEESDSDESWTTESAISSEAILSSMCMNGGEEKPFACPVPGCKKRYKNVNGIKYHAKNGHRTQIRVRKPFKCRCGKSYKTAQGLRHHTINFHPPVSAEIIRKMQQ

SEQ ID NO: 13279 - protein, 970 aa, Homo sapiens
MALSQGLLTFRDVAIEFSQEEWKCLDPAQRTLYRDVMLENYRNLVSLDISSKCMMKEFSSTAQGNTEVIHTGTLQRHERHHIGDFCFQEMEKDIHDFEFQWKEDERNSHEAPMTEIKQLTGSTNRHDQRHAGNKPIKDQLGSSFHSHLPELHMFQTEGKIGNQVEKSINSASLVSTSQRISCRPKTHISKNYGNNFLNSSLLTQKQEVHMREKSFQCNESGKAFNYSSVLRKHQIIHLGAKQYKCDVCGKVFNQKRYLACHRRCHTGKKPYKCNDCGKTFSQELTLTCHHRLHTGEKHYKCSECGKTFSRNSALVIHKAIHTGEKSYKCNECGKTFSQTSYLVYHRRLHTGEKPYKCEECDKAFSFKSNLERHRKIHTGEKPYKCNECSRTFSRKSSLTRHRRLHTGEKPYKCNDCGKTFSQMSSLVYHRRLHTGEKPYKCEECDEAFSFKSNLERHRRIHTGEKPYKCNDCGKTFSQTSSLVYHRRLHTGEKPYKCEECDEAFSFKSNLERHRIIHTGEKLYKCNECGKTFSRKSSLTRHCRLHTGEKPYQCNECGKAFRGQSALIYHQAIHGIGKLYKCNDCHQVFSNATTIANHWRIHNEERSYKCNRCGKFFRHRSYLAVHWRTHSGEKPYKCEECDEAFSFKSNLQRHRRIHTGEKPYRCNECGKTFSRKSYLTCHRRLHTGEKPYKCNECGKTFGRNSALIIHKAIHTGEKPYKCNECGKAFSQKSSLTCHLRLHTGEKPYKCEECDKVFSRKSSLEKHRRIHTGEKPYKCKVCDKAFGRDSHLAQHTRIHTGEKPYKCNECGKNFRHNSALVIHKAIHSGEKPYKCNECGKTFRHNSALEIHKAIHTGEKPYKCSECGKVFNRKANLSRHHRLHTGEKPYKCNKCGKVFNQQAHLACHHRIHTGEKPYKCNECGKTFRHNSVLVIHKTIHTGEKPYKCNECGKVFNRKAKLARHHRIHTGKKH

SEQ ID NO: 13280 - protein, 250 aa, Homo sapiens
MEEGHGLDLTYITERIIAVSFPAGCSEESYLHNLQEVTRMLKSKHGDNYLVLNLSEKRYDLTKLNPKIMDVGWPELHAPPLDKMCTICKAQESWLNSNLQHVVVIHCRGGKGRIGVVISSYMHFTNVSASADQALDRFAMKKFYDDKVSALMQPSQKRYVQFLSGLLSGSVKMNASPLFLHFVILHGTPNFDTGGVCRPFLKLYQAMQPVYTSGIYNVGPENPSRICIVIEPAQLLKGDVMVMNYNIANI

SEQ ID NO: 13281 - protein, 515 aa, Homo sapiens
MCQVGEDYGEPAPEEPPPAPRPSREQKCVKCKEAQPVVVIRAGDAFCRDCFKAFYVHKFRAMLGKNRLIFPGEKVLLAWSGGPSSSSMVWQVLEGLSQDSAKRLRFVAGVIFVDEGAACGQSLEERSKTLAEVKPILQATGFPWHVVALEEVFSLPPSVLWCSAQELVGSEGAYKAAVDSFLQQQHVLGAGGGPGPTQGEEQPPQPPLDPQNLARPPAPAQTEALSQLFCSVRTLTAKEELLQTLRTHLILHMARAHGYSKVMTGDSCTRLAIKLMTNLALGRGAFLAWDTGFSDERHGDVVVVRPMRDHTLKEVAFYNRLFSVPSVFTPAVDTKAPEKASIHRLMEAFILRLQTQFPSTVSTVYRTSEKLVKGPRDGPAAGDSGPRCLLCMCALDVDAADSATAFGAQTSSRLSQMQSPIPLTETRTPPGPCCSPGVGWAQRCGQGACRREDPQACIEEQLCYSCRVNMKDLPSLDPLPPYILAEAQLRTQRAWGLQEIRDCLIEDSDDEAGQS

SEQ ID NO: 13282 - protein, 531 aa, Homo sapiens
MLGFLSRGPSMKLCMGLACVLSLWNTVSGIKGEAKKEKGMTFLPTTVSGLREEERKEKGVAFLATTELPARSIDLSALNLTELVNGMLSRALKDSKKFFSLLSVTSYSSFAFHKFSVAVYNISNLKTVDPAKFPTRYCYCLNNRTNDLSDFTALLVDIIGNSTSYLTEIFKSTSILSVNQSNESDCIFICVMTGKSGRNLSDFWEIEEKYPIINYTFTSGLSGVLGAATRGTARTSKPTTKSQKTLPSTSPGHWTQSTPWASALRSSPWTETAAPSETEETLNTGRPPELPARATATWFSASHTLPALATRRVARTQWLTADRQTWASISSVPWAQTISEKKPGGSLWETRSSPPTTAGTEEAMNTTSLLAPAAEIMATPGSPSQASPTLGAFTHGTQTPSPTKATAPRYPQTGDLSAEWPFTAGEEPVLVPRPHQVSRCPQPLFKVGAMAAAPLTLAIQRLNPCLMELCQFFQQCLCMSQRSPRTEDMRYCLEYYSWFLKNATYICQRVKRVSHSHTLKQKCLENICKSV

SEQ ID NO: 13283 - protein, 127 aa, Homo sapiens
YPYNQCAVVGNGGILNKSLCGTEIDKSDFVFRCNLPPTTGDVSKDVGSKTNLVTINPSIITLKYGNLKEKKALFLEDIATYGDAFFLLPAFSFRANTGTSFKVYYTLEESKARQKCKTKRKTINSIL

SEQ ID NO: 13284 - protein, 122 aa, Homo sapiens
MALVSGISLDPEAAIGVTKRPPPKWVDGVDEIQYDVGRIKQKMKELASLHDKHLNRPTLDDSSEEEHAIEITTQEITQLFHRCQRAVQALPSRARACSEQEGRLLGNVVASLAQALQELSTS

SEQ ID NO: 13285 - protein, 1289 aa, Homo sapiens
SHIGKDEEIPDSSKISLSCKKTGSKKKSSQSEGIFLGSESDEDSVRTSSSQRSHDLKFSASIEKERDFKKSSAPLKSEDLGKPSRSKTDRDDKYFSYSKLERDTRYVSSRCRSERERRRSRSHSRSERGSRTNLSYSRSERSHYYDSDRRYHRSSPYRERTRYSRPYTDNRARESSDSEEEYKKTYSRRTSSHSSSYRDLRTSSYSKSDRDCKTETSYLEMERRGKYSSKLERESKRTSENEAIKRCCSPPNELGFRRGSSYSKHDSSASRYKSTLSKPIPKSDKFKNSFCCTELNEEIKQSHSFSLQTPCSKGSELRMINKNPEREKAGSPAPSNRLNDSPTLKKLDELPIFKSEFITHDSHDSIKELDSLSKVKNDQLRSFCPIELNINGSPGAESDLATFCTSKTDAVLMTSDDSVTGSELSPLVKACMLSSNGFQNISRCKEKDLDDTCMLHKKSESPFRETEPLVSPHQDKLMSMPVMTVDYSKTVVKEPVDTRVSCCKTKDSDIYCTLNDSNPSLCNSEAENIEPSVMKISSNSFMNVHLESKPVICDSRNLTDHSKFACEEYKQSIGSTSSASVNHFDDLYQPIGSSGIASSLQSLPPGIKVDSLTLLKCGENTSPVLDAVLKSKKSSEFLKHAGKETIVEVGSDLPDSGKGFASRENRRNNGLSGKCLQEAQEEGNSILPERRGRPEISLDERGEGGHVHTSDDSEVVFSSCDLNLTMEDSDGVTYALKCDSSGHAPEIVSTVHEDYSGSSESSNDESDSEDTDSDDSSIPRNRLQSVVVVPKNSTLPMEETSPCSSRSSQSYRHYSDHWEDERLESRRHLYEEKFESIASKACPQTDKFFLHKGTEKNPEISFTQSSRKQIDNRLPELSHPQSDGVDSTSHTDVKSDPLGHPNSEETVKAKIPSRQQEELPIYSSDFEDVPNKSWQQTTFQNRPDSRLGKTELSFSSSCEIPHVDGLHSSEELRNLGWDFSQEKPSTTYQQPDSSYGACGGHKYQQNAEQYGGTRDYWQGNGYWDPRSGRPPGTGVVYDRTQGQVPDSLTDDREEEENWDQQDGSHFSDQSDKFLLSLQKDKGSVQAPEISSNSIKDTLAVNEKKDFSKNLEKNDIKDRGPLKKRRQEIESDSESDGELQDRKKVRVEVEQGETSVPPGSALVGPSCVMDDFRDPQRWKECAKQGKMPCYFDLIEENVYLTERKKNKSHRDIKRMQCECTPLSKDERAQGEIACGEDCLNRLLMIECSSRCPNGDYCSNRRFQRKQHADVEVILTEKKGWGLRAAKDLPS

SEQ ID NO: 13286 - protein, 496 aa, Homo sapiens
MAMEIDSRPGGLPGSSCNLGAAREHMQAVTRNYITHPRVTYRTVCSVNGPLVVLDRVKFAQYAEIVHFTLPDGTQRSGQVLEVAGTKAIVQVFEGTSGIDARKTTCEFTGDILRTPVSEDMLGRVFNGSGKPIDKGPVVMAEDFLDINGQPINPHSRIYPEEMIQTGISPIDVMNSIARGQKIPIFSAAGLPHNEIAAQICRQAGLVKKSKAVLDYHDDNFAIVFAAMGVNMETARFFKSDFEQNGTMGNVCLFLNLANDPTIERIITPRLALTTAEFLAYQCEKHVLVILTDMSSYAEALREVSAAREEVPGRRGFPGYMYTDLATIYERAGRVEDITHPIPDLTGFITEGQIYVDRQLHNRQIYPPINVLPSLSRLMKSAIGEGMTRKDHGDVSNQLYACYAIGKDVQAMKAVVGEEALTSEDLLYLEFLQKFEKNFINQGPYENRSVFESLDLGWKLLRIFPKEMLKRIPQAVIDEFYSREGALQDLAPDTAL

SEQ ID NO: 13287 - protein, 376 aa, Homo sapiens
MAEDNHKKKTVKMLEYLGKDVLHGVFNYLAKHDVLTLKEEEKKKYYDTKIEDKALILVDSLRKNRVAHQMFTQTLLNMDQKITSVKPLLQIEAGPPESAESTNILKLCPREEFLRLCKKNHDEIYPIKKREDRRRLALIICNTKFDHLPARNGAHYDIVGMKRLLQGLGYTVVDEKNLTARDMESVLRAFAARPEHKSSDSTFLVLMSHGILEGICGTAHKKKKPDVLLYDTIFQIFNNRNCLSLKDKPKVIIVQACRGEKHGELWVRDSPASLALISSQSSENLEADSVCKIHEEKDFIAFCSSTPHNVSWRDRTRGSIFITELITCFQKYSCCCHLMEIFRKVQKSFEVPQAKAQMPTIERATLTRDFYLFPGN

SEQ ID NO: 13288 - protein, 259 aa, Homo sapiens
MSKISEAVKRARAAFSSGRTRPLQFRIQQLEALQRLIQEQEQELNEWNAYYEEVVYVLEEIEYMIQKLPEWAADEPVEKTPQTQQDELYIHSEPLGVVLVIGTWNYPFNLTIQPMVGAIAAGNSVVLKPSELSENMASLLATIIPQYLDKDLYPVINGGVPETTELLKERFDHILYTGSTGVGKIIMTAAAKHLTPVTLELGGKSPCYVDKNCDLDVACRRIAWGKFMNSGQTCVAPDYILCDPSIQNQIVEKLKKSLK

SEQ ID NO: 13289 - protein, 207 aa, Homo sapiens
VISIKNYHPKIRIITQMLQYHNKAHLLNIPSWNWKEGDDAICLAELKLGFIAQSCLAQGLSTMLANLFSMRSFIKIEEDTWQKYYLEGVSNEMYTEYLSSAFVGLSFPTVCELCFVKLKLLMIAIEYKSANRESRILINPGNHLKIQEGTLGFFIASDAKEVKRAFFYCKACHDDITDPKRIKKCGCKRRQWPVLRILILTASTTRQ

SEQ ID NO: 13290 - protein, 756 aa, Homo sapiens
MLVTDLEYALDKKVEQDLWNHAFKNQITTLQGQAKNRANPNRSEVQANLSLFLEAASGFYTQLLQELCTVFNVDLPCRVKSSQLGIISNKQTHTSAIVKPQSSSCSYICQHCLVHLGDIARYRNQTSQAESYYRHAAQLVPSNGQPYNQLAILASSKGDHLTTIFYYCRSIAVKFPFPAASTNLQKALSKALESRDEVKTKWGVSDFIKAFIKFHGHVYLSKSLEKLSPLREKLEEQFKRLLFQKAFNSQQLVHVTVINLFQLHHLRDFSNETEQHTYSQDEQLCWTQLLALFMSFLGILCKCPLQNESQEESYNAYPLPAVKVSMDWLRLRPRVFQEAVVDERQYIWPWLISLLNSFHPHEEDLSSISATPLPEEFELQGFLALRPSFRNLDFSKGHQGITGDKEGQQRRIRQQRLISIGKWIADNQPRLIQCENEVGKLLFITEIPELILEDPSEAKENLILQETSVIESLAADGSPGLKSVLSTSRNLSNNCDTGEKPVVTFKENIKTREVNRDQGRSFPPKEVKSQTELRKTPVSEARKTPVTQTPTQASNSQFIPIHHPGAFPPLPSRPGFPPPTYVIPPPVAFSMGSGYTFPAGVSVPGTFLQPTAHSPAGNQVQAGKQSHIPYSQQRPSGPGPMNQGPQQSQPPSQQPLTSLPAQPTAQSTSQLQVQALTQQQQSPTKAVPALGKSPPHHSGFQQYQQADASKQLWNPPQVQGPLGKIMPVKQPYYLQTQDPIKLFEPSLQPPVMQQQP

SEQ ID NO: 13291 - protein, 4935 aa, Homo sapiens
MGNEASLEGEGLPEGLAAAAAAGGGASGAGSPSHTAIPAGMEADLSQLSEEERRQIAAVMSRAQGLPKGSVPPAAAESPSMHRKQELDSSHPPKQSGRPPDPGRPAQPGLSKSRTTDTFRSEQKLPGRSPSTISLKESKSRTDLKEEHKSSMMPGFLSEVNALSAVSSVVNKFNPFDLISDSEASQEETTKKQKVVQKEQGKPEGIIKPPLQQQPPKPIPKQQGPGRDPLQQDGTPKSISSQQPEKIKSQPPGTGKPIQGPTQTPQTDHAKLPLQRDASRPQTKQADIVRGESVKPSLPSPSKPPIQQPTPGKPPAQQPGHEKSQPGPAKPPAQPSGLTKPLAQQPGTVKPPVQPPGTTKPPAQPLGPAKPPAQQTGSEKPSSEQPGPKALAQPPGVGKTPAQQPGPAKPPTQQVGTPKPLAQQPGLQSPAKAPGPTKTPVQQPGPGKIPAQQAGPGKTSAQQTGPTKPPSQLPGPAKPPPQQPGPAKPPPQQPGSAKPPSQQPGSTKPPPQQPGPAKPSPQQPGSTKPPSQQPGSAKPSAQQPSPAKPSAQQSTKPVSQTGSGKPLQPPTVSPSAKQPPSQGLPKTICPLCNTTELLLHVPEKANFNTCTECQTTVCSLCGFNPNPHLTEVKEWLCLNCQMKRALGGDLAPVPSSPQPKLKTAPVTTTSAVSKSSPQPQQTSPKKDAAPKQDLSKAPEPKKPPPLVKQPTLHGSPSAKAKQPPEADSLSKPAPPKEPSVPSEQDKAPVADDKPKQPKMVKPTTDLVSSSSATTKPDIPSSKVQSQAEEKTTPPLKTDSAKPSQSFPPTGEKVSPFDSKAIPRPASDSKIISHPGPSSESKGQKQVDPVQKKEEPKKAQTKMSPKPDAKPMPKGSPTPPGPRPTAGQTVPTPQQSPKPQEQSRRFSLNLGSITDAPKSQPTTPQETVTGKLFGFGASIFSQASNLISTAGQPGPHSQSGPGAPMKQAPAPSQPPTSQGPPKSTGQAPPAPAKSIPVKKETKAPAAEKLEPKAEQAPTVKRTETEKKPPPIKDSKSLTAEPQKAVLPTKLEKSPKPESTCPLCKTELNIGSKDPPNFNTCTECKNQVCNLCGFNPTPHLTEIQEWLCLNCQTQRAISGQLGDIRKMPPAPSGPKASPMPVPTESSSQKTAVPPQVKLVKKQEQEVKTEAEKVILEKVKETLSMEKIPPMVTTDQKQEESKLEKDKASALQEKKPLPEEKKLIPEEEKIRSEEKKPLLEEKKPTPEDKKLLPEAKTSAPEEQKHDLLKSQVQIAEEKLEGRVAPKTVQEGKQPQTKMEGLPSGTPQSLPKEDDKTTKTIKEQPQPPCTAKPDQVEPGKEKTEKEDDKSDTSSSQQPKSPQGLSDTGYSSDGISSSLGEIPSLIPTDEKDILKGLKKDSFSQESSPSSPSDLAKLESTVLSILEAQASTLADEKSEKKTQPHEVSPEQPKDQEKTQSLSETLEITISEEEIKESQEERKDTFKKDSQQDIPSSKDHKEKSEFVDDITTRREPYDSVEESSESENSPVPQRKRRTSVGSSSSDEYKQEDSQGSGEEEDFIRKQIIEMSADEDASGSEDDEFIRNQLKEISSSTESQKKEETKGKGKITAGKHRRLTRKSSTSIDEDAGRRHSWHDEDDEAFDESPELKYRETKSQESEELVVTGGGGLRRFKTIELNSTIADKYSAESSQKKTSLYFDEEPELEMESLTDSPEDRSRGEGSSSLHASSFTPGTSPTSVSSLDEDSDSSPSHKKGESKQQRKARHRPHGPLLPTIEDSSEEEELREEEELLKEQEKQREIEQQQRKSSSKKSKKDKDELRAQRRRERPKTPPSNLSPIEDASPTEELRQAAEMEELHRSSCSEYSPSIESDPEGFEISPEKIIEVQKVYKLPTAVSLYSPTDEQSIMQKEGSQKALKSAEEMYEEMMHKTHKYKAFPAANERDEVFEKEPLYGGMLIEDYIYESLVEDTYNGSVDGSLLTRQEEENGFMQQKGREQKIRLSEQIYEDPMQKITDLQKEFYELESLHSVVPQEDIVSSSFIIPESHEIVDLGTMVTSTEEERKLLDADAAYEELMKRQQMQLTPGSSPTQAPIGEDMTESTMDFDRMPDASLTSSVLSGASLTDSTSSATLSIPDVKITQHFSTEEIEDEYVTDYTREIQEIIAHESLILTYSEPSESATSVPPSDTPSLTSSVSSVCTTDSSSPITTLDSITTVYTEPVDMITKFEDSEEISSSTYFPGSIIDYPEEISVSLDRTAPPDGRASADHIVISLSDMASSIIESVVPKPEGPVADTVSTDLLISEKDPVKKAKKETGNGIILEVLEAYRDKKELEAERTKSSLSETVFDHPPSSVIALPMKEQLSTTYFTSGETFGQEKPASQLPSGSPSVSSLPAKPRPFFRSSSLDISAQPPPPPPPPPPPPPPPPPPPPPPLPPPTSPKPTILPKKKLTVASPVTTATPLFDAVTTLETTAVLRSNGLPVTRICTTAPPPVPPKPSSIPSGLVFTHRPEPSKPPIAPKPVIPQLPTTTQKPTDIHPKPTGLSLTSSMTLNLVTSADYKLPSPTSPLSPHSNKSSPRFSKSLTETYVVITLPSEPGTPTDSSASQAITSWPLGSPSKDLVSVEPVFSVVPPVTAVEIPISSEQTFYISGALQTFSATPVTAPSSFQAAPTSVTQFLTTEVSKTEVSATRSTAPSVGLSSISITIPPEPLALDNIHLEKPQYKEDGKLQLVGDVIDLRTVPKVEVKTTDKCIDLSASTMDVKRQITANEVYGKQISAVQPSIINLSVTSSIVTPVSLATETVTFVTCTASASYTTGTESLVGAEHAMTTPLQLTTSKHAEPPYRIPSDQVFPIAREEAPINLSLGTPAHAVTLAITKPVTVPPVGVTNGWTDSTVSQGITDGEVVDLSTTKSHRTVVTMDESTSSVMTKIIEDEKPVDLTAGRRAVCCDVVYKLPFGRSCTAQQPATTLPEDRFGYRDDHYQYDRSGPYGYRGIGGMKPSMSDTNLAEAGHFFYKSKNAFDYSEGTDTAVDLTSGRVTTGEVMDYSSKTTGPYPETRQVISGAGISTPQYSTARMTPPPGPQYCVGSVLRSSNGVVYSSVATPTPSTFAITTQPGSIFSTTVRDLSGIHTADAVTSLPAMHHSQPMPRSYFITTGASETDIAVTGIDISASLQTITMESLTAETIDSVPTLTTASEVFPEVVGDESALLIVPEEDKQQQQLDLERELLELEKIKQQRFAEELEWERQEIQRFREQEKIMVQKKLEELQSMKQHLLFQQEEERQAQFMMRQETLAQQQLQLEQIQQLQQQLHQQLEEQKIRQIYQYNYDPSGTASPQTTTEQAILEGQYAALEGSQFWATEDATTTASAVVAIEIPQSQGWYTVQSDGVTQYIAPPGILSTVSEIPLTDVVVKEEKQPKKRSSGAKVRGQYDDMGENMTDDPRSFKKIVDSGVQTDDEDATDRSYVSRRRRTKKSVDTSVQTDDEDQDEWDMPTRSRRKARVGKYGDSMTEADKTKPLSKVSSIAVQTVAEISVQTEPVGTIRTPSIRARVDAKVEIIKHISAPEKTYKGGSLGCQTEADSDTQSPQYLSATSPPKDKKRPTPLEIGYSSHLRADSTVQLAPSPPKSPKVLYSPISPLSPGKALESAFVPYEKPLPDDISPQKVLHPDMAKVPPASPKTAKMMQRSMSDPKPLSPTADESSRAPFQYTEGYTTKGSQTMTSSGAQKKVKRTLPNPPPEEISTGTQSTFSTMGTVSRRRICRTNTMARAKILQDIDRELDLVERESAKLRKKQAELDEEEKEIDAKLRYLEMGINRRKEALLKEREKRERAYLQGVAEDRDYMSDSEVSSTRPTRIESQHGIERPRTAPQTEFSQFIPPQTQTESQLVPPTSPYTQYQYSSPALPTQAPTSYTQQSHFEQQTLYHQQVSPYQTQPTFQAVATMSFTPQVQPTPTPQPSYQLPSQMMVIQQKPRQTTLYLEPKITSNYEVIRNQPLMIAPVSTDNTFAVSHLGSKYNSLDLRIGLEERSSMASSPISSISADSFYADIDHHTPRNYVLIDDIGEITKGTAALSTAFSLHEKDLSKTDRLLRTTETRRSQEVTDFLAPLQSSSRLHSYVKAEEDPMEDPYELKLLKHQIKQEFRRGTESLDHLAGLSHYYHADTSYRHFPKSEKYSISRLTLEKQAAKQLPAAILYQKQSKHKKSLIDPKMSKFSPIQESRDLEPDYSSYMTSSTSSIGGISSRARLLQDDITFGLRKNITDQQKFMGSSLGTGLGTLGNTIRSALQDEADKPYSSGSRSRPSSRPSSVYGLDLSIKRDSSSSSLRLKAQEAEALDVSFSHASSSARTKPTSLPISQSRGRIPIVAQNSEEESPLSPVGQPMGMARAAAGPLPPISADTRDQFGSSHSLPEVQQHMREESRTRGYDRDIAFIMDDFQHAMSDSEAYHLRREETDWFDKPRESRLENGHGLDRKLPERLVHSRPLSQHQEQIIQMNGKTMHYIFPHARIKITRDSKDHTVSGNGLGIRIVGGKEIPGHSGEIGAYIAKILPGGSAEQTGKLMEGMQVLEWNGIPLTSKTYEEVQSIISQQSGEAEICVRLDLNMLSDSENSQHLELHEPPKAVDKAKSPGVDPKQLAAELQKVSLQQSPLVLSSVVEKGSHVHSGPTSAGSSSVPSPGQPGSPSVSKKKHGSSKPTDGTKVVSHPITGEIQLQINYDLGNLIIHILQARNLVPRDNNGYSDPFVKVYLLPGRGQVMVVQNASAEYKRRTKHVQKSLNPEWNQTVIYKSISMEQLKKKTLEVTVWDYDRFSSNDFLGEVLIDLSSTSHLDNTPRWYPLKEQTESIDHGKSHSSQSSQQSPKPSVIKSRSHGIFPDPSKDMQVPTIEKSHSSPGSSKSSSEGHLRSHGPSRSQSKTSVTQTHLEDAGAAIAAAEAAVQQLRIQPSKRRK

SEQ ID NO: 13292 - protein, 2764 aa, Homo sapiens
MVSEEEEEEDGDAEETQDSEDDEEDEMEEDDDDSDYPEEMEDDDDDASYCTESSFRSHSTYSSTPGRRKPRVHRPRSPILEEKDIPPLEFPKSSEDLMVPNEHIMNVIAIYEVLRNFGTVLRLSPFRFEDFCAALVSQEQCTLMAEMHVVLLKAVLREEDTSNTTFGPADLKDSVNSTLYFIDGMTWPEVLRVYCESDKEYHHVLPYQEAEDYPYGPVENKIKVLQFLVDQFLTTNIAREELMSEGVIQYDDHCRVCHKLGDLLCCETCSAVYHLECVKPPLEEVPEDEWQCEVCVAHKVPGVTDCVAEIQKNKPYIRHEPIGYDRSRRKYWFLNRRLIIEEDTENENEKKIWYYSTKVQLAELIDCLDKDYWEAELCKILEEMREEIHRHMDITEDLTNKARGSNKSFLAAANEEILESIRAKKGDIDNVKSPEETEKDKNETENDSKDAEKNREEFEDQSLEKDSDDKTPDDDPEQGKSEEPTEVGDKGNSVSANLGDNTTNATSEETSPSEGRSPVGCLSETPDSSNMAEKKVASELPQDVPEEPNKTCESSNTSATTTSIQPNLENSNSSSELNSSQSESAKAADDPENGERESHTPVSIQEEIVGDFKSEKSNGELSESPGAGKGASGSTRIITRLRNPDSKLSQLKSQQVAAAAHEANKLFKEGKEVLVVNSQGEISRLSTKKEVIMKGNINNYFKLGQEGKYRVYHNQYSTNSFALNKHQHREDHDKRRHLAHKFCLTPAGEFKWNGSVHGSKVLTISTLRLTITQLENNIPSSFLHPNWASHRANWIKAVQMCSKPREFALALAILECAVKPVVMLPIWRESLGHTRLHRMTSIEREEKEKVKKKEKKQEEEETMQQATWVKYTFPVKHQVWKQKGEEYRVTGYGGWSWISKTHVYRFVPKLPGNTNVNYRKSLEGTKNNMDENMDESDKRKCSRSPKKIKIEPDSEKDEVKGSDAAKGADQNEMDISKITEKKDQDVKELLDSDSDKPCKEEPMEVDDDMKTESHVNCQESSQVDVVNVSEGFHLRTSYKKKTKSSKLDGLLERRIKQFTLEEKQRLEKIKLEGGIKGIGKTSTNSSKNLSESPVITKAKEGCQSDSMRQEQSPNANNDQPEDLIQGCSESDSSVLRMSDPSHTTNKLYPKDRVLDDVSIRSPETKCPKQNSIENDIEEKVSDLASRGQEPSKSKTKGNDFFIDDSKLASADDIGTLICKNKKPLIQEESDTIVSSSKSALHSSVPKSTNDRDATPLSRAMDFEGKLGCDSESNSTLENSSDTVSIQDSSEEDMIVQNSNESISEQFRTREQDVEVLEPLKCELVSGESTGNCEDRLPVKGTEANGKKPSQQKKLEERPVNKCSDQIKLKNTTDKKNNENRESEKKGQRTSTFQINGKDNKPKIYLKGECLKEISESRVVSGNVEPKVNNINKIIPENDIKSLTVKESAIRPFINGDVIMEDFNERNSSETKSHLLSSSDAEGNYRDSLETLPSTKESDSTQTTTPSASCPESNSVNQVEDMEIETSEVKKVTSSPITSEEESNLSNDFIDENGLPINKNENVNGESKRKTVITEVTTMTSTVATESKTVIKVEKGDKQTVVSSTENCAKSTVTTTTTTVTKLSTPSTGGSVDIISVKEQSKTVVTTTVTDSLTTTGGTLVTSMTVSKEYSTRDKVKLMKFSRPKKTRSGTALPSYRKFVTKSSKKSIFVLPNDDLKKLARKGGIREVPYFNYNAKPALDIWPYPSPRPTFGITWRYRLQTVKSLAGVSLMLRLLWASLRWDDMAAKAPPGGGTTRTETSETEITTTEIIKRRDVGPYGIRSEYCIRKIICPIGVPETPKETPTPQRKGLRSSALRPKRPETPKQTGPVIIETWVAEEELELWEIRAFAERVEKEKAQAVEQQAKKRLEQQKPTVIATSTTSPTSSTTSTISPAQKVMVAPISGSVTTGTKMVLTTKVGSPATVTFQQNKNFHQTFATWVKQGQSNSGVVQVQQKVLGIIPSSTGTSQQTFTSFQPRTATVTIRPNTSGSGGTTSNSQVITGPQIRPGMTVIRTPLQQSTLGKAIIRTPVMVQPGAPQQVMTQIIRGQPVSTAVSAPNTVSSTPGQKSLTSATSTSNIQSSASQPPRPQQGQVKLTMAQLTQLTQGHGGNQGLTVVIQGQGQTTGQLQLIPQGVTVLPGPGQQLMQAAMPNGTVQRFLFTPLATTATTASTTTTTVSTTAAGTGEQRQSKLSPQMQVHQDKTLPPAQSSSVGPAEAQPQTAQPSAQPQPQTQPQSPAQPEVQTQPEVQTQTTVSSHVPSEAQPTHAQSSKPQVAAQSQPQSNVQGQSPVRVQSPSQTRIRPSTPSQLSPGQQSQVQTTTSQPIPIQPHTSLQIPSQGQPQSQPQVVMKHNAVIEHLKQKKSMTPAEREENQRMIVCNQVMKYILDKIDKEEKQAAKKRKREESVEQKRSKQNATKLSALLFKHKEQLRAEILKKRALLDKDLQIEVQEELKRDLKIKKEKDLMQLAQATAVAAPCPPVTPAPPAPPAPPPSPPPPPAVQHTGLLSTPTLPAASQKRKREEEKDSSSKSKKKKMISTTSKETKKDTKLYCICKTPYDESKFYIGCDRCQNWYHGRCVGILQSEAELIDEYVCPQCQSTEDAMTVLTPLTEKDYEGLKRVLRSLQAHKMAWPFLEPVDPNDAPDYYGVIKEPMDLATMEERVQRRYYEKLTEFVADMTKIFDNCRYYNPSDSPFYQCAEVLESFFVQKLKGFKASRSHNNKLQSTAS

SEQ ID NO: 13293 - protein, 258 aa, Homo sapiens
TSNQDNLAPITAKAKVVIELLLSVSGVAKPSQVYFGGTVVGEQAMKSEDEVGSLIEYEFRESHNSRKKREITEKQIDDNRKFSLFAERKYQTLNCSVNVNCVNIRCPLRGLDSKASLILRSRLWNSTFLEEYSKLNYLDILMRAFIDVTAAAENIRLPNAGTQVRVTVFPSKTVAQYSGVPWWIILVAILAGILMLALLVFILWKCGFFKRSRYDDSVPRYHAVRIRKEEREIKDEKYIDNLEKKQWITKWNENESYS

SEQ ID NO: 13294 - protein, 738 aa, Homo sapiens
MRGVWPPPVSALLSALGMSTYKRATLDEEDLVDSLSEGDAYPNGLQVNFHSPRSGQRCWAARTQVEKRLVVLVVLLAAGLVACLAALGIQYQTRSPSVCLSEACVSVTSSILSSMDPTVDPCHDFFSYACGGWIKANPVPDGHSRWGTFSNLWEHNQAIIKHLLENSTASVSEAERKAQVYYRACMNETRIEELRAKPLMELIERLGGWNITGPWAKDNFQDTLQVVTAHYRTSPFFSVYVSADSKNSNSNVIQVDQSGLGLPSRDYYLNKTENEKVLTGYLNYMVQLGKLLGGGDEEAIRPQMQQILDFETALANITIPQEKRRDEELIYHKVTAAELQTLAPAINWLPFLNTIFYPVEINESEPIVVYDKEYLEQISTLINTTDRCLLNNYMIWNLVRKTSSFLDQRFQDADEKFMEVMYGTKKTCLPRWKFCVSDTENNLGFALGPMFVKATFAEDSKSIATEIILEIKKAFEESLSTLKWMDEETRKSAKEKADAIYNMIGYPNFIMDPKELDKVFNDYTAVPDLYFENAMRFFNFSWRVTADQLRKAPNRDQWSMTPPMVNAYYSPTKNEIVFPAGILQAPFYTRSSPKALNFGGIGVVVGHELTHAFDDQGREYDKDGNLRPWWKNSSVEAFKRQTECMVEQYSNYSVNGEPVNGRHTLGENIADNGGLKAAYRVWCSVRTPESSHEGLITDPHSPSRFRVIGSLSNSKEFSEHFRCPPGSPMNPPHKCEVW

SEQ ID NO: 13295 - protein, 3460 aa, Homo sapiens [sequence omitted]

SEQ ID NO: 13296 - protein, 425 aa, Homo sapiens
MPTSSAVLLRVLSIPLLTVLILARDLSALGGCPWGPLPLRCHCLLPDPLFCAGEVQAFYEDLSGRQYVNEVFNFSVDKLYDLLFTNSPFQRDFMEQRRFSDIIFHPWKKEENGNQSRVILYTITLTNPLAPKTATVRETQTMYKASQESECYVIDAEVLTHDVPYHDYFYTINRYTLTRVARNKSRLRVSTELRYRKQPWGLVKTFIEKNFWSGLEDYFRHLESELAKTESTYLAEMHRQSPKEKASKTTTVRRRKRPHAHLRVPHLEEVMSPVTTPTDEDVGHRIKHVAGSTQTRHIPEDTPNGFHLQSVSKLLLVISCVLVLLVILNMMLFYKLWMLEYTTQTLTAWQGLRLQERLPQSQTEWAQLLESQQKYHDTELQKWREIIKSSVMLLDQMKDSLINLQNGIRSRDYTSESEEKRNRYH

SEQ ID NO: 13297 - protein, 395 aa, Homo sapiens
LTDRQTDTAPSPSYHLLPGRRRTVDAAASRGQGPEPAPGGGVEGVGARGVALKLFVQLLGCSRFGGAVVRAGEAEPSGAARSASSGREEPQPEEGEEEEEKEEERGPQWRLGARKPGSWTGEAAVCADSAPAARAPQALARASGRGGRVARRGAEESGPPHSPSRRGSASRAGPGRASETMNFLLSWVHWSLALLLYLHHAKWSQAAPMAEGGGQNHHEVVKFMDVYQRSYCHPIETLVDIFQEYPDEIEYIFKPSCVPLMRCGGCCNDEGLECVPTEESNITMQIMRIKPHQGQHIGEMSFLQHNKCECRPKKDRARQEKKSVRGKGKGQKRKRKKSRYKSWSVPCGPCSERRKHLFVQDPQTCKCSCKNTDSRCKARQLELNERTCRCDKPRR

SEQ ID NO: 13298 - protein, 709 aa, Homo sapiens
EIFHVDQSNYFLNFKKEVRNKIYSRLLSLHSPNSYYGSRSPQELFKASGLTQFPWILQDYTSEELDLNNPAVFRDLSKPIGVVNEKNAKAMREKYENFEDPMGTIDKFHYGTHYSNSAGVMHYLIRVEPFTTLHIQLQSGRFDCADRQFHSIPATWQALMDNPYDVKELIPEFFYFPEFLENQNQFNLGRLQISKELVNDVILPKWAKSAEDFIYKHRKALESEYVSAHLHEWIDLIFGYKQRGPAAVEALNVFYYCSYEGAVDLDALTDEKERKALEGMINNFGQTPCQLLKEPHPPRLSAEEAVQKPTKIDTSTLNLFQHLPELKSFFIEGISDGIPLLKATIPKNQYRSFMSQGSPELLITISMNYVIGTHGWLPYDRNISNYFTFIKDQTVTNPKTQRSINGSFAPGLEITSKLFVVSHDAKLLFSAGYWDNSIQVMSLTKGKIISHIIRHMDIVTCLATDYCGIHLISGSRDTTCMIWQITQQGGVPVGLASKPFQILYGHTNEVLSVGISTELDMAVSGSRDGTVIIHTIQKGQYMRTLRPPCESSLFLTIPNLAISWEGHIVVYSSTEEKTTLKDKNALHLFSINGKYLGSQILKEQVSDICIIGEHIVTGSIQGFLSIRDLHSLNLSINPLAMRLPIHCVCVTKEYSHILVGLEDGKLIVVGVGKPAEMRSGQLSRKFWGSSKRLSQISAGETEYNTQDSK

SEQ ID NO: 13299 - protein, 122 aa, Homo sapiens
MTPNSMTENGLTAWDKPKHCPDREHDWKLVGMSEACLHRKSHSERRSTLKNEQSSPHLIQTTWTSSIFHLDHDDVNDQSVSSAQTFQTEEKKCKGYIPSYLDKDELCVVCGDKATGYHYRCI

SEQ ID NO: 13300 - protein, 414 aa, Homo sapiens
MVFHLRTRYEQANCDCLNGGTCVSNKYFSNIHWCNCPKKFGGQHCEIDKSKTCYEGNGHFYRGKASTDTMGRPCLPWNSATVLQQTYHAHRSDALQLGLGKHNYCRNPDNRRRPWCYVQVGLKLLVQECMVHDCADGKKPSSPPEELKFQCGQKTLRPRFKIIGGEFTTIENQPWFAAIYRRHRGGSVTYVCGGSLISPCWVISATHCFIDYPKKEDYIVYLGRSRLNSNTQGEMKFEVENLILHKDYSADTLAHHNDIALLKIRSKEGRCAQPSRTIQTICLPSMYNDPQFGTSCEITGFGKENSTDYLYPEQLKMTVVKLISHRECQQPHYYGSEVTTKMLCAADPQWKTDSCQGDSGGPLVCSLQGRMTLTGIVSWGRGCALKDKPGVYTRVSHFLPWIRSHTKEENGLAL

SEQ ID NO: 13301 - protein, 380 aa, Homo sapiens
MEGAALLRVSVLCIWVQQNVPSGTDTGDPQSKPLGDWAAGTMDPESSIFIEDAIKYFKEKVSTQNLLLLLTDNEAWNGFVAAAELPRNEADELRKALDNLARQMIMKDKNWHDKGQQYRNWFLKEFPRLKSELEDNIRRLRALADGVQKVHKGTTIANVVSGSLSISSGILTLVGMGLAPFTEGGSLVLLEPGMELGITAALTGITSSTMDYGKKWWTQAQAHDLVIKSLDKLKEVREFLGENISNFLSLAGNTYQLTRGIGKDIRALRRARANLQSVPHASASRPRVTEPISAESGEQVERVNEPSILEMSRGVKLTDVAPVSFFLVLDVVYLVYESKHLHEGAKSETAEELKKVAQELEEKLNILNNNYKILQADQEL

SEQ ID NO: 13302 - protein, 174 aa, Homo sapiens
MDADEGQDMSQVSGKESPPVSDTPDEGDEPMPIPEDLSTTSGGQQSSKSDRVVVTYGADDFRDFHAIIPKSFSRKYMPCFWKTKACLHLLSCKYRTCMFLHQPPRYIKYSLFYSLDTYHIIFGYLYHKVQNEGLGSCAVSWEHGSGVTVRVGVTVALMGLLLRRCCWTALRLLL

SEQ ID NO: 13303 - protein, 214 aa, Homo sapiens
MGELMAFLLPLIIVLMVKHSDSRTHSLRYFRLGVSDPIHGVPEFISVGYVDSHPITTYDSVTRQKEPRAPWMAENLAPDHWERYTQLLRGWQQMFKVELKRLQRHYNHSGSHTYQRMIGCELLEDGSTTGFLQYAYDGQDFLIFNKDTLSWLAVDNVAHTIKQAWEANQHELLYQKNWLEEECIAWLKRFLEYGKDTLQRTEQNGAIYLPTPDR

SEQ ID NO: 13304 - protein, 403 aa, Homo sapiens
MDLRDRFTEMREMDLQVQNAMDQLEQRVSEFFMNAKKNKPEWREEQMASIKKDYYKALEDADEKVQLANQIYDLVDRHLRKLDQELAKFKMELEADNAGITEILERRSLELDTPSQPVNNHHAHSHTPVEKRKYNPTSHHTTTDHIPEKKFKSEALLSTLTSDASKENTLGCRNNNSTASSNNAYNVNSSQPLGSYNIGSLSSGTGAGAITMAAAQAVQATAQMKEGRRTSSLKASYEAFKNNDFQLGKEFSMARETVGYSSSSALMTTLTQNASSSAADSRSGRKSKNNNKSSSQQSSSSSSSSSLSSCSSSSTVVQEISQQTTVVPESDSNSQVDWTYDPNEPRYCICNQVSYGEMVGCDNQDCPIEWFHYGCVGLTEAPKGKWYCPQCTAAMKRRGSRHK

SEQ ID NO: 13305 - protein, 454 aa, Homo sapiens
MATNKERLFAAGALGPGSGYPGAGFPFAFPGALRGSPPFEMLSPSFRGLGQPDLPKEMASLSVETQSTSSEEMVPSSPSPPPPPRVYKPCFVCNDKSSGYHYGVSSCEGCKGFFRRSIQKNMVYTCHRDKNCIINKVTRNRCQYCRLQKCFEVGMSKEAVRNDRNKKKKEVKEEGSPDSYELSPQLEELITKVSKAHQETFPSLCQLGKYTTNSSADHRVQLDLGLWDKFSELATKCIIKIVEFAKRLPGFTGLSIADQITLLKAACLDILMLRICTRYTPEQDTMTFSDGLTLNRTQMHNAGFGPLTDLVFAFAGQLLPLEMDDTETGLLSAICLICGDRMDLEEPEKVDKLQEPLLEALRLYARRRRPSQPYMFPRMLMKITDLRGISTKGAERAITLKMEIPGPMPPLIREMLENPEMFEDDSSQPGPHPNASSEDEVPGGQGKGGLKSPA

SEQ ID NO: 13306 - protein, 887 aa, Homo sapiens
MRKSSSPSLSNCNSVLANKIFGIPLDELQQGGHPDNEVPFIVRHVVDYIEEHGGLEQQGLFQVNGNAETVEWLRQRYDSGEEVDLVKEADVPSAISLLRFFLQELPEPVIPGSLHIHLMQLSQDYNNEDEFGRKLRFLLQQLPPVNYSLLKFLCRFLANVASHHEEIWSANSLAAVFGPDVFHIYTDVEDMKEQEIVSRIMAGLLENYYEFFENEEEDFSSNDLSSITEQVNELSEEEEEDEKLEHIEELPEEGAEKSNDMPEVVQLRMTENILESNSVTATSTHISPISILPASTDILERTIRAAVEQHLFDLQSSIDHDLKNLQQQSVVCNNEAESIHCDGEGSNNQIDIADDIINASESNRDCSKPVASTNLDNEAMQQDCVFENEENTQSVGILLEPCSDRGDSEDGCLEREEYLLFDSDKLSHLILDSSSKICDLNANTESEVPGGQSVGVQGEAACVSIPHLDLKNVSDGDKWEEPFPAFKSWQEDSESGEAQLSPQAGRMNHHPLEEDCPPVLSHRSLDFGQSQRFLHDPEKLDSSSKALSFTRIRRSSFSSKDEKREDRTPYQLVKKLQKKIRQFEEQFERERNSKPSYSDIAANPKVLKWMTELTKLRKQIKDAKHKNSDGEFVPQTRPRSNTLPKSFGSSLDHEDEENEDEPKVIQKEKKPSKEATLELILKRLKEKRIERCLPEDIKVTKEERHIVKPLYDRYRLVKQMLTRASITPVLGSPSTKRRGQMLQPIIEGETAHFFEEIKEEEEDGVNLSSELGDMLKTAVQVQSSLENSESDVEENQEKLALDLRLSSSRAASMPELLEQLWKARAEKKKLRKTLREFEEAFYQQNGRNAQKEDRVPVLEEYREYKKIKAKLRLLEVLISKQDSSKSI

SEQ ID NO: 13307 - protein, 997 aa, Homo sapiens
MVCSAAPLLLLATTLPLLGSPVAQASQPGQSQAGGESGSGQLLDQENGAGESALVSVYVHLDFPDKTWPPELSRTLTLPAASASSSPRPLLTGLRLTTECNVNHKGNFYCACLSGYQWNTSICLHYPPCQSLHNHQPCGCLVFSHPEPGYCQLLPPGSPVTCLPAVPGILNLNSQLQMPGDTLSLTLHLSQEATNLSWFLRHPGSPSPILLQPGTQVSVTSSHGQAALSVSNMSHHWAGEYMSCFEAQGFKWNLYEVVRVPLKATDVARLPYQLSISCATSPGFQLSCCIPSTNLAYTAAWSPGEGSKASSFNESGSQCFVLAVQRCPMADTTYACDLQSLGLAPLRVPISITIIQDGDITCPEDASVLTWNVTKAGHVAQAPCPESKRGIVRRLCGADGVWGPVHSSCTDARLLALFTRTKLLQAGQGSPAEEVPQILAQLPGQAAEASSPSDLLTLLSTMKYVAKVVAEARIQLDRRALKNLLIATDKVLDMDTRSLWTLAQARKPWAGSTLLLAVETLACSLCPQDHPFAFSLPNVLLQSQLFGPTFPADYSISFPTRPPLQAQIPRHSLAPLVRNGTEISITSLVLRKLDHLLPSNYGQGLGDSLYATPGLVLVISIMAGDRAFSQGEVIMDFGNTDGSPHCVFWDHSLFQGRGGWSKEGCQAQVASASPTAQCLCQHLTAFSVLMSPHTVPEEPALALLTQVGLGASILALLVCLGVYWLVWRVVVRNKISYFRHAALLNMVFCLLAADTCFLGAPFLSPGPRSPLCLAAAFLCHFLYLATFFWMLAQALVLAHQLLFVFHQLAKHRVLPLMVLLGYLCPLGLAGVTLGLYLPQGQYLREGECWLDGKGGALYTFVGPVLAIIGVNGLVLAMAMLKLLRPSLSEGPPAEKRQALLGVIKALLILTPIFGLTWGLGLATLLEEVSTVPHYIFTILNTLQGVFILLFGCLMDRKIQEALRKRFCRAQAPSSTISLATNEGCILEHSKGGSDTAR

SEQ ID NO: 13308 - protein, 762 aa, Homo sapiens
MGTLGKAREAPRKPSHGCRAASKARLEAKPANSPFPSHPSLAHITQFRMMVSLGHLAKGASLDDLIDSCIQSFDADGNLCRSNQLLQVMLTMHRIVISSAELLQKVITLYKDALAKNSPGLCLKICYFVRYWITEFWVMFKMDASLTDTMEEFQELVKAKGEELHCRLIDTTQINARDWSRKLTQRIKSNTSKKRKVSLLFDHLEPEELSEHLTYLEFKSFRRISFSDYQNYLVNSCVKENPTMERSIALCNGISQWVQLMVLSRPTPQLRAEVFIKFIQVAQKLHQLQNFNTLMAVIGGLCHSSISRLKETSSHVPHEINKVLGEMTELLSSSRNYDNYRRAYGECTDFKIPILGVHLKDLISLYEAMPDYLEDGKVNVHKLLALYNHISELVQLQEVAPPLEANKDLVHLLTLSLDLYYTEDEIYELSYAREPRNHRAPSVFKNYDHDQDGYISQEEFEKIAASFPFSFCVMDKDREGLISRDEITAYFMRASSIYSKLGLGFPHNFQETTYLKPTFCDNCAGFLWGVIKQGYRCKDCGMNCHKQCKDLVVFECKKRAKNPVAPTENNTSVGPVSNLCSLGAKDLLHAPEEGPFTFPNGEAVEHGEESKDRTIMLMGVSSQKISLRLKRAVAHKATQTESQPWIGSEGPSGPFVLSSPRKTAQDTLYVLPSPTSPCPSPVLVRKRAFVKWENKDSLIKSKEELRHLRLPTYQELEQEINTLKADNDALKIQLKYAQKKIESLQLEKSNHVLAQMEQGDCS

SEQ ID NO: 13309 - protein, 562 aa, Homo sapiens
MMMPVVDPVVREKQLQQELLLIQQQQQIQKQLLIAEFQKQHENLTRQHQAQLQEHIKLQQELLAIKQQQELLEKEQKLEQQRQEQEVERHRREQQLPPLRGKDRGRERAVASTEVKQKLQEFLLSKSATKDTPTNGKNHSVSRHPKLWYTAAHHTSLDQSSPPLSGTSPSYKYTLPGAQDAKDDFPLRKTASEPNLKVRSRLKQKVAERRSSPLLRRKDGNVVTSFKKRMFEVTESSVSSSSPGSGPSSPNNGPTGSVTENETSVLPPTPHAEQMVSQQRILIHEDSMNLLSLYTSPSLPNITLGLPAVPSQLNASNSLKEKQKCETQTLRQGVPLPGQYGGSIPASSSHPHVTLEGKPPNSSHQALLQHLLLKEQMRQQKLLVAGGVPLHPQSPLATKERISPGIRGTHKLPRHRPLNRTQSAPLPQSTLAQLVIQQQHQQFLEKQKQYQQQIHMNKLLSKSIEQLKQPGSHLEEAEEELQGDQAMQEDRAPSSGNSTRSDSSACVDDTLGQVGAVKVKEEPVDSDEDAQIQEMESGEQAAFMQQVIGKDLAPGFVIKVII

SEQ ID NO: 13310 - protein, 333 aa, Homo sapiens
MTENSDKVPIALVGPDDVEFCSPPAYATLTVKPSSPARLLKVGAVVLISGAVLLLFGAIGAFYFWKGSDSHIYNVHYTMSINGKLQDGSMEIDAGNNLETFKMGSGAEEAIAVNDFQNGITGIRFAGGEKCYIKAQVKARIPEVGAVTKQSISSKLEGKIMPVKYEENSLIWVAVDQPVKDNSFLSSKVLELCGDLPIFWLKPTYPKEIQRERREVVRKIVPTTTKRPHSGPRSNPGAGRLNNETRPSVQEDSQAFNPDNPYHQEGESMTFDPRLDHEGICCIECRRSYTHCQKICEPLGGYYPWPYNYQGCRSACRVIMPCSWWVARILGMV

SEQ ID NO: 13311 - protein, 615 aa, Homo sapiens
MERRSESPCLRDSPDRRSGSPDVKGPPPVKVARLEQNGSPMGARGRPNGAVAKAVGGLMIPVFCVVEQLDGSLEYDNREEHAEFVLVRKDVLFSQLVETALLALGYSHSSAAQAQVERVERENLSDYCVLGQRPMHLPNMNQLASLGKTNEQSPHSQIHHSTPIRNQVPALQPIMSPGLLSPQLSPQLVRQQIAMAHLINQQIAVSRLLAHQHPQAINQQFLNHPPIPRAVKPEPTNSSVEVSPDIYQQVRDELKRASVSQAVFARVAFNRTQGLLSEILRKEEDPRTASQSLLVNLRAMQNFLNLPEVERDRIYQDERERSMNPNVSMVSSASSSPSSSRTPQAKTSTPTTDLPIKVDGANINITAAIYDEIQQEMKRAKVSQALFAKVAANKSQGWLCELLRWKENPSPENRTLWENLCTIRRFLNLPQHERDVIYEEESRHHHSERMQHVVQLPPEPVQVLHRQQSQPAKESSPPREEAPPPPPPTEDSCAKKPRSRTKISLEALGILQSFIHDVGLYPDQEAIHTLSAQLDLPKHTIIKFFQNQRYHVKHHGKLKEHLGSAVDVAEYKDEELLTESEENDSEEGSEEMYKVEAEEENADKSKAAPAEIDQR

SEQ ID NO: 13312 - protein, 1647 aa, Homo sapiens
MDDDSLDELVARSPGPDGHPQVGPADPAGDFESSVGSSGDSGDDSDSEHGDGTDGEDEGASEEEDLEDRSGSEDSEDDGETLLEVAGTQGKLEAAGSFNSDDDAESCPICLNAFRDQAVGTPENCAHYFCLDCIVEWSKNANSCPVDRTLFKCICIRAQFGGKILRKIPVENTKASEEEEDPTFCEVCGRSDREDRLLLCDGCDAGYHMECLDPPLQEVPVDEWFCPECAAPGVVLAADAGPVSEEEVSLLLADVVPTTSRLRPRAGRTRAIARTRQSERVRATVNRNRISTARRVQHTPGRLGSSLLDEAIEAVATGLSTAVYQRPLTPRTPARRKRKTRRRKKVPGRKKTPSGPSAKSKSSATRSKKRQHRVKKRRGKKVKSEATTRSRIARTLGLRRPVHSSCIPSVLKPVEPSLGLLRADIGAASLSLFGDPYELDPFDSEELSANPLSPLSAKRRALSRSALQSHQPVARPVSVGLSRRRLPAAVPEPDLEEEPVPDLLGSILSGQSLLMLGSSDVIIHRDGSLSAKRAAPVSFQRNSGSLSRGEEGFKGCLQPRALPSGSPAQGPSGNRPQSTGLSCQGRSRTPARTAGAPVRLDLPAAPGAVQARNLSNGSVPGFRQSHSPWFNGTNKHTLPLASAASKISSRDSKPPCRSVVPGPPLKPAPRRTDISELPRIPKIRRDDGGGRRDAAPAHGQSIEIPSACISRLTGREGTGQPGRGTRAESEASSRVPREPGVHTGSSRPPAPSSHGSLAPLGPSRGKGVGSTFESFRINIPGNMAHSSQLSSPGFCNTFRPVDDKEQRKENPSPLFSIKKTKQLRSEVYDPSDPTGSDSSAPGSSPERSGPGLLPSEITRTISINSPKAQTVQAVRCVTSYTVESIFGTEPEPPLGPSSAMSKLRGAVAAEGASDTEREEPTESQGLAARLRRPSPPEPWDEEDGASCSTFFGSEERTVTCVTVVEPEAPPSPDVLQAATHRVVELRPPSRSRSTSSSRSRKKAKRKRVSREHGRTRSGTRSESRDRSSRSASPSVGEERPRRQRSKAKSRRSSSDRSSSRERAKRKKAKDKSREHRRGPWGHSRRTSRSRSGSPGSSSYEHYESRKKKKRRSASRPRGRECSPTSSLERLCRHKHQRERSHERPDRKESVAWPRDRRKRRSRSPSSEHRAREHRRPRSREKWPQTRSHSPERKGAVREASPAPLAQGEPGREDLPTRLPALGEAHVSPEVATADKAPLQAPPVLEVAAECEPDDLDLDYGDSVEAGHVFDDFSSDAVFIQLDDMSSPPSPESTDSSPERDFPLKPALPPASLAVAAIQREVSLMHDEDPSQPPPLPEGTQEPHLLRPDAAEKAEAPSSPDVAPAGKEDSPSASGRVQEAARPEEVVSQTPLLRSRALVKRVTWNLQESESSAPAEDRAPRAPLHRPQKPREGAWDMEDVAPTGVRQVFSELPFPSHVLPEPGFPDTDPSQVYSPGLPPAPAQPSSIPPCALVSQPTVQFILQGSLPLVGCGAAQTLAPVPAALTPASEPASQATAASNSEEKTPAPRLAAEKTKKEEYMKKLHMQERAVEEVKLAIKPFYQKREVTKEEYKDILRKAVQKICHSKSGEINPVKVANLVKAYVDKYRHMRRHKKPEAGEEPPTQGAEG

SEQ ID NO: 13313 - protein, 118 aa, Homo sapiens
MWVTKLLPALLLQHVLLHLLLLPIAIPYAEGQRKRRNTIHEFKKSAKTTLIKIDPALKIKTKKVNTADQCANRCTRNKGLPFTCKAFVFDKARKQCLWFPFNSMSSGVKKEFGHEFDL

SEQ ID NO: 13314 - protein, 705 aa, Homo sapiens
MQLGEQLLVSSVNLPGAHFYPLESARGGSGGSAGHLPSAAPSPQKLDLDKASKKFSGSLSCEAVSGEPAAASAGAPAAMLSDTDAGDAFASAAAVAKPGPPDGRKGSPCGEEELPSAAAAAAAAAAAAAATARYSMDSLSSERYYLQSPGPQGSELAAPCSLFPYQAAAGAPHGPVYPAPNGARYPYGSMLPPGGFPAAVCPPGRAQFGPGAGAGSGAGGSSGGGGGPGTYQYSQGAPLYGPYPGAAAAGSCGGLGGLGVPGSGFRAHVYLCNRPLWLKFHRHQTEMIITKQGRRMFPFLSFNINGLNPTAHYNVFVEVVLADPNHWRFQGGKWVTCGKADNNMQGNKMYVHPESPNTGSHWMRQEISFGKLKLTNNKGANNNNTQMIVLQSLHKYQPRLHIVEVTEDGVEDLNEPSKTQTFTFSETQFIAVTAYQNTDITQLKIDHNPFAKGFRDNYDSMYTASENDRLTPSPTDSPRSHQIVPGGRYGVQSFFPEPFVNTLPQARYYNGERTVPQTNGLLSPQQSEEVANPPQRWLVTPVQQPGTNKLDISSYESEYTSSTLLPYGIKSLPLQTSHALGYYPDPTFPAMAGWGGRGSYQRKMAAGLPWTSRTSPTVFSEDQLSKEKVKEEIGSSWIETPPSIKSLDSNDSGVYTSACKRRRLSPSNSSNENSPSIKCEDINAEEYSKDTSKGMGGYYAFYTTP

SEQ ID NO: 13315 - protein, 280 aa, Homo sapiens
YAIIAEYGSRLYKYQARLRMPKEQLELLKKESQNLENNFRQILFLIEQIDVLKALLRDMKDGMDNNHNWNTHGDPVEDPDHTEVLDEEVSNLVNYVLKKLREDQVEMADYALKSAGASIIEAGTSESYKNNKAKLYWHGIGFLNHEMPPDIILQPDVYPGKCWAFPGSQGHTLIKLATKIIPTAVTMEHISEKVSPSGNISSAPKEFSVYGITKKCEGEEIFLGQFIYNKTGTTVQTFELQHAVSEYLLCVKLNIFSNWGHPKYTCLYRFRVHGTPGKHI

SEQ ID NO: 13316 - protein, 558 aa, Homo sapiens
MKWEDTNIEDQHRNPRRSLRCHIIERFSESRQPDSTVNEKPPGVDPCKSSVCGEIMGCSFLNCYITFDAGHKPDECQEYGEKPHTHKQCGTAFNYHHSFQTQERPHTGKKRYDCKECGKTFSSSGNLRRHIIVQRGGGPYICKLCGKAFFWPSLFRMHERTHTGEKPYECKQCCKAFPIYSSYLRHERTHTGEKPYECKHCSKAFPDYSSYVRHERTHTGEKPYKCKRCGRAFSVSSSLRIHERTHTGEKPYECKQCGKAFHHLGSFQRHMIRHTGDGPHKCKICGKGFDCPSSLQSHERTHTGEKPYECKQCGKALSHHSSFRSHMIMHTGDGPHKCKVCGKAFIYPSVFQGHERTHTGEKPYECKECGKAFRISSSLRRHETTHTGEKPYKCKCGKAFIDFYSFQNHETTHTGEKPYECKECGKAFSCFTYLSQHRRTHMAEKPYECKTCKKAFSHFGNLKVHERIHTGEKPYECKECRKAFSWLTCLLRHERIHTGKKSYECQQCGKAFTRSRFLRGHEKTHTGEKMHECKECGKALSSLSSLHRHKRTHWRDTL

SEQ ID NO: 13317 - protein, 1061 aa, Homo sapiens
MRRDERDAKAMRSLQPPDGAGSPPESLRNGYVKSCVSPLRQDPPRGFFFHLCRFCNVELRPPPASPQQPRRCSPFCRARLSLGALAAFVLALLLGAEPESWAAGAAWLRTLLSVCSHSLSPLFSIACAFFFLTCFLTRTKRGPGPGRSCGSWWLLALPACCYLGDFLVWQWWSWPWGDGDAGSAAPHTPPEAAAGRLLLVLSCVGLLLTLAHPLRLRHCVLVLLLASFVWWVSFTSLGSLPSALRPLLSGLVGGAGCLLALGLDHFFQIREAPLHPRLSSAAEEKVPVIRPRRRSSCVSLGETAASYYGSCKIFRRPSLPCISREQMILWDWDLKQWYKPHYQNSGGGNGVDLSVLNEARNMVSDLLTDPSLPPQGLNRNSLPTPQLRRSSGTSGLLPVEQSSRWDRNNGKRPHQEFGISSQGCYLNGPFNSNLLTIPKQRSSSVSLTHHVGLRRAGVLSSLSPVNSSNHGPVSTGSLTNRSPIEFPDTADFLNKPSVILQRSLGNAPNTPDFYQQLRNSDSNLCNSCGHQMLKYVSTSESDGTDCCSGKSGEEENIFSKESFKLMETQQEEETEKKDSRKLFQEGDKWLTEEAQSEQQTNIEQEVSLDLILVEEYDSLIEKMSNWNFPIFELVEKMGEKSGRILSQVMYTLFQDTGLLEIFKIPTQQFMNYFRALENGYRDIPYHNRIHATDVLHAVWYLTTRPVPGLQQIHNGCGTGNETDSDGRINHGRIAYISSKSCSNPDESYGCLSSNIPALELMALYVAAAMHDYDHPGRTNAFLVATNAPQAVLYNDRSVLENHHAASAWNLYLSRPEYNFLLHLDHVEFKRFRFLVIEAILATDLKKHFDFLAEFNAKANDVNSNGIEWSNENDRLLVCQVCIKLADINGPAKVRDLHLKWTEGIVNEFYEQGDEEANLGLPISPFMDRSSPQLAKLQESFITHIVGPLCNSYDAAGLLPGQWLEAEEDNDTESGDDEDGEELDTEDEEMENNLNPKPPRRKSRRRIFCQLMHHLTENHKIWKEIVEEEEKCKADGNKLQVENSSLPQADEIQVIEEADEEE

SEQ ID NO: 13318 - protein, 142 aa, Homo sapiens
MQQLRVRGSYRSASQFAGWRRVFYQARQGGISGNKLKLMLQKREAPVPTKTKVAVDENKAKEFLGSLKRQKRQLWDRTRPEVQQWYQQFLYMGFDEAKFEDDITYWLNRDRNGHEYYGDYYQRHYDEDSAIGPRSPYGFRHG

SEQ ID NO: 13319 - protein, 914 aa, Homo sapiens
MLSGRDLGAPAGSMGAASCEDEELEFKLVFGEEKEAPPLGAGGLGEELDSEDAPPCCRLALGEPPPYGAAPIGIPRPPPPRPGMHSPPPRPAPSPGTWESQPARSVRLGGPGGGAGGAGGGRVLECPSIRITSISPTPEPPAALEDNPDAWGDGSPRDYPPPEGFGGYREAGGQGGGAFFSPSPGSSSLSSWSFFSDASDEAALYAACDEVESELNEAASRFGLGSPLPSPRASPRPWTPEDPWSLYGPSPGGRGPEDSWLLLSAPGPTPASPRPASPCGKRRYSSSGTPSSASPALSRRGSLGEEGSEPPPPPPLPLARDPGSPGPFDYVGAPPAESIPQKTRRTSSEQAVALPRSEEPASCNGKLPLGAEESVAPPGGSRKEVAGMDYLAVPSPLAWSKARIGGHSPIFRTSALPPLDWPLPSQYEQLELRIEVQPRAHHRAHYETEGSRGAVKAAPGGHPVVKLLGYSEKPLTLQMFIGTADERNLRPHAFYQVHRITGKMVATASYEAVVSGTKVLEMTLLPENNMAANIDCAGILKLRNSDIELRKGETDIGRKNTRVRLVFRVHVPQGGGKVVSVQAASVPIECSQRSAQELPQVEAYSPSACSVRGGEELVLTGSNFLPDSKVVFIERGPDGKLQWEEEATVNRLQSNEVTLTLTVPEYSNKRVSRPVQVYFYVSNGRRKRSPTQSFRFLPVICKEEPLPDSSLRGFPSASATPFGTDMDFSPPRPPYPSYPHEDPACETPYLSEGFGYGMPPLYPQTGPPPSYRPGLRMFPETRGTTGCAQPPAVSFLPRPFPSDPYGGRGSSFSLGLPFSPPAPFRPPPLPASPPLEGPFPSQSDVHPLPAEGYNKVGPGYGPGEGAPEQEKSRGGYSSGFRDSVPIQGITLEEGGCGTGGCECECVQEIALHVC

SEQ ID NO: 13320 - protein, 719 aa, Homo sapiens
MTANRLAESLLALSQQEELADLPKDYLLSESEDEGDNDGERKHQKLLEAISSLDGKNRRKLAERSEASLKVSEFNVSSEGSGEKLVLADLLEPVKTSSSLATVKKQLSRVKSKKTVELPLNKEEIERARTPLEQEIFNLLHKNKQPVTDPLLTPVEKASLRAMSLEEAKMRRAELQRARALQSYYEAKARREKKIKSKKYHKVVKKGKAKKALKEFEQLRKVNPAAALEELEKIEKARMMERMSLKHQNSGKWAKSKAIMAKYDLEARQAMQEQLSKNKELTQKLQVASESEEEEGGTEDVEELLVPDVVNEVQMNADGPNPWMLRSCTSDTKEAATQEDPEQLPELEAHGVSESEGEERPVAEEEILLREFEERRSLRKRSELSQDAEPAGSQETKDSGSQEVLSELRVLSQKLKENHQSRKQKASSEGTIPQVQREEPAPEEEEPLLLQRPERVQTLEELEELGKEECFQNKELPRPVLEGQQSERTPNNRPDAPKEKKKKEQMIDLQNLLTTQSPSVKSLAVPTIEELEDEEERNHRQMIKEAFAGDDVIRDFLKEKREAVEASKPKDVDLTLPGWGEWGGVGLKPSAKKRRRFLIKAPEGPPRKDKNLPNVIINEKRNIHAAAHQVRVLPYPFTHHWQFERTIQTPIGSTWNTQRAFQKLTTPKVVTKPGHIINPIKAEDVGYRSSSRSDLSVIQRNPKRITTRHKKQLKKCSVD

SEQ ID NO: 13321 - protein, 570 aa, Homo sapiens
MEDSQDLNEQSVKKTCTESDVSQSQNSRSMEMQDLASPHTLVGGGDTPGSSKLEKSNLSSTSVTTNGTGVITSSGYSPRSAHQYSPQLYPSKPYPHILSTPAAQTMSAYAGQTQYSGMQQPAVYTAYSQTGQPYSLPTYDLGVMLPAIKTESGLSQTQSPLQSGCLSYSPGFSTPQPGQTPYSYQMPGSSFAPSSTIYANNSVSNSTNFSGSQQDYPSYTAFGQNQYAQYYSASTYGAYMTSNNTADGTPSSTSTYQLQESLPGLTNQPGTDLHPGEFDTMQSPSTPIKDLDERTCRSSGSKSRGRGRKNNPSPPPDSDLERVFVWDLDETIIVFHSLLTGSYAQKYGKDPPMAVTLGLRMEEMIFNLADTHLFFNDLEECDQVHIDDVSSDDNGQDLSTYSFATDGFHAAASSANLCLPTGVRGGVDWMRKLAFRYRRVKELYNTYKNNVGGLLGPAKRDAWLQLRAEIEGLTDSWLTNALKSLSIISTRSNCINVLVTTTQLIPALAKVLLYSLGGAFPIENIYSATKIGKESCFERIVSRFGTNITYVVIGDGRDEEHAANQKRLPA

SEQ ID NO: 13322 - protein, 219 aa, Homo sapiens
MAAEDREMMEARGAGESCPTFPKMVPGDSKSEGKPRAYLEAESQKPDSSYDYLEEMEACEDGGCQGPLKSLSPKSCRATKGQAGDGPKPAELPPTPGTERNPEMELEKVRMEFELTRLKYLHEKNQRQRQHEVVMEQLQRERQHEVVMEQLQQEAAPRLFSGGLQNFLLPQNQFAMFLYCFIFIHIIYVTKEMVFFLFAKHYLFCIAAILLCLIKTFWS

SEQ ID NO: 13323 - protein, 801 aa, Homo sapiens
MNLQPIFWIGLISSVCCVFAQTDENRCLKANAKSCGECIQAGPNCGWCTNSTFLQEGMPTSARCDDLEALKKKGCPPDDIENPRGSKDIKKNKNVTNRSKGTAEKLKPEDITQIQPQQLVLRLRSGEPQTFTLKFKRAEDYPIDLYYLMDLSYSMKDDLENVKSLGTDLMNEMRRITSDFRIGFGSFVEKTVMPYISTTPAKLRNPCTSEQNCTSPFSYKNVLSLTNKGEVFNELVGKQRISGNLDSPEGGFDAIMQVAVCGSLIGWRNVTRLLVFSTDAGFHFAGDGKLGGIVLPNDGQCHLENNMYTMSHYYDYPSIAHLVQKLSENNIQTIFAVTEEFQPVYKELKNLIPKSAVGTLSANSSNVIQLIIDAYNSLSSEVILENGKLSEGVTISYKSYCKNGVNGTGENGRKCSNISIGDEVQFEISITSNKCPKKDSDSFKIRPLGFTEEVEVILQYICECECQSEGIPESPKCHEGNGTFECGACRCNEGRVGRHCECSTDEVNSEDMDAYCRKENSSEICSNNGECVCGQCVCRKRDNTNEIYSGKFCECDNFNCDRSNGLICGGNGVCKCRVCECNPNYTGSACDCSLDTSTCEASNGQICNGRGICECGVCKCTDPKFQGQTCEMCQTCLGVCAEHKECVQCRAFNKGEKKDTCTQECSYFNITKVESRDKLPQPVQPDPVSHCKEKDVDDCWFYFTYSVNGNNEVMVHVVENPECPTGPDIIPIVAGVVAGIVLIGLALLLIWKLLMIIHDRREFAKFEKEKMNAKWDTQENPIYKSPINNFKNPNYGRKAGL

SEQ ID NO: 13324 - protein, 187 aa, Homo sapiens
MSDKSELKAELERKKQRLAQIREEKKRKEEERKKKETDQKKEAVAPVQEESDLEKKRREAEALLQSMGLTPESPIAEQPLRVVTADTCLFHYLVPPPMSPSSKSVSTPSEAGSQDSGDGAVGSRRGPIKLGMAKITQVDFPPREIVTYTKETQTPVMAQPKEDEEEDDDVVAPKPPIEPEEEKTLKK

SEQ ID NO: 13325 - protein, 1051 aa, Homo sapiens
MERFRLEKKLPGPDEEAVVDLGKTSSTVNTKFEKEELESHRAVYIGVHVPFSKESRRRHRHRGHKHHHRRRKDKESDKEDGRESPSYDTPSQRVQFILGTEDDDEEHIPHDLFTEMDELCYRDGEEYEWKETARWLKFEEDVEDGGDRWSKPYVATLSLHSLFELRSCILNGTVMLDMRASTLDEIADMVLDNMIASGQLDESIRENVREALLKRHHHQNEKRFTSRIPLVRSFADIGKKHSDPHLLERNGILASPQSAPGNLDNSKSGEIKGNGSGGSRENSTVDFSKESASWHCSCGTLGVGLKRPAVDMNFMRKIPTGAEASNVLVGEVDFLERPIIAFVRLAPAVLLTGLTEVPVPTRFLFLLLGPAGKAPQYHEIGRSIATLMTDEIFHDVAYKAKDRNDLLSGIDEFLDQVTVLPPGEWDPSIRIEPPKSVPSQEKRKIPVFHNGSTPTLGETPKEAAHHAGPELQRTGRLFGGLILDIKRKAPFFLSDFKDALSLQCLASILFLYCACMSPVITFGGLLGEATEGRISAIESLFGASLTGIAYSLFAGQPLTILGSTGPVLVFEKILYKFCRDYQLSYLSLRTSIGLWTSFLCIVLVATDASSLVCYITRFTEEAFAALICIIFIYEALEKLFDLGETYAFNMHNNLDKLTSYSCVCTEPPNPSNETLAQWKKDNITAHNISWRNLTVSECKKLRGVFLGSACGHHGPYIPDVLFWCVILFFTTFFLSSFLKQFKTKRYFPTKVRSTISDFAVFLTIVIMVTIDYLVGVPSPKLHVPEKFEPTHPERGWIISPLGDNPWWTLLIAAIPALLCTILIFMDQQITAVIINRKEHKLKKGAGYHLDLLMVGVMLGVCSVMGLPWFVAATVLSISHVNSLKVESECSAPGEQPKFLGIREQRVTGLMIFILMGLSVFMTSVLKFIPMPVLYGVFLYMGVSSLKGIQLFDRIKLFGMPAKHQPDLIYLRYVPLWKVHIFTVIQLTCLVLLWVIKVSAAAVVFPMMVLALVFVRKLMDLCFTKRELSWLDDLMPESKKKKEDDKKKKEKE

SEQ ID NO: 13326 - protein, 260 aa, Homo sapiens
MGVPRTPSRTVLFERERTGLTYRVPSLLPVPPGPTLLAFVEQRLSPDDSHAHRLVLRRGTLAGGSVRWGALHVLGTAALAEHRSMNPCPVHDAGTGTVFLFFIAVLGHTPEAVQIATGRNAARLCCVASRDAGLSWGSARDLTEEAIGGAVQDWATFAVGPGHGVQLPSGRLLVPAYTYRVDRRECFGKICRTSPHSFAFYSDDHGRTWRCGGLVPNLRSGECQLAAVDGGQAGSFLYCNARSPLGSRVQALSTDEGTSF

SEQ ID NO: 13327 - protein, 576 aa, Homo sapiens
MLQTVWFQGLGRNLLFQEPVTFEDVAVYFTQNEWASLHPTQRALYREVMLENYANVTSLSAFPFPKPDLIFQLEQGEAAWGPDPWTLAGGEALRGMCTGGKTKTENEEKTAQLNISKESESHRLIVEGLLMDVPQHPDFKDRLEKSQLHDTGNKTKIGDCTDLTVQDHESSTTEREEIARKLEESSVSTHLITKQGFAKEQVFYKCGECGSYYNPHSDFHLHQRVHTNEKPYTCKECGKTFRYNSKLSRHQKIHTGEKPYSCEECGQAFSQNSHLLQHQKLHGGQRPYECTDCGKTFSYNSKLIRHQRIHTGEKPFKCKECGKAFSCSYDCIIHERIHNGEKPYECKECGKSLSSNSVLIQHQRIHTGEKPYECKECGKAFHRSSVFLQHQRFHTGEQLYKCNECWKTFSCSSRFIVHQRIHNGEKPYECQECGKTFSQKITLVQHQRVHTGEKPYECKECGKAFRWNASFIQHQKWHTRKKLINGTGLSAVKPYCPCAILSPLPPQHTCSALAPPGPPLSSSHAVVLPPSVPFFLLLPSSEKANPSPVQIAHFFQDLAFPGKSSLQSPNPLSHSL

SEQ ID NO: 13328 - protein, 492 aa, Homo sapiens
MPTNGLHQVLKIQFGLVNDTDRYLTAESFGFKVNASAPSLKRKQTWVLEPDPGQGTAVLLRSSHLGRYLSAEEDGRVACEAEQPGRDCRFLVLPQPDGRWVLRSEPHGRFFGGTEDQLSCFATAVSPAELWTVHLAIHPQAHLLSVSRRRYVHLCPREDEMAADGDKPWGVDALLTLIFRSRRYCLKSCDSRYLRSDGRLVWEPEPRACYTLEFKAGKLAFKDCDGHYLAPVGPAGTLKAGRNTRPGKDELFDLEESHPQVVLVAANHRYVSVRQGVNVSANQDDELDHETFLMQIDQETKKCTFYSSTGGYWTLVTHGGIHATATQVSANTMFEMEWRGRRVALKASNGRYVCMKKNGQLAAISDFVGKDEEFTLKLINRPILVLRGLDGFVCHHRGSNQLDTNRSVYDVFHLSFSDGAYRIRGRDGGFWYTGSHGSVCSDGERAEDFVFEFRERGRLAIRARSGKYLRGGASGLLRADADAPAGTALWEY

SEQ ID NO: 13329 - protein, 458 aa, Homo sapiens
MARGPQTLVQVWVGGQLFQADRALLVEHCGFFRGLFRSGMRETRAAEVRLGVLSAGGFRATLQVLRGDRPALAAEDELLQAVECAAFLQAPALARFLEHNLTSDNCALLCDAAAAFGLRDVFHSAALFICDGERELAAELALPEARAYVAALRPSSYAAVSTHTPAPGFLEDASRTLCYLDEEEDAWRTLAALPLEASTLLAGVATLGNKLYIVGGVRGASKEVVELGFCYDPDGGTWHEFPSPHQPRYDTALAGFDGRLYAIGGEFQRTPISSVERYDPAAGCWSFVADLPQPAAGVPCAQACGRLFVCLWRPADTTAVVEYAVRTDAWLPVAELRRPQSYGHCMVAHRDSLYVVRNGPSDDFLHCAIDCLNLATGQWTALPGQFVNSKGALFTAVVRGDTVYTVNRMFTLLYAIEGGTWRLLREKAGFPRPGSLQTFLLRLPPGAPGPVTSTTAEL

SEQ ID NO: 13330 - protein, 1259 aa, Homo sapiens
MDRPLSSSAEAEEELEWQVASRRRKAWAKCRSSWQASETEDLSTEATTQDEEEDEEEDLPGAQLPAAGGRGNVPNEKIAIWLKDCRTPLGASLDEQSSSTLKGVLVRNGGSFEDDLSLGAEANHLHESDAQIENCNNILAKERRLQFHQKGRSMNSTGSGKSSGTVSSVSELLELYEEDPEEILYNLGFGRDEPDIASKIPSRFFNSSSFAKGIDIKVFLSAQMQRMEVENPNYALTSRFRQIEVLTTVANAFSSLYSQVSGTPLQRIGSMSSVTSNKETDPPPPLTRSNTANRLMKTLSKLNLCVDKTEKGESSSPSPSAEKGKILNVSVIEESGNKNDQKSQKIMKKKESSSMLATVKEEVSGSSAAVTENADSDRISDEANSNFNQGTENEQSKETQSHESKLGEESGIVESKLDSDFNISSHSELENSSELKSVHISTPEKEPCAPLTIPSIRNIMTQQKDSFEMEEVQSTEGEAPHVPATYQLGLTKSKRDHLLRTASQHSDSSGFAEDSTDCLSLNHLQVQESLQAMGSSADSCDSETTVTSLGEDLATPTAQDQPYFNESEEESLVPLQKGLEKAAAVADKRKSGSQDFPQCNTIENTGTKQSTCSPGDHIIEITEVEEDLFPAETVELLREASAESDVGKSSESEFTQYTTHHILKSLASIEAKCSDMSSENTTGPPSSMDRVNTALQRAQMKVCSLSNQRMGRSLLKSKDLLKQRYLFAKAGYPLRRSQSLPTTLLSPVRVVSSVNVRLSPGKETRCSPPSFTYKYTPEEEQELEKRVMEHDGQSLVKSTIFISPSSVKKEEAPQSEAPRVEECHHGRTPTCSRLAPPPMSQSTCSLHSIHSEWQERPLCEHTRTLSTHSVPNISGATCSAFASPFGCPYSHRHATYPYRVCSVNPPSAIEMQLRRVLHDIRNSLQNLSQYPMMRGPDPAAAPYSTQKSSVLPLYENTFQELQVMRRSLNLFRTQMMDLELAMLRQQTMVYHHMTEEERFEVDQLQGLRNSVRMELQDLELQLEERLLGLEEQLRAVRMPSPFRSSALMGMCGSRSADNLSCPSPLNVMEPVTELMQEQSYLKSELGLGLGEMGFEIPPGESSESVFSQATSESSSVCSGPSHANRRTGVPSTASVGKSKTPLVARKKVFRASVALTPTAPSRTGSVQTPPDLESSEEVDAAEGAPEVVGPKSEVEEGHGKLPSMPAAEEMHKNVEQDELQQVIREIKESIVGEIRREIVSGLLAAVSSSKASNSKQDYH

SEQ ID NO: 13331 - protein, 428 aa, Homo sapiens
MQLPRWWELGDPCAWTGQGRGTRRMSPATTGTFLLTVYSIFSKVHSDRNVYPSAGVLFVHVLEREYFKGEFPPYPKPGEISNDPITFNTNLMGYPDRPGWLRYIQRTPYSDGVLYGSPTAENVGKPTIIEITAYNRRTFETARHNLIINIMSAEDFPLPYQAEFFIKNMNVEEMLASEVLGDFLGAVKNVWQPERLNAINITSALDRGGRVPLPINDLKEGVYVMVGADVPFSSCLREVENPQNQLRCSQEMEPVITCDKKFRTQFYIDWCKISLVDKTKQVSTYQEVIRGEGILPDGGEYKPPSDSLKSRDYYTDFLITLAVPSAVALVLFLILAYIMCCRREGVIQLVHHSAIQKSTKELRDMSKNREIAWPLSTLPVFHPVTGEIIPPLHTDNYDSTNMPLMQTQQNLPHQTQIPQQQTTGKWYP

SEQ ID NO: 13332 - protein, 132 aa, Homo sapiens
MDGFYDQQVPFMVPGKSRSEECRGRPVIDRKRKFLDTDLAHDSEELFQDLSQLQEAWLAEAQVPDDEQFVPDFQSDNPFLFKLPQEFMIPFQFQFVAILYSPGSLSSFSKSAVQSGASCPTSNQDQTGAAQP

SEQ ID NO: 13333 - protein, 628 aa, Homo sapiens
MSSQGSPSVALSTTTVSSVAVQAGDSKIVIAVIKCGKWVQLQLAESQPNLLEIGSSQDETKKLLHDHELLLAKLKALEDRVWELLQEADKTAEENKDQSQVYDAMAETLGEAWAALVSMLERRTELLRLTSEFFENALEFAIKIDQAEDFLQNTHEFESAESLKSLLQLHEHHTKELLERSLALLNKSQQLTDFIEKFKCEGPNVNPELTQGAHSSCLKVDRLLELLQDRRRQLDKYLKQQWQELSQVLQICQWDQQENQVTCWFQKTIRNLQEQSLGSSLSDNEDRIHKQEELIIKAKAFDVLGRVEAYLKLLKSEGLSLAVLAVRHEELHRKIKDCTTDALQKGQTLISQVDSCSSQVSGIHEMMGCIKRRVDHLTEQCSAHKEYALKKQQLTASVEGYLRKVEMSIQKISPVLSNAMDVGSTRSESEKILNKYLELDIQAKETSHELEAAAKTMMEKNEFVSDEMVSLSSKARWLAEELNLFGQSIDYRSQVLQTYVAFLKSSEEVEMQFQSLKEFYETEIPQKEQDDAKAKHCSDSAEKQWQLFLKKSFITQDLGLEFLNLINMAKENEILDVKNEVYLMKNTMENQKAEREELSLLRLAWQLKATESKPGKQQWAAFKEQLKK

SEQ ID NO: 13334 - protein, 702 aa, Homo sapiens
MSRFPAVAGRAPRRQEEGERSRDLQEERLSAVCIADREEKGCTSQEGGTTPTFPIQKQRKKIIQAETAIKYMTDGCLLKHILGDPNLTKFSVIILDEAHERTLTTDILFGLLKKLFQEKSPNRKEHLKVVVMSATMELAKLSAFFGNCPIFDIPGRLYPVREKFCNLIGPRDRENTAYIQAIVKVTMDIHLNEMAGDILVFLTGQFEIEKSCELLFQMAESVDYDYDVQDTTLDGLLILPCYGSMTTDQQRRIFLPPPPGIRKCVISTNISATSLTIDGIRYVVDGGFVKQLNHNPRLGLDILEVVPISKSEALQRSGRAGRTSSGKCFRIYSKDFWNQCMPDHVIPEIKRTSLTSVVLTLKCLAIHDVIRFPYLDPPNERLILEALKQLYQCDAIDRSGHVTRLGLSMVEFPLPPHLTCAVIKAASLDCEDLLLPIAAMLSVENVFIRPVDPEYQKEAEQRHRELAAKAGGFNDFATLAVIFEQCKSSGAPASWCQKHWIHWRCLFSAFRVEAQLRELIRKLKQQSDFPKETFEGPKHEVLRRCLCAGYFKNVARRSVGRTFCTMDGRGSPVHIHPSSALHEQETKLEWIIFHEVLVTTKVYARIVCPIRYEWVRDLLPKLHEFNAHDLSSVARREVREDARRRWTNKENVKQLKDGISKDVLKKMQRRNDDKSISDARARFLERKQQRTQDHSDTRKETG

SEQ ID NO: 13335 - protein, 1051 aa, Homo sapiens
MPGKLKVKIVAGRHLPVMDRASDLTDAFVEVKFGNTTFKTDVYLKSLNPQWNSEWFKFEVDDEDLQDEPLQITVLDHDTYSANDAIGKVYIDIDPLLYSEAATVISGWFPIYDTIHGIRGEINVVVKVDLFNDLNRFRQSSCGVKFFCTTSIPKCYRAVIIHGFVEELVVNEDPEYQWIDRIRTPRASNEARQRLISLMSGELQRKIGLKVLEMRGNAVVGYLQCFDLEGESGLVVRAIGTACTLDKLSSPAAFLPACNSPSKEMKEIPFNEDPNPNTHSSGPSTPLKNQTYSFSPSKSYSRQSSSSDTDLSLTPKTGMGSGSAGKEGGPFKALLRQQTQSALEQREFPFFTLTAFPPGFLVHVGGVVSARSVKLLDRIHNPDEPETRDAWWAEIRQEIKSHAKALGCHAVVGYSESTSICEEVCILSASGTAAVLNPRFLQDGTVEGCLEQRLEENLPTRCGFCHIPYDELNMPFPAHLTYCYNCRKQKVPDVLFTTIDLPTDATVIGKGCLIQARLCRLKKKAQAEANATAISNLLPFMEYEVHTQLMNKLKLKGMNALFGLRIQITVGENMLMGLASATGVYLAALPTPGGIQIAGKTPNDGSYEQHISHMQKKINDTIAKNKELYEINPPEISEEIIGSPIPEPRQRSRLLRSQSESSDEVTELDLSHGKKDAFVLEIDDTDAMEDVHSLLTDVPPPSGFYSCNTEIMPGINNWTSEIQMFTSVRVIRLSSLNLTNQALNKNFNDLCENLLKSLYFKLRSMIPCCLCHVNFTVSLPEDELIQVTVTAVAITFDKNQALQTTKTPVEKSLQRASTDNEELLQFPLELCSDSLPSHPFPPAKEHLESASSNSGIPAAQRATSVDYSSFADRCSSWIELIKLKAQTIRRGSIKTTMTVEKASPVGDGNFRNRSAPPCANSTVGVVKMTPLSFIPGAKITKYLGIINMFFIRETTSLREEGGVSGFLHAFIAEVFAMVRAHVAALGGNAVVSYIMKQCVFMENPNKNQAQCLINVSGDAVVFVRESDLEVVSSQQPTTNCQSSCTEGEVTT

SEQ ID NO: 13336 - protein, 674 aa, Homo sapiens
MERRSESPCLRDSPDRRSGSPDVKGPPPVKVARLEQNGSPMGARGRPNGAVAKAVGGIIKLGRWNPLPLSYVTDAPDATVADMLQDVYHVVTLKIQLQSCSKLEDLPAEQWNHATVRNALKELLKEMNQSTLAKECPLSQSMISSIVNSTYYANVSATKCQEFGRWYKKYKKIKVERVERENLSDYCVLGQRPMHLPNMNQLASLGKTNEQSPHSQIHHSTPIRNQVPALQPIMSPGLLSPQLSPQLVRQQIAMAHLINQQIAVSRLLAHQHPQAINQQFLNHPPIPRAVKPEPTNSSVEVSPDIYQQVRDELKRASVSQAVFARVAFNRTQGLLSEILRKEEDPRTASQSLLVNLRAMQNFLNLPEVERDRIYQDERERSMNPNVSMVSSASSSPSSSRTPQAKTSTPTTDLPIKVDGANINITAAIYDEIQQEMKRAKVSQALFAKVAANKSQGWLCELLRWKENPSPENRTLWENLCTIRRFLNLPQHERDVIYEEESRHHHSERMQHVVQLPPEPVQVLHRQQSQPAKESSPPREEAPPPPPPTEDSCAKKPRSRTKISLEALGILQSFIHDVGLYPDQEAIHTLSAQLDLPKHTIIKFFQNQRYHVKHHGKLKEHLGSAVDVAEYKDEELLTESEENDSEEGSEEMYKVEAEEENADKSKAAPAEIDQR

SEQ ID NO: 13337 - protein, 472 aa, Homo sapiens
MGDPSKQDILTIFKRLRSVPTNKVCFDCGAKNPSWASITYGVFLCIDCSGSHRSLGVHLSFIRSTELDSNWSWFQLRCMQVGGNASALWLDSCVVPPLSPPPKEEDFFASHVSPEVSDTAWASAIAEPSSLTSRPVETTLENNEGGQEQGPSVEGLNVPTKATLEVSSIIKKKPNQAKKGLGAKKGSLGAQKLANTCFNEIEKQAQAADKMKEQEDLAKVVSKEESIVSSLRLAYKDLEIQMKKDEKMNISGKKNVDSDRLGMGFGNCRSVISHSVTSDMQTIEQESPIMAKPRKKYNDDSDDSYFTSSSSYFDEPVELRSSSFSSWDDSSDSYWKKETSKDTETVLKTTGYSDRPTARRKPDYEPVENTDEAQKKFGNVKAISSDMYFGRQSQADYETRARLERLSASSSISSADLFEEPRKQPAGNYSLSSVLPNAPDMAQFKQGVRSVAGKLSVFANGVVTSIQDRYGS

SEQ ID NO: 13338 - protein, 1962 aa, Homo sapiens
MANFLLPRGTSSFRRFTRESLAAIEKRMAEKQARGSTTLQESREGLPEEEAPRPQLDLQASKKLPDLYGNPPQELIGEPLEDLDPFYSTQKTFIVLNKGKTIFRFSATNALYVLSPFHPIRRAAVKILVHSLFNMLIMCTILTNCVFMAQHDPPPWTKYVEYTFTAIYTFESLVKILARGFCLHAFTFLRDPWNWLDFSVIIMAYVSENIKLGNLSALRTFRVLRALKTISVIPGLKTIVGALIQSVKKLADVMVLTVFCLSVFALIGLQLFMGNLRHKCVRNFTALNGTNGSVEADGLVWESLDLYLSDPENYLLKNGTSDVLLCGNSSDAGTCPEGYRCLKAGENPDHGYTSFDSFAWAFLALFRLMTQDCWERLYQQTLRSAGKIYMIFFMLVIFLGSFYLVNLILAVVAMAYEEQNQATIAETEEKEKRFQEAMEMLKKEHEALTIRGVDTVSRSSLEMSPLAPVNSHERRSKRRKRMSSGTEECGEDRLPKSDSEDGPRAMNHLSLTRGLSRTSMKPRSSRGSIFTFRRRDLGSEADFADDENSTAGESESHHTSLLVPWPLRRTSAQGQPSPGTSAPGHALHGKKNSTVDCNGVVSLLGAGDPEATSPGSHLLRPVMLEHPPDTTTPSEEPGGPQMLTSQAPCVDGFEEPGARQRALSAVSVLTSALEELEESRHKCPPCWNRLAQRYLIWECCPLWMSIKQGVKLVVMDPFTDLTITMCIVLNTLFMALEHYNMTSEFEEMLQVGNLVFTGIFTAEMTFKIIALDPYYYFQQGWNIFDSIIVILSLMELGLSRMSNLSVLRSFRLLRVFKLAKSWPTLNTLIKIIGNSVGALGNLTLVLAIIVFIFAVVGMQLFGKNYSELRDSDSGLLPRWHMMDFFHAFLIIFRILCGEWIETMWDCMEVSGQSLCLLVFLLVMVIGNLVVLNLFLALLLSSFSADNLTAPDEDREMNNLQLALARIQRGLRFVKRTTWDFCCGLLRQRPQKPAALAAQGQLPSCIATPYSPPPPETEKVPPTRKETRFEEGEQPGQGTPGDPEPVCVPIAVAESDTDDQEEDEENSLGTEEESSKQTPEDSCSEGSTADMTNTAELLEQIPDLGQDVKDPEDCFTEGCVRRCPCCAVDTTQAPGKVWWRLRKTCYHIVEHSWFETFIIFMILLSSGALAFEDIYLEERKTIKVLLEYADKMFTYVFVLEMLLKWVAYGFKKYFTNAWCWLDFLIVDVSLVSLVANTLGFAEMGPIKSLRTLRALRPLRALSRFEGMRVVVNALVGAIPSIMNVLLVCLIFWLIFSIMGVNLFAGKFGRCINQTEGDLPLNYTIVNNKSQCESLNLTGELYWTKVKVNFDNVGAGYLALLQVATFKGWMDIMYAAVDSRGYEEQPQWEYNLYMYIYFVIFIIFGSFFTLNLFIGVIIDNFNQQKKKLGGQDIFMTEEQKKYYNAMKKLGSKKPQKPIPRPLNKYQGFIFDIVTKQAFDVTIMFLICLNMVTMMVETDDQSPEKINILAKINLLFVAIFTGECIVKLAALRHYYFTNSWNIFDFVVVILSIVGTVLSDIIQKYFFSPTLFRVIRLARIGRILRLIRGAKGIRTLLFALMMSLPALFNIGLLLFLVMFIYSIFGMANFAYVKWEAGIDDMFNFQTFANSMLCLFQITTSAGWDGLLSPILNTGPPYCDPTLPNSNGSRGDCGSPAVGILFFTTYIIISFLIVVNMYIAIILENFSVATEESTEPLSEDDFDMFYEIWEKFDPEATQFIEYSVLSDFADALSEPLRIAKPNQISLINMDLPMVSGDRIHCMDILFAFTKRVLGESGEMDALKIQMEEKFMAANPSKISYEPITTTLRRKHEEVSAMVIQRAFRRHLLQRSLKHASFLFRQQAGSGLSEEDAPEREGLIAYVMSENFSRPLGPPSSSSISSTSFPPSYDSVTRATSDNLQVRGSDYSHSEDLADFPPSPDRDRESIV

SEQ ID NO: 13339 - protein, 372 aa, Homo sapiens
MAYHSFLVEPISCHAWNKDRTQIAICPNNHEVHIYEKSGAKWTKVHELKEHNGQVTGIDWAPESNRIVTCGTDRNAYVWTLKGRTWKPTLVILRINRAARCVRWAPNENKFAVGSGSRVISICYFEQENDWWVCKHIKKPIRSTVLSLDWHPNNVLLAAGSCDFKCRIFSAYIKEVEERPAPTPWGSKMPFGELMFESSSSCGWVHGVCFSASGSRVAWVSHDSTVCLADADKKMAVATLASETLPLLALTFITDNSLVAAGHDCFPVLFTYDAAAGMLSFGGRLDVPKQSSQRGLTARERFQNLDKKASSEGGTAAGAGLDSLHKNSVSQISVLSGGKAKCSQFCTTGMDGGMSIWDVKSLESALKDLKIK

SEQ ID NO: 13340 - protein, 755 aa, Homo sapiens
MIYEEDAEEWALYLTEVFLHVVKREAILLYRLENFSFRHLELLNLTSYKCKLLILSNSLLRDLTPKKCQFLEKILHSPKSVVTLLCGVKSSDQLYELLNISQSRWEISTEQEPEDYISVIQSIIFKDSEDYFEVNIPTDLRAKHSGEISERKEIEELSEASRNTIPLAVVLPTEIPCENPGEIFIILRDEVIGDTVEVEFTSSNKRIRTRPALWNKKVWCMKALEFPAGSVHVNVYCDGIVKATTKIKYYPTAKAKECLFRMADSGESLCQNSIEELDGVLTSIFKHEIPYYEFQSLQTEICSQNKYTHFKELPTLLHCAAKFGLKNLAIHLLQCSGATWASKMKNMEGSDPAHIAERHGHKELKKIFEDFSIQEIDINNEQENDYEEDIASFSTYIPSTQNPAFHHESRKTYGQSADGAEANEMEGEGKQNGSGMETKHSPLEVGSESSEDQYDDLYVFIPGADPENNSQEPLMSSRPPLPPPRPVANAFQLERPHFTLPGTMVEGQMERSQNWGHPGVRQETGDEPKGEKEKKEEEKEQEEEEDPYTFAEIDDSEYDMILANLSIKKKTGSRSFIINRPPAPTPRPTSIPPKEETTPYIAQVFQQKTARRQSDDDKFCGLPKKQDRARIESPAFSTLRGCLTDGQEELILLQEKVKNGKMSMDEALEKFKHWQMGKSGLEMIQQEKLRQLRDCIIGKRPEEENVYNKLTIVHHPGGKETAHNENKFYNVHFSNKLPARPQVEKEFGFCCKKDH

SEQ ID NO: 13341 - protein, 237 aa, Homo sapiens
MKRLTCFFICFFLSEVSGFEIPINGLSERSLPGESEEMMEEVDQVTLYSYKVQSTITSRMATTMIQSKVVNNSPQPQNVVFDVQIPKGAFISNFSMTVDGKTFRSSIKEKTVGRALYAQARAKGKTAGLVRSSALDMENFRTEVNVLPGAKVQFELHYQEVKWRKLGSYEHRIYLQPGRLAKHLEVDVWVIEPQGLRFLHVPDTFEGHFDGVPVISKGQQKAHVSFKPTVAQQRICP

SEQ ID NO: 13342 - protein, 539 aa, Homo sapiens
MAELTVEVRGSNGAFYKGFIKDVHEDSLTVVFENNWQPERQVPFNEVRLPPPPDIKKEISEGDEVEVYSRANDQEPCGWWLAKVRMMKGEFYVIEYAACDATYNEIVTFERLRPVNQNKTVKKNTFFKCTVDVPEDLREACANENAHKDFKKAVGACRIFYHPETTQLMILSASEATVKRVNILSDMHLRSIRTKLMLMSRNEEATKHLECTKQLAAAFHEEFVVREDLMGLAIGTHGSNIQQARKVPGVTAIELDEDTGTFRIYGESADAVKKARGFLEFVEDFIQVPRNLVGKVIGKNGKVIQEIVDKSGVVRVRIEGDNENKLPREDGMVPFVFVGTKESIGNVQVLLEYHIAYLKEVEQLRMERLQIDEQLRQIGSRSYSGRGRGRRGPNYTSGYGTNSELSNPSETESERKDELSDWSLAGEDDRDSRHQRDSRRRPGGRGRSVSGGRGRGGPRGGKSSISSVLKDPDSNPYSLLDNTESDQTADTDASESHHSTNRRRRSRRRRTDEDAVLMDGMTESDTASVNENGLGKRCD

SEQ ID NO: 13343 - protein, 301 aa, Homo sapiens
MAVTDSLSRAATVLATVLLLSFGSVAASHIEVTVENFLRVLTGRIPPSTPRSKRLLSDDRSNILIYMTGHGGNGFLKFQDSEEITNIELADAFEQMWQKRRYNELLFIIDTCQGASMYERFYSPNIMALASSQVGEDSLSHQPDPAIGVHLMDRYTFYVLEFLEEINPASQTNMNDLFQVCPKSLCVSTPGHRTDLFQRDPKNVLITDFFGSVRKVEITTETIKLQQDSEIMESSYKEDQMDEKLMEPLKYAEQLPVAQIIHQKPKLKDWHPPGGFILGLWALIIMVFFKTYGIKHMKFIF

SEQ ID NO: 13344 - protein, 325 aa, Homo sapiens
MIIVAHVLLILLGATEILQADLLPDEKISLLPPVNFTIKVTGLAQVLLQWKPNPDQEQRNVNLEYQVKINAPKEDDYETRITESKCVTILHKGFSASVRTILQNDHSLLASSWASAELHAPPGSPGTSIVNLTCTTNTTEDNYSRLRSYQVSLHCTWLVGTDAPEDTQYFLYYRYGSWTEECQEYSKDTLGRNIACWFPRTFILSKGRDWLAVLVNGSSKHSAIRPFDQLFALHAIGNDEHKPLREWFVIVIMATICFILLILSLICKICHLWIKLFPPIPAPKSNIKDLFVTTNYEKAGSSETEIEVICYIEKPGVETLEDSVF

SEQ ID NO: 13345 - protein, 511 aa, Homo sapiens
MAAAALRDPAQVPVAADLLTDHEEQGYVTFEDVAVYFSQEEWRLLDDAQRLLYRNVMLENFTLLASLGLASSKTHEITQLESWEEPFMPAWEVVTSAIPRGCWHGAEAEEAPEQIASVGLLSSNIQQHQKQHCGEKPLKRQEGRVPVLRSCKVHLSEKSLQSREVGKALLISSGVLKHQVTHTGEKSHRSSKSREAFHAGKRHYKCSECGKAFGQKYLLVQHQRLHAGKKTYECSECGKLFRDMSNLFIHQIVHTGERPYGCSNCGKSFSRNAHLIEHQRVHTGEKPFTCSECGKAFRHNSTLVQHHKIHTGVRPYECSECGKLFSFNSSLMKHQRIHTGERPYKCSECGKFYSHKSNLIKHWRVHTGERPYKCSDCGKFFTQCSSLMQHQKVHTGEKPFKCNECGRFFRENSTLVRHQRVHTGAKPYECRECGKFFSQSSTLMQHRKVHIGEKPFKCNECGRLFRENSSLVKHQRVHTGAKPYECRECGKFFRHNSSLFKHRRIHTGEMQ

SEQ ID NO: 13346 - protein, 1309 aa, Homo sapiens
MLLNGDCPESLKKEAAAAEPPRENGLDEAGPGDETTGQEVIVIQDTGFSVKILAPGIEPFSLQVSPQEMVQEIHQVLMDREDTCHRTCFSLHLDGNVLDHFSELRSVEGLQEGSVLRVVEEPYTVREARIHVRHVRDLLKSLDPSDAFNGVDCNSLSFLSVFTDGDLGDSGKRKKGLEMDPIDCTPPEYILPGSRERPLCPLQPQNRDWKPLQCLKVLTMSGWNPPPGNRKMHGDLMYLFVITAEDRQVSITASTRGFYLNQSTAYHFNPKPASPRFLSHSLVELLNQISPTFKKNFAVLQKKRVQRHPFERIATPFQVYSWTAPQAEHAMDCVRAEDAYTSRLGYEEHIPGQTRDWNEELQTTRELPRKNLPERLLRERAIFKVHSDFTAAATRGAMAVIDGNVMAINPSEETKMQMFIWNNIFFSLGFDVRDHYKDFGGDVAAYVAPTNDLNGVRTYNAVDVEGLYTLGTVVVDYRGYRVTAQSIIPGILERDQEQSVIYGSIDFGKTVVSHPRYLELLERTSRPLKILRHQVLNDRDEEVELCSSVECKGIIGNDGRHYILDLLRTFPPDLNFLPVPGEELPEECARAGFPRAHRHKLCCLRQELVDAFVEHRYLLFMKLAALQLMQQNASQLETPSSLENGGPSSLESKSEDPPGQEAGSEEEGSSASGLAKVKELAETIAADDGTDPRSREVIRNACKAVGSISSTAFDIRFNPDIFSPGVRFPESCQDEVRDQKQLLKDAAAFLLSCQIPGLVKDCMEHAVLPVDGATLAEVMRQRGINMRYLGKVLELVLRSPARHQLDHVFKIGIGELITRSAKHIFKTYLQGVELSGLSAAISHFLNCFLSSYPNPVAHLPADELVSKKRNKRRKNRPPGAADNTAWAVMTPQELWKNICQEAKNYFDFDLECETVDQAVETYGLQKITLLREISLKTGIQVLLKEYSFDSRHKPAFTEEDVLNIFPVVKHVNPKASDAFHFFQSGQAKVQQGFLKEGCELINEALNLFNNVYGAMHVETCACLRLLARLHYIMGDYAEALSNQQKAVLMSERVMGTEHPNTIQEYMHLALYCFASSQLSTALSLLYRARYLMLLVFGEDHPEMALLDNNIGLVLHGVMEYDLSLRFLENALAVSTKYHGPKALKVALSHHLVARVYESKAEFRSALQHEKEGYTIYKTQLGEDHEKTKESSEYLKCLTQQAVALQRTMNEIYRNGSSANIPPLKFTAPSMASVLEQLNVINGILFIPLSQKDLENLKAEVARRHQLQEASRNRDRAEEPMATEPAPAGAPGDLGSQPPAAKDPSPSVQG

SEQ ID NO: 13347 - protein, 102 aa, Homo sapiens
MASPEHPGSPGCMGPITQCTARTQQEAPATGPDLPHPGPDGHLDTHSGLSSNSSMTTRELQQYWQNQKCRWKHVKLLFEIASARIEERKVSKFVAPAPDATP

SEQ ID NO: 13348 - protein, 267 aa, Homo sapiens
HTCLCQAVSTLASENERTKDLIIEQRFHRTIIGQKGERIREIRDKFPEVIINFPDPAQKSDIVQLRGPKNEVEKCTKYMQKMVADLVENSYSISVPIFKQFHKNIIGKGGANIKKIREESNTKIDLPAENSNSETIIITGKRANCEAARSRILSIQKDLANIAEVEVSIPAKLHNSLIGTKGRLIRSIMEECGGVHIHFPVEGSGSDTVVIRGPSSDVEKAKKQLLHLAEEKQTKSFTVDIRAKPEYHKFLIGKGGGKIRKVRDSTG

SEQ ID NO: 13349 - protein, 855 aa, Homo sapiens
MTDVSVTVCHINSPGDFYLQLIEGLDILFLLKTIEEFYKSEDGENLEILCPVQDQACVAKFEDGIWYRAKVIGLPGHQEVEVKYVDFGNTAKITIKDVRKIKDEFLNAPEKAIKCKLAYIEPYKRTMQWSKEAKEKFEEKAQDKFMTCSVIKILEDNVLLVELFDSLGAPEMTTTSINDQLVKEGLASYEIGYILKDNSQKHIEVWDPSPEEIISNEVHNLNPVSAKSLPNENFQSLYNKELPVHICNVISPEKIYVQWLLTENLLNSLEEKMIAAYENSKWEPVKWENDMHCAVKIQDKNQWRRGQIIRMVTDTLVEVLLYDVGVELVVNVDCLRKLEENLKTMGRLSLECSLVDIRPAGGSDKWTATACDCLSLYLTGAVATIILQVDSEENNTTWPLPVKIFCRDEKGERVDVSKYLIKKGLALRERRINNLDNSHSLSEKSLEVPLEQEDSVVTNCIKTNFDPDKKTADIISEQKVSEFQEKILEPRTTRGYKPPAIPNMNVFEATVSCVGDDGTIFVVPKLSEFELIKMTNEIQSNLKCLGLLEPYFWKKGEACAVRGSDTLWYRGKVMEVVGGAVRVQYLDHGFTEKIPQCHLYPILLYPDIPQFCIPCQLHNTTPVGNVWQPDAIEVLQQLLSKRQVDIHIMELPKNPWEKLSIHLYFDGMSLSYFMAYYKYCTSEHTEEMLKEKPRSDHDKKYEEEQWEIRFEELLSAETDTPLLPPYLSSSLPSPGELYAVQVKHVVSPNEVYICLDSIETSNQSNQHSDTDDSGVSGESESESLDEALQRVNKKVEALPPLTDFRTEMPCLAEYDDGLWYRAKIVAIKEFNPLSILVQFVDYGSTAKLTLNRLKI

SEQ ID NO: 13350 - protein, 1211 aa, Homo sapiens
MGRHVATSCHVAWLLVLISGCWGQVNRLPFFTNHFFDTYLLISEDTPVGSSVTQLLAQDMDNDPLVFGVSGEEASRFFAVEPDTGVVWLRQPLDRETKSEFTVEFSVSDHQGVITRKVNIQVGDVNDNAPTFHNQPYSVRIPENTPVGTPIFIVNATDPDLGAGGSVLYSFQPPSQFFAIDSARGIVTVIRELDYETTQAYQLTVNATDQDKTRPLSTLANLAIIITDVQDMDPIFINLPYSTNIYEHSPPGTTVRIITAIDQDKGRPRGIGYTIVSGNTNSIFALDYISGVLTLNGLLDRENPLYSHGFILTVKGTELNDDRTPSDATVTTTFNILVIDINDNAPEFNSSEYSVAITELAQVGFALPLFIQVVDKDENLGLNSMFEVYLVGNNSHHFIISPTSVQGKADIRIRVAIPLDYETVDRYDFDLFANESVPDHVGYAKVKITLINENDNRPIFSQPLYNISLYENVTVGTSVLTVLATDNDAGTFGEVSYFFSDDPDRFSLDKDTGLIMLIARLDYELIQRFTLTIIARDGGGEETTGRVRINVLDVNDNVPTFQKDAYVGALRENEPSVTQLVRLRATDEDSPPNNQITYSIVSASAFGSYFDISLYEGYGVISVSRPLDYEQISNGLIYLTVMAMDAGNPPLNSTVPVTIEVFDENDNPPTFSKPAYFVSVVENIMAGATVLFLNATDLDRSREYGQESIIYSLEGSTQFRINARSGEITTTSLLDRETKSEYILIVRAVDGGVGHNQKTGIATVNITLLDINDNHPTWKDAPYYINLVEMTPPDSDVTTVVAVDPDLGENGTLVYSIQPPNKFYSLNSTTGKIRTTHAMLDRENPDPHEAELMRKIVVSVTDCGRPPLKATSSATVFVNLLDLNDNDPTFQNLPFVAEVLEGIPAGVSIYQVVAIDLDEGLNGLVSYRMPVGMPRMDFLINSSSGVVVTTTELDRERIAEYQLRVVASDAGTPTKSSTSTLTIHVLDVNDETPTFFPAVYNVSVSEDVPREFRVVWLNCTDNDVGLNAELSYFITGGNVDGKFSVGYRDAVVRTVVGLDRETTAAYMLILEAIDNGPVGKRHTGTATVFVTVLDVNDNRPIFLQSSYEASVPEDIPEGHSILQEDLASPCISPAPPRRAFQSSGEKETSQFPGKELRREPGPSKAQNRAAFTEPLAEAPLLGSKQAQEERAPLPREQAQQLQGSEGEKGGP

SEQ ID NO: 13351 - protein, 913 aa, Homo sapiens
MASNSTKSFLADAGYGEQELDANSALMELDKGLRSGKLGEQCEAVVRFPRLFQKYPFPILINSAFLKLADVFRVGMLGSLASIIPERKNAHHSIRQSLDSHDNVEVEAAVFAAANFSAQSKDFAVGICNKISEMIQGLATPVDLKLKLIPILQHMHHDAILASSARQLLQQLVTSYPSTKMVIVSLHTFTLLAASSLVDTPKQIQLLLQYLKNDPRKAVKRLAIQDLKLLANKTPHTWSRENIQALCECALQTPYDSLKLGMLSVLSTLSGTIAIKHYFSIVPGNVSSSPRSSDLVKLAQECCYHNNRGIAAHGVRVLTNITVSCQEKDLLALEQDAVFGLESLLVLCSQDDSPGAQATLKIALNCMVKLAKGRPHLSQSVVETLLTQLHSAQDAARILMCHCLAAIAMQLPVLGDGMLGDLMELYKVIGRSATDKQQELLVSLATVIFVASQKALSVESKAVIKQQLESVSNGWTVYRIARQASRMGNHDMAKELYQSLLTQVASEHFYFWLNSLKEFSHAEQCLTGLQEENYSSALSCIAESLKFYHKGIASLTAASTPLNPLSFQCEFVKLRIDLLQAFSQLICTCNSLKTSPPPAIATTIAMTLGNDLQRCGRISNQMKQSMEEFRSLASRYGDLYQASFDADSATLRNVELQQQSCLLISHAIEALILDPESASFQEYGSTGTAHADSEYERRMMSVYNHVLEEVESLNRKYTPVSYMHTACLCNAIIALLKVPLSFQRYFFQKLQSTSIKLALSPSPRNPAEPIAVQNNQQLALKVEGVVQHGSKPGLFRKIQSVCLNVSSTLQSKSGQDYKIPIDNMTNEMEQRVEPHNDYFSTQFLLNFAILGTHNITVESSVKDANGIVWKTGPRTTIFVKSLEDPYSQQIRLQQQQAQQPLQQQQQRNAYTRF

SEQ ID NO: 13352 - protein, 964 aa, Homo sapiens
MITTLPSLLPASLASISHRVTNLPSNSLSHNPGLSKPDFPGNSSPGLPSSSSPGRDLGAPAGSMGAASCEDEELEFKLVFGEEKEAPPLGAGGLGEELDSEDAPPCCRLALGEPPPYGAAPIGIPRPPPPRPGMHSPPPRPAPSPGTWESQPARSVRLGGPGGGAGGAGGGRVLECPSIRITSISPTPEPPAALEDNPDAWGDGSPRDYPPPEGFGGYREAGGQGGGAFFSPSPGSSSLSSWSFFSDASDEAALYAACDEVESELNEAASRFGLGSPLPSPRASPRPWTPEDPWSLYGPSPGGRGPEDSWLLLSAPGPTPASPRPASPCGKRRYSSSGTPSSASPALSRRGSLGEEGSEPPPPPPLPLARDPGSPGPFDYVGAPPAESIPQKTRRTSSEQAVALPRSEEPASCNGKLPLGAEESVAPPGGSRKEVAGMDYLAVPSPLAWSKARIGGHSPIFRTSALPPLDWPLPSQYEQLELRIEVQPRAHHRAHYETEGSRGAVKAAPGGHPVVKLLGYSEKPLTLQMFIGTADERNLRPHAFYQVHRITGKMVATASYEAVVSGTKVLEMTLLPENNMAANIDCAGILKLRNSDIELRKGETDIGRKNTRVRLVFRVHVPQGGGKVVSVQAASVPIECSQRSAQELPQVEAYSPSACSVRGGEELVLTGSNFLPDSKVVFIERGPDGKLQWEEEATVNRLQSNEVTLTLTVPEYSNKRVSRPVQVYFYVSNGRRKRSPTQSFRFLPVICKEEPLPDSSLRGFPSASATPFGTDMDFSPPRPPYPSYPHEDPACETPYLSEGFGYGMPPLYPQTGPPPSYRPGLRMFPETRGTTGCAQPPAVSFLPRPFPSDPYGGRGSSFSLGLPFSPPAPFRPPPLPASPPLEGPFPSQSDVHPLPAEGYNKVGPGYGPGEGAPEQEKSRGGYSSGFRDSVPIQGITLEEGGCGTGGCECECVQEIALHVC

SEQ ID NO: 13353 - protein, 687 aa, Homo sapiens
MGTENTPGGKASPDPQDVRPSVFHNIKLFVLCHSLLQLAQLMISGYLKSSISTVEKRFGLSSQTSGLLASFNEVGNTALIVFVSYFGSRVHRPRMIGYGAILVALAGLLMTLPHFISEPYRYDNTSPEDMPQDFKASLCLPTTSAPASAPSNGNCSSYTETQHLSVVGIMFVAQTLLGVGGVPIQPFGISYIDDFAHNSNSPLYLGILFAVTMMGPGLAFGLGSLMLRLYVDINQMPEGGISLTIKDPRWVGAWWLGFLIAAGAVALAAIPYFFFPKEMPKEKRELQFRRKVLAVTDSPARKGKDSPSKQSPGESTKKQDGLVQIAPNLTVIQFIKVFPRVLLQTLRHPIFLLVVLSQVCLSSMAAGMATFLPKFLERQFSITASYANLLIGCLSFPSVIVGIVVGGVLVKRLHLGPVGCGALCLLGMLLCLFFSLPLFFIGCSSHQIAGITHQTSAHPGLELSPSCMEACSCPLDGFNPVCDPSTRVEYITPCHAGCSSWVVQDALDNSQVFYTNCSCVVEGNPVLAGSCDSTCSHLVVPFLLLVSLGSALACLTHTPSFMLILRGVKKEDKTLAVGIQFMFLRILAWMPSPVIHGSAIDTTCVHWALSCGRRAVCRYYNNDLLRNRFIGLQFFFKTGSVICFALVLAVLRQQDKEARTKESRSSPAVEQQLLVSGPGKKPEDSRV

SEQ ID NO: 13354 - protein, 213 aa, Homo sapiens
MVEALRVWASTHMSPSWTLLKLCDVQPMQYFDLTCQLLGKAEVDGASFLLKVWDGTRTPFPSWRVLIQDLVLEGDLSHIHRLQNLTIDILVYDNHVHVARSLKVGSFLRIYSLHTKLQSMNSENQTMLSLEFHLHGGTSYGRGIRVLPESNSDVDQLKKDLESANLTANQHSDVICQSEPDDSFPSSGSVSLYEVERCQQLSATILTDHQYLE

SEQ ID NO: 13355 - protein, 686 aa, Homo sapiens
MYVGSKDYVLSLDLHDINREPLIIHWAASPQRIEECVLSGKDVNGECGNFVRLIQPWNRTHLYVCGTGAYNPMCTYVNRGRRAQDYIFYLEPERLESGKGKCPYDPKLDTASALINEELYAGVYIDFMGTDAAIFRTLGKQTAMRTDQYNSRWLNDPSFIHAELIPDSAERNDDKLYFFFRERSAEAPQSPAVYARIGRICLNDDGGHCCLVNKWSTFLKARLVCSVPGEDGIETHFDELQDVFVQQTQDVRNPVIYAVFTSSGSVFRGSAVCVYSMADIRMVFNGPFAHKEGPNYQWMPFSGKMPYPRPGTCPGGTFTPSMKSTKDYPDEVINFMRSHPLMYQAVYPLQRRPLVVRTGAPYRLTTIAVDQVDAADGRYEVLFLGTDRGTVQKVIVLPKDDQELEELMLEEVEVFKDPAPVKTMTISSKRQQLYVASAVGVTHLSLHRCQAYGAACADCCLARDPYCAWDGQACSRYTASSKRRSRRQDVRHGNPIRQCRGFNSNANKNAVESVQYGVAGSAAFLECQPRSPQATVKWLFQRDPGDRRREIRAEDRFLRTEQGLLLRALQLSDRGLYSCTATENNFKHVVTRVQLHVLGRDAVHAALFPPLSMSAPPPPGAGPPTPPYQELAQLLAQPEVGLIHQYCQGYWRHVPPSPREAPGAPRSPEPQDQKKPRNRRHHPPDT

SEQ ID NO: 13356 - protein, 434 aa, Homo sapiens
MVQDGTFKTRDSTWTCESTRMAAAPPSYCFVAFPPRAKDGLVVFGKNSARPRDEVQEVVYFSAADHEPESKVECTYISIDQVPRTYAIMISRPAWLWGAEMGANEHGVCIANEAINTREPAAEIEALLGMDLVRLGLERGETAKEALDVIVSLLEEHGQGGNYFEDANSCHSFQSAYLIVDRDEAWVLETIGKYWAAEKVTEGVRCICSQLSLTTKMDAEHPELRSYAQSQGWWTGEGEFNFSEVFSPVEDHLDCGAGKDSLEKQEESITVQTMMNTLRDKASGVCIDSEFFLTTASGVSVLPQNRSSPCIHYFTGTPDPSRSIFKPFIFVDDVKLVPKTQSPCFGDDDPAKKEPRFQEKPDRRHELYKAHEWARAIIESDQEQGRKLRSTMLELEKQGLEAMEEILTSSEPLDPAEVGDLFYDCVDTEIKFFK

SEQ ID NO: 13357 - protein, 1054 aa, Homo sapiens
FKMQDYNKDDMSYRRISAVEPKTALPFNRFLPNKSRQPSYVPAPLRKKKPDKHEDNRRSWASPVYTEADGTFSSQFLLLQALQTYSDDILSSETHTKIDPTSGPRLITRRKNLSYAPGYRRDDLEMAALDPDLENDDFFVRKTGAFHANPYVLRAFEDFRKFSEQDDSVERDIILQCREGELVLPDLEKDDMIVRRIPAQKKEVPLSGAPDRYHPVPFPEPWTLPPEIQAKFLCVLERTCPSKEKSNSCRILVPSYRQKKDDMLTRKIQSWKLGTTVPPISFTPGPCSEADLKRWEAIREASRLRHKKRLMVERLFQKIYGENGSKSMSDVSAEDVQNLRQLRYEEMQKIKSQLKEQDQKWQDDLAKWKDRRKSYTSDLQKKKEEREEIEKQALEKSKRSSKTFKEMLQDRESQNQKSTVPSRRRMYSFDDVLEEGKRPPTMTVSEASYQSERVEEKGATYPSEIPKEDSTTFAKREDRVTTEIQLPSQSPVEEQSPASLSSLRSRSTQMESTRVSASLPRSYRKTDTVRLTSVVTPRPFGSQTRGISSLPRSYTMDDAWKYNGDVEDIKRTPNNVVSTPAPSPDASQLASSLSSQKEVAATEEDVTRLPSPTSPFSSLSQDQAATSKATLSSTSGLDLMSESGEGEISPQREVSRSQDQFSDMRISINQTPGKSLDFGFTIKWDIPGIFVASVEAGSPAEFSQLQVDDEIIAINNTKFSYNDSKEWEEAMAKAQETGHLVMDVRRYGKAGSPETKWIDATSGIYNSEKSSNLSVTTDFSESLQSSNIESKEINGIHDESNAFESKASESISLKNLKRRSQFFEQGSSDSVVPDLPVPTISAPSRWVWDQEEERKRQERWQKEQDRLLQEKYQREQEKLREEWQRAKQEAERENSKYLDEELMVLSSNSMSLTTREPSLATWEATWSEGSKSSDREGTRAGEEERRQPQEEVVHEDQGKKPQDQLVIERERKWEQQLQEEQEQKRLQAEAEEQKRPAEEQKRQAEIERETSVRIYQYRRPVDSYDIPKTEEASSGFLPGDRNKSRSTTELDDYS

SEQ ID NO: 13358 - protein, 859 aa, Homo sapiens
MDFTLGDWEQLGLEQGDTFWDTALDNCQDLFLLDPPRPNLTSHPDGSEDLEPLAGGSPEATSPDVTETKNSPLMEDFFEEGFSQEIIEMLSKDGFWNSNFGEACIEDTWLDSLLGDPESLLRSDIATNGESPTECKSHELKRGLSPVSTVSTGEDSMVHNVSEKTLTPAKSKEYRGEFFSYSDHSQQDSVQEGEKPYQCSECGKSFSGSYRLTQHWITHTREKPTVHQECEQGFDRNASLSVYPKTHTGYKFYVCNEYGTTFSQSTYLWHQKTHTGEKPCKSQDSDHPPSHDTQPGEHQKTHTDSKSYNCNECGKAFTRIFHLTRHQKIHTRKRYECSKCQATFNLRKHLIQHQKTHAAKTTSECQECGKIFRHSSLLIEHQALHAGEEPYKCNERGKSFRHNSTLKIHQRVHSGEKPYKCSECGKAFHRHTHLNEHRRIHTGYRPHKCQECVRSFSRPSHLMRHQAIHTAEKPYSCAECKETFSDNNRLVQHQKMHTVKTPYECQECGERFICGSTLKCHESVHAREKQGFFVSGKILDQNPEQKEKCFKCNKCEKTFSCSKYLTQHERIHTRGVKPFECDQCGKAFGQSTRLIHHQRIHSRVRLYKWGEQGKAISSASLIKLQSFHTKEHPFKCNECGKTFSHSAHLSKHQLIHAGENPFKCSKCDRVFTQRNYLVQHERTHARKKPLVCNECGKTFRQSSCLSKHQRIHSGEKPYVCDYCGKAFGLSAELVRHQRIHTGEKPYVCQECGKAFTQSSCLSIHRRVHTGEKPYRCGECGKAFAQKANLTQHQRIHTGEKPYSCNVCGKAFVLSAHLNQHLRVHTQETLYQCQRCQKAFRCHSSLSRHQRVHNKQQYCL

SEQ ID NO: 13359 - protein, 292 aa, Homo sapiens
SVSPAATCGQPVWSEEHPMEGPAHLTLNSEVGSLLFSEGGAGRGGAGDVHQPTKGKEEFVATFKGNEFFCYDLSHNPIQSSTDEITLAFRTLQRNGLMLHTGKSADYVNLSLKSGAVWLVINLGSGAFEALVEPVNGKFNDNAWHDVRVTRNLRQVTISVDGILTTTGYTQEDYTMLGSDDFFYIGGSPNTADLPGSPVSNNFMGCLKDVVYKNNDFKLELSRLAKEGDPKMKLQGDLSFRCEDVAALDPVTFESPEAFVALPRWSAKRTGSISLDFRTTEPNGLLLFSQGR

SEQ ID NO: 13360 - protein, 366 aa, Homo sapiens
MATSQYFDFAQGGGPQYSAQPPTLPLPTVGASYTAQPTPGMDPAVNPAFPPAAPAGYGGYQPHSGQDFAYGSRPQEPVPTATTMATYQDSYSYGQSAAARSYEDRPYFQSAALQSGRMTAADSGQPGTQEACGQPSPHGSHSHAQPPQQAPIVESGQPASTLSSGYTYPTATGVQPESSASIVTSYPPPSYNPTCTAYTAPSYPNYDASVYSAASPFYPPAQPPPPPGPPQQLPPPPAPAGSGSSPRADSKPPLPSKLPRPKAGPRQLQLHYCDICKISCAGPQTYREHLGGQKHRKKEAAQKTGVQPNGSPRGVQAQLHCDLCAVSCTGADAYAAHIRGSKHQKGLLSHRQQAADPSGGNQPNLN

SEQ ID NO: 13361 - protein, 435 aa, Homo sapiens
MSASAVYVLDLKGKVLICRNYRGDVDMSEVEHFMPILMEKEEEGMLSPILAHGGVRFMWIKHNNLYLVATSKKNACVSLVFSFLYKVVQVFSEYFKELEEESIRDNFVIIYELLDELMDFGYPQTTDSKILQEYITQEGHKLETGAPRPPATVTNAVSWRSEGIKYRKNEVFLDVIESVNLLGKYPGVGWLGHTVSANGNVLRSEIVGSIKMRVFLSGMPELRLGLNDKVLFDNTGRGKSKSVELEDVKFHQCVRLSRFENDRTISFIPPDGEFELMSYRLNTHVKPLIWIESVIEKHSHSRIEYMIKAKSQFKRRSTANNVEIHIPVPNDADSPKFKTTVGSVKWVPENSEIVWSIKSFPGGKEYLMRAHFGLPSVEAEDKEGKPPISVKFEIPYFTTSGIQVRYLKIIEKSGYQALPWVRYITQNGDYQLRTQ

SEQ ID NO: 13362 - protein, 489 aa, Homo sapiens
MALNSGSPPAIGPYYENHGYQPENPYPAQPTVVPTVYEVHPAQYYPSPVPQYAPRVLTQASNPVVCTQPKSPSGTVCTSKTKKALCITLTLGTFLVGAALAAGLLWKFMGSKCSNSGIECDSSGTCINPSNWCDGVSHCPGGEDENRCVRLYGPNFILQVYSSQRKSWHPVCQDDWNENYGRAACRDMGYKNNFYSSQGIVDDSGSTSFMKLNTSAGNVDIYKKLYHSDACSSKAVVSLRCIACGVNLNSSRQSRIVGGESALPGAWPWQVSLHVQNVHVCGGSIITPEWIVTAAHCVEKPLNNPWHWTAFAGILRQSFMFYGAGYQVEKVISHPNYDSKTKNNDIALMKLQKPLTFNDLVKPVCLPNPGMMLQPEQLCWISGWGATEEKGKTSEVLNAAKVLLIETQRCNSRYVYDNLITPAMICAGFLQGNVDSCQGDSGGPLVTSKNNIWWLIGDTSWGSGCAKAYRPGVYGNVMVFTDWIYRQMR

SEQ ID NO: 13363 - protein, 950 aa, Homo sapiens
MLSLDPSGPEWDCPLGSKDLEEEGPWGGGSGLPPTGCFPGSWRQDVGLDCKGSPEGAEARAWTVYYYSLLQSCLQQAGLPETQDRGQVPRTGCPGAEVTLCVLGSPSTFLPVLLEGGVQSPGNMLLCLSPAWLMKVPAPGQPGEAALLVSKAVSFHPGGLTFLDDFVPPRRATYFLAGLGLGPGRGREAAELARDLTCPTGASAELARLLEDRLLTRQLLAQQGGVAVPATLAFTYKPPGLLRGGDASLGLRLVELSGKEGQETLVKEEVEAFLRSEALGDILQVAVKLSGWRWRGRQAWRLHPRAELGAVVDTVLALLEKLEEEESVLVEAVYPPAQLPCSDGPSPGPGLAVRICAVVCRTQGDRPLLSKVVCGVGRGDRPLRHHNSLPRTLEVALAQCGLGEEAQVAAVRQRVKAAAEAALAAVLALEAGLSAEQRGGRRAHTDFLGVDFALTAAGGVLTPVALELNGGLCLEACGALEGLWAAPRLGPAADEAVAAPLVETMLRRSARCLMEGKQLLVVGAGGVSKKFVWEAARDYGLQLHLVESDPNHFASQLVQTFIHFDMTEHRRDEENARLLAELVRARGLKLDGCFSYWDDCLVLTALLCQELGLPCSSPAAMRLAKQKSLTQLHLLHHHGPPWPAPSLHAVPCCPLESEADVERAVHQVPLPGVMKLEFGAGAVGVRLVEDAPQCHEHFSRITRDLQGEADHPGIGLGWGNAMLLMEFVEGTEHDVDLVLFGGRLLAAFVSDNGPTRLPGFTETAACMPTGLAPEQEAQMVQAAFRCCLGCGLLDGVFNVELKLTGAGPRLIEINPRMGGFYLRDWILELYGVDLLLAAVMVACGLRPALPTRPRARGHLVGVMCLVSQHLQALSSTASRETLQALHDRGLLRLNLLEEALVPGEYEEPYCSVACAGPSPTEARLRLLGLCQGLGIDGPSYPVAHFLSHFK

SEQ ID NO: 13364 - protein, 3197 aa, Homo sapiens
MEIRLEILTSTGIKQKKPWPRVSWLGKEKEAVFLLDDKFINEINLLSGKIKKKIPSLQPFLKDVIVLTTSSNDAWLAGVLTTGELFLWNKDQDCLKTIPITEKPKEMIKATVASSLRLYLYVSGNGKRIVLITPSGCIFLWEYLELKNILSSKSLSLAGRWSQVIPEEAVLLPSTEDKEAVVNAVFIKNELFGDCCLCSFTFYSGECLKLTFLAIRWHENVFTSVRSLPYHVHWAQQDCHLCSLIPKCESVKSRGALISAFSRDGLTLAVTLNQKDPKATQVLFINTLNFVTLCGSLKGCSNKSPVVPATLIRSYWVGDISWTHDSLFLACMLKRGSLVLLTCQGELLTLITFGCSIEFGPAEFIPLHPLITYRPQQFTFQDSNNSVDSSASDSDPMRQRFSIKAHSRLPYLVISDGYMVTTLRFLDSLSPSVHMRSLLLDSTQRLEKIYQSVILSKPKGKGLNLRSLNSLRSSLLEHQGNESSADFTVPKFLQAEETINENAADFQDFEAEETNEGRHFPDNLCPFWNKRDDVLCSSMKEGRLEFASMFDTIHAKDDSEETDRTITELHSIQKSLLAAWTIGISKTVTEKNLMLNYIVVCITHFFYILQFIKCPFPKLDLVLSKSSRHNAWILCIFQLFHQCLSIHYWDIRYKQDVGHLIKLTSNTVKLLLTQQQKGQLFSEKLLACFYLLKMVADNLNGVYILQPEVISASADGSKITAQDSLVVPIFQMFQDSGFQKNWSWNSFFKIHPQVVNPVQQPGHRLLILWRILYKKTLWYQAQLNRRVPEADSQLTEKMTHEASTVKSLLCHLQANLQSTGDCLNQTLELKSINGEECFLLGSYEKSVQLWKKALQEIEEKGGRRTYFLQIRYYLSLLYCHLYSYNLNDAQGLCDQLAREILRWSQLPVKENKDFSGAAKSHFECGMVGGVHPEAAVRVVQSMARFMAAYFTNQQLCILPPHHVNVLPPLHIKTEQSFRLIPLQHSKVASVVRDQNLSNVWTVEYALELLFIGGLVPEAVWLAYKLGDWKTSVSIGVAFQLFCKRDSNFMRSKKKSLNLPLRMTPAQIFQEKLQCVLGQPASLEAKNEMGSKYKQFTDPIEEEDANLLFGSVQEVLKASVMADADILSETFQLLIDSAKDFSKRLWGLVPFGLYLPAPPLYCPQPAILSEEDGDDLLLKAEKNNRQKVSGILQRVLLLFRAAQCSFPVAQWYILQLRWARKVMQKIRMKGSLPSLSPFPQSLLNYCKGGIAFFRPGAAGDHKLDEVSIRAIGCFRELCALCWMLHVRDKLSYSCRQYQKARENVKGEKDLEVEFDSCMIEHCLSAVEWAYRMLPFSRFFNMEELIQDIILSLIGELPPIRKVAEIFVKAFPYPEDVRVPLRDKYHSLHQRLRHCVVKGPQTEEMMSVVMHSIQKVRVKALKRVQRNIGSFEVNIWEPIEEEKPDEAPGVDRYSLGTSLSRSTLTELGDSVVHSDADTFSEALSVEEKSRINIYQRNAPNHMELTSIHKPTDKRKMCNQKENPTKKEDHEKLSQNTLPVIGVWEFERDDDEYIKFLDLFLSYILERDLPYSRDADIPFLTSFSGKLREHELNSLLFDVHTTLKRHQSKTKSQNVFRAGSCFVVAPESYESEKSSSLNDEYGMHLENQKLSSSVLVNQGIKPFLQYPSNEVNKNEGMSGLFGLKQRSIYKIQDDTREKCLIQRSSNHIFWTPKSIKTRRCIFKAIQCNDINPQEDLPLALNTFGSIGRLLEWMIRWSNRRLLCDSGITESSSEYSPVIRVKTSTAAILTSLWLLEQPYFATYKAKNAIIKMVENRDTGCQIGPNIERESKSDAGGSVAVATPGGTEERNGQNKSCQNILNRMPTEAKNPDIKEINDDIISITHNTKKEFIDIDENLLEVEAFTEEEMDMHISDYEEDIEESVGGFRSPSLAICMMTLPQQLEEEFTEEVQCQREEPLETIMEEKSTEQKGMIEAFSHPGHTTPQSMQVDTSSEISSAQISTYKEKSSSVPLLISNGVNVASQPPAPTPQKTQRNEFTAQLPDCSESVRQMLQDEMFKLVQLQQINFMSLMQIVGSSFANLPDTQQLVQQSQSVHLGESQESNLRGCGDVEDSNKNLKERFFIKPQSMGENAREPRKNSPHCHEGTIPSGQNSTGNVQNVPHGSIPLCQLNGQPRKKGPIPSSQNLPSTSFYPAPAGNTHLYLLSTPSVVQKAPRLIPHAKTFSPGDGFPLLQFKSKQEFQPLFLHTGSIPQVPFRPLPQPREAWGLSDSFQPALPQRAAQTTPASHLNVSQYNTEARKKEVEQKTWAETVITEIPNHVNLDQYVGQENLTPQQDSSVFIKPEKLFDVKPGTLEISPHHSFGLPLLYLPLKPPNMFPSTSRASITVPSTPIQPIAEERKYPRLSLLHSHLSPENRCKKTQLIPLENLIAFKQSQQKLTHNLFEQGDAGHLQLLKVKIEPPEVRQGKDSKKRQRRRAEKELQEKRCEKLRRKPNVTFRPENSIINNDDSEIIKKPKEQQEHCGSHPLDDFDVPFEMLQDDNTSAGLHFMASVKKKAIGSQDASTNTDPEHEPLTAPQLLVPDVYLNLKLSSEMSEKPWSPSIPHTVTNLELPVREEPSNDNVIKQQSDHLAVPSSAELHYMAASVTNAVPPHNFKSQGLPKPEFRFKGQSTKSDSAEDYLLWKRLQGVSAACPAPSSAAHQLEHLSAKLQKIDEQLLAIQNIAENIEQDFPKPEMLDLHCDKIGPVDHIEFSSGPEFKKTLASKTISISEEVRFLTHMDEEDQSDKKETSEPEFSITENYSGQKTCVFPTADSAVSLSSSSDQNTTSPGMNSSDELCESVSVHPLQMTGLTDIADIIDDLIIKDGVSSEELGLTEQAMGTSRIQHYSGRHSQRTDKERREIQAWMKRKRKERMAKYLNELAEKRGQEHDPFCPRSNPLYMTSREIRLRQKMKHEKDRLLLSEHYSRRISQAYGLMNELLSESVQLPTLPQKPLPNKPSPTQSSSCQHCPSPRGENQHGHSFLINRPGKVKYMSKPSYIHKRKSFGQPQGSPWPHGTATFTIQKKAGGAKAAVRKATQSPVTFQKGSNAPCHSLQHTKKHGSAGLAPQTKQVCVEYEREETVVSPWTIPSEIHKILHESHNSLLQDLSPTEEEEPEHPFGVGGVDSVSESTGSILSKLDWNAIEDMVASVEDQGLSVHWALDL

SEQ ID NO: 13365 - protein, 473 aa, Homo sapiens
MDHAEENEILAATQRYYVERPIFSHPVLQERLHTKDKVPDSIADKLKQAFTCTPKKIRNIIYMFLPITKWLPAYKFKEYVLGDLVSGISTGVLQLPQGLAFAMLAAVPPIFGLYSSFYPVIMYCFLGTSRHISIGPFAVISLMIGGVAVRLVPDDIVIPGGVNATNGTEARDALRVKVAMSVTLLSGIIQFCLGVCRFGFVAIYLTEPLVRGFTTAAAVHVFTSMLKYLFGVKTKRYSGIFSVVYSTVAVLQNVKNLNVCSLGVGLMVFGLLLGGKEFNERFKEKLPAPIPLEFFAVVMGTGISAGFNLKESYNVDVVGTLPLGLLPPANPDTSLFHLVYVDAIAIAIVGFSVTISMAKTLANKHGYQVDGNQELIALGLCNSIGSLFQTFSISCSLSRSLVQEGTGGKTQLAGCLASLMILLVILATGFLFESLPQTIWLTTFVSSLFLGLDYGLITAVIIALLTVIYRTQR

SEQ ID NO: 13366 - protein, 268 aa, Homo sapiens
MKQILHPALETTDPCSTGFVFPAMTLFPVLLFLVAGLLPSFPANEDKDPAFTALLTTQTQVQREIVNKHNELRRAVSPPARNMLKMEWNKEAAANAQKWANQCNYRHSNPKDRMTSLKCGENLYMSSASSSWSQAIQSWFDEYNDFDFGVGPKTPNAVVGHYTQVVWYSSYLVGCGNAYCPNQKVLKYYYVCQYCPAGNWANRLYVPYEQGAPCASCPDNCDDGLCTNGCKYEDLYSNCKSLKLTLTCKHQLVRDSCKASCNCSNSIY

SEQ ID NO: 13367 - protein, 199 aa, Homo sapiens
MAPPQVLAFGLLLAAATATFAAAQEGEARIGAELWSWAGLGGSGPRPSAPETGIIGRGPRGRAFQRGDRTVRPCSGSGPPRGRKRRGPSRGAASLRSFARLECVCENYKLAVNCFVNNNRQCQCTSVGAQNTVICSKLAAKCLVMKAEMNGSKLGRRAKPEGALQNNDGLYDPDCDESGLFKAKQCNGTSMCWCVNTAG

SEQ ID NO: 13368 - protein, 275 aa, Homo sapiens
MAKERCLKKSFQDSLEDIKKRMKEKRNKNLAEIGKRRSFIAAPCQIITNTSTLLKNYQDNNKMLVLALENEKSKVKEAQDIILQLRKECYYLTCQLYALKGKLTSQQTVEPAQNQEICSSGMDPNSDDSSRNLFVKDLPQIPLEETELPGQGESFQIEDQIPTIPQDTLGVDFDSATPPETQQSPHLSLKDITNVSLYPVVKIRRLSLSPKKNKASPAVALPKRRCTASVNYKEPTLASKLRRGDPFTDLCFLNSPIFKQKKDLRRSKKSMKQIQ

SEQ ID NO: 13369 - protein, 334 aa, Homo sapiens
MMKPRPKRFIAKPCALCIGIEDSGPYQAQPNAILEKVFISITKYPDKKRLEGLSKQLDWNVRKIQCWFRHRRNQDKPPTLTKFCESMWRFTFYLCIFCYGIRFLWSSPWFWDIRQCWHNYPFQPLSSGLYHYYIMELAFYWSLMFSQFTDIKRKDFLIMFVHHLVTIGLISFSYINNMVRVGTLIMCLHDVSDFLLEAAKLANYAKYQRLCDTLFVIFSAVFMVTRLGIYPFWILNTTLFESWEIIGPYASWWLLNGLLLTLQLLHVIWSYLIARIALKALIRGKVSKDDRSDVESSSEEEDVTTCTKSPCDSSSSNGANRVNGHMGGSYWAEE

SEQ ID NO: 13370 - protein, 311 aa, Homo sapiens
MSNASLLTAFILMGLPHAPALDAPLFGVFLVVYVLTVLGNLLILLVIRVDSHLHTTMYYFLTNLSFIDMWFSTVTVPKLLMTLVFPSGRAISFHSCMAQLYFFHFLGGTECFLYRVMSCDRYLAISYPLRYTSMMTGRSCTLLATSTWLSGSLHSAVQAILTFHLPYCGPNWIQHYLCDAPPILKLACADTSAIETVIFVTVGIVASGCFVLIVLSYVSIVCSILRIRTSEGKHRAFQTCASHCIVVLCFFGPGLFIYLRPGSRKAVDGVVAVFYTVLTPLLNPVVYTLRNKEVKKALLKLKDKVAHSQSK

SEQ ID NO: 13371 - protein, 765 aa, Homo sapiens
KEVTKHVSDTNYKKKFVKEKGKSNYSIMLEPPEVKHAMEVAKKQSDVAYRKDAKENLHYTTVADRPDIKKATQAAKQASEVEYRAKHRKEGSHGLSMLGRPDIEMAKKAAKLSSQVKYRENFDKEKGKTPKYNPKDSQLYKVMKDANNLASEVKYKADLKKLHKPVTDMKESLIMNHVLNTSQLASSYQYKKKYEKSKGHYHTIPDNLEQLHLKEATELQSIVKYKEKYEKERGKPMLDFETPTYITAKESQQMQSGKEYRKDLEESIRGKGLTEMEDTPDMLRAKNATQILNEKEYKRDLELEVKGRGLNAMANETPDFMRARNATDIASQIKYKQSAEMEKANFTSVVDTPEIIHAQQVKNLSSQKKYKEDAEKSMSYYETVLDTPEIQRVRENQKNFSLVLYKEDVSPGTAIGKTPEMMRVKQTQDHISSVKYKEAIGQGTPIPDLPEVKRVKETQKHISSVLYKENVGKATATPVTPEMQRVKRNQENISSVLYSDSFRKQIQGKAAYVLDTPEMRRVRETQRHISTVKYHEDFEKHKGCFTPVVTDPITERVKKNMQDFSDINYRGIQRKVVEMEQKRNDQDQETITGLRVWRTNPGSVFDYDPAEDNIQSRSLHMINVQAQRRSREQSRSASALSISGGEEKSEHSEAPDHHLSTYSDGGVFAVSTAYKHAKTTELPQQRSSSVATQQTTVSSIPSHPSTAGKIFRAMYDYMAADADEVSFKDGDAIINVQAIDEGWMYGTVQRTGRTGMLPANYVEAI

SEQ ID NO: 13372 - protein, 141 aa, Homo sapiens
ALPEVRHPLCLQQHPQDSLPTASVILCFHDEAWSTLLRTVHSILDTVPRAFLKEIILVDDLSQQGSHGFPPGSSGTTQVCSQRICGQAGGGEVTQEQQEAGCHQGPDAGGHQSHRGCARLHGCPLRVPPRLAGAPPQQNSW

SEQ ID NO: 13373 - protein, 390 aa, Homo sapiens
MRTRTGSQLAAREVTGSGAVPRQLEGRRCQAGRDANGGTSSDGSSSMAAIYGGVEGGGTRSEVLLVSEDGKILAEADGLSTNHWLIGTDKCVERINEMVNRAKRKAGVDPLVPLRSLGLSLSGGDQEDAGRILIEELRDRFPYLSESYLITTDAAGSIATATPDGGVVLISGTGSNCRLINPDGSESGCGGWGHMMGDEGSAYWIAHQAVKIVFDSIDNLEAAPHDIGYVKQAMFHYFQVPDRLGILTHLYRDFDKCRFAGFCRKIAEGAQQGDPLSRYIFRKAGEMLGRHIVAVLPEIDPVLFQGKIGLPILCVGSVWKSWELLKEGFLLALTQGREIQAQNFFSSFTLMKLRHSSALGGASLGARHIGHLLPMDYSANAIAFYSYTFS

SEQ ID NO: 13374 - protein, 467 aa, Homo sapiens
MEHRIVGPGPYRATRLWNETVELFRAKMPLRKHRCRFKSYEHCFTAAEAVDWLHELLRCSQNFGPEVTRKQTVQLLKKFLKNHVIEDIKGKWGEEDFEDNRHLYRFPPSSPLKPYPKKPPNQKDVIKFPEWNDLPPGTSQENIPVRPVVMNSEMWYKRHSIAIGEVPACRLVHRRQLTEANVEEIWKSMTLSYLQKILGLDSLEEVLDVKLVNSKFIIHNVYSVSKQGVVILDDKSKELPHWVLSAMKCLANWPNCSDLKQPMYLGFEKDVFKTIADYYGHLKEPLLTFHLFDAFVSVLGLLQKEKVAVEAFQICCLLLPPENRRKLQLLMRMMARICLNKEMPPLCDGFGTRTLMVQTFSRCILCSKDEVDLDELLAARLVTFLMDNYQEILKVPLALQTSIEERVAHLRRVQFQKSYPEVYQERFPTPESAALLFPEKPKPKPQLLMWALKKPFQPFQRTRSFRM

SEQ ID NO: 13375 - protein, 1438 aa, Homo sapiens
MQRSPLEKASVVSKLFFSWTRPILRKGYRQRLELSDIYQIPSVDSADNLSEKLEREWDRELASKKNPKLINALRRCFFWRFMFYGIFLYLGEVTKAVQPLLLGRIIASYDPDNKEERSIAIYLGIGLCLLFIVRTLLLHPAIFGLHHIGMQMRIAMFSLIYKKGLALAHFVWIAPLQVALLMGLIWELLQASAFCGLGFLIVLALFQAGLGRMMMKYRDQRAGKISERLVITSEMIENIQSVKAYCWEEAMEKMIENLRQTELKLTRKAAYVRYFNSSAFFFSGFFVVFLSVLPYALIKGIILRKIFTTISFCIVLRMAVTRQFPWAVQTWYDSLGAINKIQDFLQKQEYKTLEYNLTTTEVVMENVTAFWEEGFGELFEKAKQNNNNRKTSNGDDSLFFSNFSLLGTPVLKDINFKIERGQLLAVAGSTGAGKTSLLMVIMGELEPSEGKIKHSGRISFCSQFSWIMPGTIKENIIFGVSYDEYRYRSVIKACQLEEDISKFAEKDNIVLGEGGITLSGGQRARISLARAVYKDADLYLLDSPFGYLDVLTEKEIFESCVCKLMANKTRILVTSKMEHLKKADKILILHEGSSYFYGTFSELQNLQPDFSSKLMGCDSFDQFSAERRNSILTETLHRFSLEGDAPVSWTETKKQSFKQTGEFGEKRKNSILNPINSIRKFSIVQKTPLQMNGIEEDSDEPLERRLSLVPDSEQGEAILPRISVISTGPTLQARRRQSVLNLMTHSVNQGQNIHRKTTASTRKVSLAPQANLTELDIYSRRLSQETGLEISEEINEEDLKECFFDDMESIPAVTTWNTYLRYITVHKSLIFVLIWCLVIFLAEVAASLVVLWLLGNTPLQDKGNSTHSRNNSYAVIITSTSSYYVFYIYVGVADTLLAMGFFRGLPLVHTLITVSKILHHKMLHSVLQAPMSTLNTLKAGGILNRFSKDIAILDDLLPLTIFDFIQLLLIVIGAIAVVAVLQPYIFVATVPVIVAFIMLRAYFLQTSQQLKQLESEGRSPIFTHLVTSLKGLWTLRAFGRQPYFETLFHKALNLHTANWFLYLSTLRWFQMRIEMIFVIFFIAVTFISILTTGEGEGRVGIILTLAMNIMSTLQWAVNSSIDVDSLMRSVSRVFKFIDMPTEGKPTKSTKPYKNGQLSKVMIIENSHVKKDDIWPSGGQMTVKDLTAKYTEGGNAILENISFSISPGQRVGLLGRTGSGKSTLLSAFLRLLNTEGEIQIDGVSWDSITLQQWRKAFGVIPQKVFIFSGTFRKNLDPYEQWSDQEIWKVADEVGLRSVIEQFPGKLDFVLVDGGCVLSHGHKQLMCLARSVLSKAKILLLDEPSAHLDPVTYQIIRRTLKQAFADCTVILCEHRIEAMLECQQFLVIEENKVRQYDSIQKLLNERSLFRQAISPSDRVKLFPHRNSSKCKSKPQIAALK

SEQ ID NO: 13376 - protein, 226 aa, Homo sapiens
SQEETKERRHSHTIGGLPESDDQSELPSPPALPMSLSAKGQLTNIVHGSVLSLASSASSTYSSQIRKLRRELESSQEKVATLTSQLSANANLVAAFEQSLVNMTSRLRHLAETAEEKDTELLDLRETIDFLKKKNSEAQAVIQGALNASETTPKELRIKRQNSSDSISSLNSITSHSSIGSSKDADAKKKKKKSWLRSSFNKAFSIKKGPKSASSYSDIEEIATPD

SEQ ID NO: 13377 - protein, 225 aa, Homo sapiens
MAGAATQASLESAPRIMRLVAECSRSRARAGELWLPHGTVATPVFMPVGTQATMKGITTEQLDALGCRICLGNTYHLGLRPGPELIQKANGLHGFMNWPHNLLTDSGGFQMVSLVSLSEVTEEGVRFRSPYDGNETLLSPEKSVQIQNALGSDIIMQLDDVVSSTVTGPRVEEAMYRPLGLVTGALLQVNPLAGPVHCSPSAAGQAEPLRHYPGWAGRRSPGHLP

SEQ ID NO: 13378 - protein, 639 aa, Homo sapiens
MLLPLLLSSLLGGSQAMDGRFWIRVQESVMVPEGLCISVPCSFSYPRQDWTGSTPAYGYWFKAVTETTKGAPVATNHQSREVEMSTRGRFQLTGDPAKGNCSLVIRDAQMQDESQYFFRVERGSYVRYNFMNDGFFLKVTVLSFTPRPQDHNTDLTCHVDFSRKGVSAQRTVRLRVAYAPRDLVISISRDNTPALEPQPQGNVPYLEAQKGQFLRLLCAADSQPPATLSWVLQNRVLSSSHPWGPRPLGLELPGVKAGDSGRYTCRAENRLGSQQRALDLSVQYPPENLRVMVSQANRTVLENLGNGTSLPVLEGQSLCLVCVTHSSPPARLSWTQRGQVLSPSQPSDPGVLELPRVQVEHEGEFTCHARHPLGSQHVSLSLSVHYSPKLLGPSCSWEAEGLHCSCSSQASPAPSLRWWLGEELLEGNSSQDSFEVTPSSAGPWANSSLSLHGGLSSGLRLRCEAWNVHGAQSGSILQLPDKKGLISTAFSNGAFLGIGITALLFLCLALIIMKILPKRRTQTETPRPRFSRHSTILDYINVVPTAGPLAQKRNQKATPNSPRTPLPPGAPSPESKKNQKKQYQLPSFPEPKSSTQAPESQESQEELHYATLNFPGVRPRPEARMPKGTQADYAEVKFQ

SEQ ID NO: 13379 - protein, 438 aa, Homo sapiens
MNKLYIGNLNESVTPADLEKVFAEHKISYSGQFLVKSGYAFVDCPDEHWAMKAIETFSGKVELQGKRLEIEHSVPKKQRSRKIQIRNIPPQLRWEVLDSLLAQYGTVENCEQVNTESETAVVNVTYSNREQTRQADEVPLKILAHNNFVGRLIGKEGRNLKKVEQDTETKITISSLQDLTLYNPERTITVKGAIENCCRAEQEIMKKVREAYENDVAAMSLQSHLIPGLNLAAVGLFPASSSAVPPPPSSVTGAAPYSSFMQAPEQEMVQVFIPAQAVGAIIGKKGQHIKQLSRFASASIKIAPPETPDSKVRMVIITGPPEAQFKAQGRIYGKLKEENFFGPKEEVKLETHIRVPASAAGRVIGKGGKTVNELQNLTAAEVVVPRDQTPDENDQVIVKIIGHFYASQMAQRKIRDILAQVKQQHQKGQSNQAQARRK

SEQ ID NO: 13380 - protein, 1447 aa, Homo sapiens
MENSLRCVWVPKLAFVLFGASLFSAHLQVTGFQIKAFTALRFLSEPSDAVTMRGGNVLLDCSAESDRGVPVIKWKKDGIHLALGMDERKQQLSNGSLLIQNILHSRHHKPDEGLYQCEASLGDSGSIISRTAKVAVAGPLRFLSQTESVTAFMGDTVLLKCEVIGEPMPTIHWQKNQQDLTPIPGDSRVVVLPSGALQISRLQPGDIGIYRCSARNPASSRTGNEAEVRILSDPGLHRQLYFLQRPSNVVAIEGKDAVLECCVSGYPPPSFTWLRGEEVIQLRSKKYSLLGGSNLLISNVTDDDSGMYTCVVTYKNENISASAELTVLVPPWFLNHPSNLYAYESMDIEFECTVSGKPVPTVNWMKNGDVVIPSDYFQIVGGSNLRILGVVKSDEGFYQCVAENEAGNAQTSAQLIVPKPAIPSSSVLPSAPRDVVPVLVSSRFVRLSWRPPAEAKGNIQTFTVFFSREGDNRERALNTTQPGSLQLTVGNLKPEAMYTFRVVAYNEWGPGESSQPIKVATQPELQVPGPVENLQAVSTSPTSILITWEPPAYANGPVQGYRLFCTEVSTGKEQNIEVDGLSYKLEGLKKFTEYSLRFLAYNRYGPGVSTDDITVVTLSDVPSAPPQNVSLEVVNSRSIKVSWLPPPSGTQNGFITGYKIRHRKTTRRGEMETLEPNNLWYLFTGLEKGSQYSFQVSAMTVNGTGPPSNWYTAETPENDLDESQVPDQPSSLHVRPQTNCIIMSWTPPLNPNIVVRGYIIGYGVGSPYAETVRVDSKQRYYSIERLESSSHYVISLKAFNNAGEGVPLYESATTRSITDPTDPVDYYPLLDDFPTSVPDLSTPMLPPVGVQAVALTHDAVRVSWADNSVPKNQKTSEVRLYTVRWRTSFSASAKYKSEDTTSLSYTATGLKPNTMYEFSVMVTKNRRSSTWSMTAHATTYEAAPTSAPKDLTVITREGKPRAVIVSWQPPLEANGKITAYILFYTLDKNIPIDDWIMETISGDRLTHQIMDLNLDTMYYFRIQARNSKGVGPLSDPILFRTLKVEHPDKMANDQGRHGDGGYWPVDTNLIDRSTLNEPPIGQMHPPHGSVTPQKNSNLLVIIVVTVGVITVLVVVIVAVICTRRSSAQQRKKRATHSAGKRKGSQKDLRPPDLWIHHEEMEMKNIEKPSGTDPAGRDSPIQSCQDLTPVSHSQSETQLGSKSTSHSGQDTEEAGSSMSTLERSLAARRAPRAKLMIPMDAQSNNPAVVSAIPVPTLESAQYPGILPSPTCGYPHPQFTLRPVPFPTLSVDRGFGAGRSQSVSEGPTTQQPPMLPPSQPEHSSSEEAPSRTIPTACVRPTHPLRSFANPLLPPPMSAIEPKVPYTPLLSQPGPTLPKTHVKTASLGLAGKARSPLLPVSVPTAPEVSEESHKPTEDSANVYEQDDLSEQMASLEGLMKQLNAITGSAF

SEQ ID NO: 13381 - protein, 390 aa, Homo sapiens
MLLLLLLLPLLWGTKGMEGDRQYGDGYLLQVQELVTVQEGLCVHVPCSFSYPQDGWTDSDPVHGYWFRAGDRPYQDAPVATNNPDREVQAETQGRFQLLGDIWSNDCSLSIRDARKRDKGSYFFRLERGSMKWSYKSQLNYKTKQLSVFVTASTALGNGSSLSVLEGQSLRLVCAVNSNPPARLSWTRGSLTLCPSRSSNPGLLELPRVHVRDEGEFTCRAQNAQGSQHISLSLSLQNEGTGTSRPVSQVTLAAVGGAGATALAFLSFCIIFIIVRSCRKKSARPAAGVGDTGMEDAKAIRGSASQGPLTESWKDGNPLKKPPPAVAPSSGEEGELHYATLSFHKVKPQDPQGQEATDSEYSEIKIHKRETAETQACLRNHNPSSKEVRG

SEQ ID NO: 13382 - protein, 566 aa, Homo sapiens
MALPGGRHLDSVTLPGQRLHLMQVDSVQRWMEDLKLMTECECMCVLQAKPISLEEDAQGDLILAGGPGPGDPLQLLLKRGWVISTELRRIGQKLAQDRWARVHSMSVRLTCHARSMVSEYSAVSRNSLKEMGEIEKLLMEKCSELSAVTERCLQVENEHVLKSMKACVSETLSMLGQHFGQLLELALTREVQVESHSVTRLECSGAISAQCNLRLLGSSDSPASASQALVRKIDASDNIYTTESTTGNLFSLTQEGAPLCRIIAKEGGVVALFKVCRQDSFRCLYPQALRTLASICCVEEGVHQLEKVDGVLCLADILTDNSHSEATRAEAAAVVAQVTSPHLPVTQHLSSFLESMEEIVTALVKLCQEASSGEVFLLASAALANITFFDTMACEMLLQLNAIRVLLEACSDKQRVDTPYTRDQIVTILANMSVLEQCASDIIQENGVQLIMGMLSEKPRSGTPAEVAACERVQQKAAVTLARLSRDPDVAREAVRLSCMSRLIELCRSPSERNSSDAVLVACLAALRRLAGVCPEGLQDSDFQQLVQPRLVDSFLLCSNMEESFV

SEQ ID NO: 13383 - protein, 565 aa, Homo sapiens
MSDGLDNEEKPPAPPLRMNSNNRDSSALNHSSKPLPMAPEEKNKKARLRSIFPGGGDKTNKKKEKERPEISLPSDFEHTIHVGFDAVTGEFTNSPFQTSRPVTVASSQSEGKMGIPEQWARLLQTSNITKLEQKKNPQAVLDVLKFYDSKETVNNQKYMSFTSGDKSAHGYIAAHPSSTKTASEPPLAPPVSEEEDEEEEEEEDENEPPPVIAPRPEHTKSIYTRSVVESIASPAVPNKEVTPPSAENANSSTLYRNTDRQRKKSKMTDEEILEKLRSIVSVGDPKKKYTRFEKIGQGASGTVYTALDIATGQEVAIKQMNLQQQPKKELIINEILVMRENKNPNIVNYLDSYLVGDELWVVMEYLAGGSLTDVVTETCMDEGQIAAVCRECLQALDFLHSNQVIHRDIKSDNILLGMDGSVKLTDFGFCAQITPEQSKRSTMVGTPYWMAPEVVTRKAYGPKVDIWSLGIMAIEMVEGEPPYLNENPLRALYLIATNGTPELQNPERLSAVFRDFLNRCLEMDVDRRGSAKELLQHPFLKLAKPLSSLTPLIIAAKEAIKNSSR

SEQ ID NO: 13384 - protein, 469 aa, Homo sapiens
MEIKDQGAQMEPLLPTRNDEEAVVDRGGTRSILKTHFEKEDLEGHRTLFIGVHVPLGGRKSHRRHRHRGHKHRKRDRERDSGLEDGRESPSFDTPSQRVQFILGTEDDDEEHIPHDLFTELDEICWREGEDAEWRETARWLKFEEDVEDGGERWSKPYVATLSLHSLFELRSCILNGTVLLDMHANTLEEIADMVLDQQVSSGQLNEDVRHRVHEALMKQHHHQNQKKLTNRIPIVRSFADIGKKQSEPNSMDKNAGQVVSPQSAPACVENKNDVSRENSTVDFSKVDLHFMKKIPPGAEASNILVGELEFLDRTVVAFVRLSPAVLLQGLAEVPIPTRFLFILLGPLGKGQQYHEIGRSIATLMTDEVFHDVAYKAKDRNDLVSGIDEFLDQVTVLPPGEWDPSIRIEPPKNVPSQEKRKIPAVPNGTAAHGEAEPHGGHSGPELQRTGRSPISGIFASPEFFHRFCC

SEQ ID NO: 13385 - protein, 322 aa, Homo sapiens
MAVFADLDLRAGSDLKALRGLVETAAHLGYSVVAINHIVDFKEKKQEIEKPVAVSELFTTLPIVQGKSRPIKILTRLTIIVSDPSHCNVLRATSSRARLYDVVAVFPKTEKLFHIACTHLDVDLVCITVTEKLPFYFKRPPINVAIDRGLAFELVYSPAIKDSTMRRYTISSALNLMQICKGKNVIISSAAERPLEIRGPYDVANLGLLFGLSESDAKAAVSTNCRAALLHGETRKTAFGIISTVKKPRPSEGDEDCLPASKKAKWSHSVTQAGVQWHNLGSLQPLPLGLKPSSHLSLPRTRIQQRQLLISHQRDHTPKNRL

SEQ ID NO: 13386 - protein, 426 aa, Homo sapiens [sequence omitted]

SEQ ID NO: 13387 - protein, 214 aa, Homo sapiens
AGVSGPAGRGRGGEHGPQVPLSQPPEDELDRLTKKLVHDMNHPPSGEYFGQCGGCGEDVVGDGAGVVALDRVFHVGCFVCSTCRAQLRGQHFYAVERRAYCEGCYVSRSVAQTGVQWGDLCSLQPQPALVQAILMPQAPEQLGLQATLEKCATCSQPILDRILRAMGKAYHPGCFTCVVCHRGLDGIPFTVDATSQIHCIEDFHRKFAPRCSVC

SEQ ID NO: 13388 - protein, 290 aa, Homo sapiens
MDLSAASHRIPLSDGNSIPIIGLGTYSEPKSTPKGACATSVKVAIDTGYRHIDGAYIYQNEHEVGEAIREKIAEGKVRREDIFYCGKLWATNHVPEMVRPTLERTLRVLQLDYVDLYIIEVPMAFKPGDEIYPRDENGKWLYHKSNLCATWEAMEACKDAGLVKSLGVSNFNRRQLELILNKPGLKHKPVSNQVECHPYFTQPKLLKFCQQHDIVITAYSPLGTSRNPIWVNVSSPPLLKDALLNSLGKRYNKTAAQIVLRFNIQRGVVVIPKSFNLERIKENFQVARSS

SEQ ID NO: 13389 - protein, 874 aa, Homo sapiens
MRGSGPRGAGRRRPPSGGGDTPITPASLAGCYSAPRRAPLWTCLLLCAALRTLLASPSNEVNLLDSRTVMGDLGWIAFPKNGWEEIGEVDENYAPIHTYQVCKVMEQNQNNWLLTSWISNEGASRIFIELKFTLRDCNSLPGGLGTCKETFNMYYFESDDQNGRNIKENQYIKIDTIAADESFTELDLGDRVMKLNTEVRDVGPLSKKGFYLAFQDVGACIALVSVRVYYKKCPSVVRHLAVFPDTITGADSSQLLEVSGSCVNHSVTDEPPKMHCSAEGEWLVPIGKCMCKAGYEEKNGTCQAPSPVTNVKKGKIAKNSISLSWQEPDRPNGIILEYEIKYFEKDQETSYTIIKSKETTITAEGLKPASVYVFQIRARTAAGYGVFSRRFEFETTPVSVAASSDQSQIPVIAVSVTVGVILLAVVIGVLLSGSCCECGCGRASSLCAVAHPSLIWRCGYSKAKQDPEEEKMHFHNGHIKLPGVRTYIDPHTYEDPNQAVHEFAKEIEASCITIERVIGAGEFGEVCSGRLKLPGKRELPVAIKTLKVGYTEKQRRDFLGEASIMGQFDHPNIIHLEGVVTKSKPVMIVTEYMENGSLDTFLKKNDGQFTVIQLVGMLRGISAGMKYLSDMGYVHRDLAARNILINSNLVCKVSDFGLSRVLEDDPEAAYTTRGGKIPIRWTAPEAIAFRKFTSASDVWSYGIVMWEVVSYGERPYWEMTNQDVIKAVEEGYRLPSPMDCPAALYQLMLDCWQKERNSRPKFDEIVNMLDKLIRNPSSLKTLVNASCRVSNLLAEHSPLGSGAYRSVGEWLEAIKMGRYTEIFMENGYSSMDAVAQVTLEDLRRLGVTLVGHQKKIMNSLQEMKVQLVNGMVPL

SEQ ID NO: 13390 - protein, 379 aa, Homo sapiens
MPEGRSHCACSITSLTLLVSLTRVTLDILQKLDPPQPAHWRHHLLVLYKKGVYLSHTGGKMLFWVLGLLILCGFLWTRKGKLKIEDITDKYIFITGCDSGFGNLAARTFDKKGFHVIAACLTESGSTALKAETSERLRTVLLDVTDPENVKRTAQWVKNQVGEKGLWGLINNAGVPGVLAPTDWLTLEDYREPIEVNLFGLISVTLNMLPLVKKAQGRVINVSSVGGRLAIVGGGYTPSKYAVEGFNDSLRRDMKAFGVHVSCIEPGLFKTNLADPVKVIEKKLAIWEQLSPDIKQQYGEGYIEKSLDKLKGNKSYVNMDLSPVVECMDHALTSLFPKTHYAAGKDAKIFWIPLSHMPAALQDFLLLKQKAELANPKAV

SEQ ID NO: 13391 - protein, 121 aa, Homo sapiens
PPTSPLSGGSAPGAHLEPPYDPGTHHLPSGDFAQCTSPVPTLPQVGNSGDQAGATVLRMVRPQDTVAYEDLSVDYTQKKWKSLTLSQRALQWNMMPENHHSMASLDGETGTEEELIPKHHS

SEQ ID NO: 13392 - protein, 410 aa, Homo sapiens
MAEPRQEFEVMEDHAGTYGLGDRKDQGGYTMHQDQEGDTDAGLKESPLQTPTEDGSEEPGSETSDAKSTPTAEDVTAPLVDEGAPGKQAAAQPHTEIPEGTTAEEAGIGDTPSLEDEAAGHVTQARMVSKSKDGTGSDDKKAKGADGKTKIATPRGAAPPGQKGQANATRIPAKTPPAPKTPPSSGEPPKSGDRSGYSSPGSPGTPGSRSRTPSLPTPPTREPKKVAVVRTPPKSPSSAKSRLQTAPVPMPDLKNVKSKIGSTENLKHQPGGGKVQIVYKPVDLSKVTSKCGSLGNIHHKPGGGQVEVKSEKLDFKDRVQSKIGSLDNITHVPGGGNKKIETHKLTFRENAKAKTDHGAEIVYKSPVVSGDTSPRHLSNVSSTGSIDMVDSPQLATLADEVSASLAKQGL

SEQ ID NO: 13393 - protein, 595 aa, Homo sapiens
MDFLLALVLVSSLYLQAAAEFDGRWPRQIVSSIGLCRYGGRIDCCWGWARQSWGQCQPVCQPRCKHGECIGPNKCKCHPGYAGKTCNQDEHIPAPLDQGSEQPLFQPLDHQATSLPSRDLNECGLKPRPCKHRCMNTYGSYKCYCLNGYMLMPDGSCSSALTCSMANCQYGCDVVKGQIRCQCPSPGLQLAPDGRTCVDVDECATGRASCPRFRQCVNTFGSYICKCHKGFDLMYIGGKYQCHDIDECSLGQYQCSSFARCYNIRGSYKCKCKEGYQGDGLTCVYIPKVMIEPSGPIHVPKGNGTILKGDTGNNNWIPDVGSTWWPPKTPYIPPIITNRPTSKPTTRPTPKPTPIPTPPPPPPLPTELRTPLPPTTPERPTTGLTTIAPAASTPPGGITVDNRVQTDPQKPRGDVFIPRQPSNDLFEIFEIERGVSADDEAKDDPGVLVHSCNFDHGLCGWIREKDNDLHWEPIRDPAGGQYLTVSAAKAPGGKAARLVLPLGRLMHSGDLCLSFRHKVTGLHSGTLQVFVRKHGAHGAALWGRNGGHGWRQTQITLRGADIKSVVFKGEKRRGHTGEIGLDDVSLKKGHCSEER

SEQ ID NO: 13394 - protein, 530 aa, Homo sapiens
MQVVLDSKLDLPCELQFPQCLLLVVVMDKLPSQPKEVQTLWCTDSQVSETTTRISLLKAVFYSFEQCSGELSLPVHLQGLKSKGKAEVAVTLYQHVCVHLCTFITSFHPSLFAELDAALLNAVLSANMITSLLAMDAWCFLARYGTAELCAHHVTIVAHLIKSCPGECYQLINLSILLKRLFFFMAPPHQLEFIQKFSPKEAENLPLWQHISFQALPPELREQTVHEVTTVGTAECRKWLSRSRTLGELESLNTVLSALLAVCNSAGEALDTGKQTAIIEVVSQLWAFLNIKQVADQPYVQQTFSLLLPLLGFFIQTLDPKLILQAVTLQTSLLKLELPDYVRLAMLDFVSSLGKLFIPEAIQDRILPNLSCMFALLLADRSWLLEQHTLEAFTQFAEGTNHEEIVPQCLSSEETKNKVVSFLEKTGFVDETEAAKVERVKQEKGIFWEPFANVTVEEAKRSSLQPYAKRARQEFPWEEEYRSALHTIAGALEATESLLQKGPAPAWLSMEMEALQERMDKLKRYIHTLG

SEQ ID NO: 13395 - protein, 837 aa, Homo sapiens
MFKCWSVVLVLGFIFLESEGRPTKEGGYGLKSYQPLMRLRHKEKNQESSRVKGFMIQDGPFGSCENKYCGLGRHCVTSRETGQAECACMDLCKRHYKPVCGSDGEFYENHCEVHRAACLKKQKITIVHNEDCFFKGDKCKTTEYSKMKNMLLDLQNQKYIMQENENPNGDDISRKKLLVDQMFKYFDADSNGLVDINELTQVIKQEELGKDLFDCTLYVLLKYDDFNADKHLALEEFYRAFQVIQLSLPEDQKLSITAATVGQSAVLSCAIQGTLRPPIIWKRNNIILNNLDLEDINDFGDDGSLYITKVTTTHVGNYTCYADGYEQVYQTHIFQVNVPPVIRVYPESQAREPGVTASLRCHAEGIPKPQLGWLKNGIDITPKLSKQLTLQANGSEVHISNVRYEDTGAYTCIAKNEAGVDEDISSLFVEDSARKTRLGIGNMFYVFYEDGIKVIQPIECEFQRHIKPSEKLLGFQDEVCPKAEGDEVQRCVWASAVNVKDKFIYVAQPTLDRVLIVDVQSQKVVQAVSTDPVPVKLHYDKSHDQVWVLSWGTLEKTSPTLQVITLASGNVPHHTIHTQPVGKQFDRVDDFFIPTTTLIITHMRFGFILHKDEAALQKIDLETMSYIKTINLKDYKCVPQSLAYTHLGGYYFIGCKPDSTGAVSPQVMVDGVTDSVIGFNSDVTGTPYVSPDGHYLVSINDVKGLVRVQYITIRGEIQEAFDIYTNLHISDLAFQPSFTEAHQYNIYGSSSTQTDVLFVELSSGKVKMIKSLKEPLKAEEWPWNRKNRQIQDSGLFGQYLMTPSKDSLFILDGRLNKLNCEITEVEKGNTVIWVGDA

SEQ ID NO: 13396 - protein, 254 aa, Homo sapiens
MAAMRKALPRRLVGLASLRAVSTSSMGTLPKRVKIVEVGPRDGLQNEKNIVSTPVKIKLIDMLSEAGLSVIETTSFVSPKWVPQMGDHTEVLKGIQKFPGINYPVLTPNLKGFEAAVTKKFYSMGCYEISLGDTIGVGTPGIMKDMLSAVMQEVPLAALAVHCHDTYGQALANTLMALQMGVSVVDSSVAGLGGCPYAQGASGNLATEDLVYMLEGLGIHTGVNLQKLLEAGNFICQALNRKTSSKVAQATCKL

SEQ ID NO: 13397 - protein, 677 aa, Homo sapiens
MGDSGSRRSTLVSRLPIFRRSINRRHDSLPSSPSSSNTVGVHSSSPSSTNSSSGSTGKRRSIFRTPSISFHHKKGSEPKQEPTNQNLSISNGAQPGHSNMQKLSLEEHIKTRGRHSVGFSSSRNKKITRSLTEDFEREKEHSTNKNVFINCLSSGKSEGDDSGFTEDQTRRSVKQSTRKLLPKSFSSHYKFSKPVLQSQSISLVQQSEFSLEVTQYQEREPVLVRASPSCSVDVTERAGSSLQSPLLSADLTTAQTPSEFLALTEDSVSEMDAFSKSGSMASHCDNFGHNDSTSQMSLNSAAVTKTTTELTGTVPCAIMSPGKYRLEGQCSTESNSLPETSAANQKEVLLQIAELPATSVSHSESNLPADSEREENIGLQNGETMLGTNSPRKLGFYEQHKAIAEHVKGIHPISDSKIIPTSGDHHIFNKTSHGYEANPAKVLASSLSPFREGRFIERRLRSSSEGTAGSSRMILKPKDGNIEEVNSLRKQRAGSSSSKMNSLDVLNNLGSCELDEDDLMLDLEFLEEQSLHPSVCREDSYHSVVSCAAVVLTPMEPMIEMKKREEPEFPEPSKQNLSLKLTKDVDQEARCSHISRMPNSPSADWPLQGVEENGGIDSLPFRLMLQDCTAVKTLLLKMKRVLQESADMSPASSTTSLPVSPLTEEPVPFKTTYPREF

SEQ ID NO: 13398 - protein, 344 aa, Homo sapiens
MVLQMEPQVNSTNNFHQGPLDQPVGPLTGLKSSLLKDTTSAGPLLRPYPASLLGKVKEAVKVAIDAEYRHIDCAYFYENQHEVGEAIQEKIQEKAVMREDLFIVSKVWPTFFERPLVRKAFEKTLKDLKLSYLDVYLIHWPQGFKTGDDFFPKDDKGNMISGKGTFLDAWEAMEELVDEGLVKALGVSNFNHFQIERLLNKPGLKYKPVTNQVECHPYLTQEKLIQYCHSKGITVTAYSPLGSPDRPWAKPEDPSLLEDPKIKEIAAKHKKTTAQVLIRFHIQRNVTVIPKSMTPAHIVENIQVFDFKLSDEEMATILSFNRNWRAFDFKEFSHLEDFPFDAEY

SEQ ID NO: 13399 - protein, 232 aa, Homo sapiens
MGGTTSTRRVTFEADENENITVVKGIRLSENVIDRMKESSPSGSKSQRYSGAYGASVSDEELKRRVAEELALEQAKKESEDQKRLKQAKELDRERAAANEQLTRAILRERICSEEERAKAKHLDIEDKARQLEEKDRVLKKQDAFYKEQLARLEERSSEFYRVTTEQYQKAAEEVEAKFKRYESHPVCADLQAKILQCYRENTHQTLKCSALATQYMHCVNHAKQSMLEKGG

SEQ ID NO: 13400 - protein, 794 aa, Homo sapiens
MGRKLDLSGLTDDETEHVLQVVQRDFNLRKKEEERLSELKQKLDEEGSKCSILSKHQQFVEHCCMRCCSPFTFLVNTKRQCGDCKFNVCKSCCSYQKHEKAWVCCVCQQARLLRAQSLEWFYNNVKSRFKRFGSAKVLKNLYRKHRLESGACFDILGGSLFESNLENEGSISGSDSTFYRQSEGHSVMDTLAVALRVAEEAIEEAISKAEAYGDSLDKQNEASYLRDHKEELTEELATTILQKIIRKQKSKSEQQVEEEPGWPHPQSCSTKVADEGTSASPGGYRAPAALWRSQSAFSITGEEALKTPPVEAPSRQPRDQGQHPRAESALPSWKSVDRLDETNLAPVLQSPDGNWVALKDGAPPPTRLLAKPKSGTFQALEVASSVASAYDEMGSDSEEDFDWSEALSKLCPRSRALPRNPQPQPTQAQSSDQGPIAASPSSALSPNPEAMCSDSETSSAGSSREVGHQARLSWLQRKAPRNPAAEKMRLHGELDVNFNPQLASRETSDSSEPEEAPHTTDRRARRWRRARLGSEEPSKEPSSPSAQLRDLDTHQVSDDLSETDISNEARDPQTLTDTTEEKRRNRLYELAMKMSEKETSSGEDQESEPKTESENQKESLSSEDNSQSVQEELKKVYLAAGTVYGLETQLTELEDAARCIHSGTDETHLADLEDQVATAAAQVHHAELQISDIESRISALTIAGLNIAPCVRFTRRRDQKQRTQVQTIDTSRQQRRKLPAPPVKAEKIETSSVTTIKTFNHNFILQGSSTNRTKERKGTTKDLMEPALESAVMY

SEQ ID NO: 13401 - protein, 159 aa, Homo sapiens
MDEDTHYDKVEDVVGSHIEDAVTFWAQSINRNKDIMKIGCSLSEVCPQASSVLGNLDPNKIYGGLFSEDQCWYRCKVLKIISVEKCLVRYIDYGNTEILNRSDIVEIPLELQFSSVAKKYKLWGLHIPSDQEVTQFDQGTTFLGSLIFEKEIKMRIKAT

SEQ ID NO: 13402 - protein, 300 aa, Homo sapiens
MSGALDVLQMKEEDVLKFLAAGTHLGGTNLDFQMEQYIYKRKSDGIYIINLKRTWEKLLLAARAIVAIENPADVSVISSRNTGQVCGTVRAVLKFAAATGATPIAGRFTPGTFTNQIQAAFREPRLLVVTDPRADHQPLTEASYVNLPTIALCNTDSPLRYVDIAIPCNNKGAHSVGLMWWMLAREVLRMRGTISREHPWEVMPDLYFYRDPEEIEKEEQAAAEKAVTKEEFQGEWTAPAPEFTATQPEVADWSEGVQVPSVPIQQFPTEDWSAQPATEDWSAAPTAQATEWVGATTDWS

SEQ ID NO: 13403 - protein, 618 aa, Homo sapiens
MPAGLTEPAGAAPPAAVSASGTVTMAPAGALPVRVESTPVALGAVTKAPVSVCVEPTASQPLRSPVGTLVTKVAPVSAPPKVSSGPRLPAPQIVAVKAPNTTTIQFPANLQLPPGTVLIKSNSGPLMLVSPQQTVTRAETTSNITSRPAVPANPQTVKICTVPNSSSQLIKKVAVTPVKKLAQIGTTVVTTVPKPSSVQSVAVPTSVVTVTPGKPLNTVTTLKPSSLGASSTPSNEPNLKAENSAAVQINLSPTMLENVKKCKNFLAMLIKLACSGSQSPEMGQNVKKLVEQLLDAKIEAEEFTRKLYVELKSSPQPHLVPFLKKSVVALRQLLPNSQSFIQQCVQQTSSDMVIATCTTTVTTSPVVTTTVSSSQSEKSIIVSGATAPRTVSVQTLNPLAGPVGAKAGVVTLHSVGPTAATGGTTAGTGLLQTSKPLVTSVANTVTTVSLQPEKPVVSGTAVTLSLPAVTFGETSGAAICLPSVKPVVSSAGTTSDKPVIGTPVQIKLAQPGPVLSQPAGIPQAVQVKQLVVQQPSGGNEKQVTTISHSSTLTIQKCGQKTMPVNTIIPTSQFPPASILKQITLPGNKILSLQASPTQKNRIKENVTSCFRSTFICVY

SEQ ID NO: 13404 - protein, 1478 aa, Homo sapiens
MEPRMESCLAQVLQKDVGKRLQVGQELIDYFSDKQKSADLEHDQTMLDKLVDGLATSWVNSSNYKVVLLGMDILSALVTRLQDRFKAQIGTVLPSLIDRLGDAKDSVREQDQTLLLKIMDQAANPQYVWDRMLGGFKHKNFRTREGICLCLIATLNASGAQTLTLSKIVPHICNLLGDPNSQVRDAAINSLVEIYRHVGERVRADLSKKGLPQSRLNVIFTKFDEVQKSGNMIQSANDKNFDDEDSVDGNRPSSASSTSSKAPPSSRRNVGMGTTRRLGSSTLGSKSSAAKEGAGAVDEEDFIKAFDDVPVVQIYSSRDLEESINKIREILSDDKHDWEQRVNALKKIRSLLLAGAAEYDNFFQHLRLLDGAFKLSAKDLRSQVVREACITLGHLSSVLGNKFDHGAEAIMPTIFNLIPNSAKIMATSGVVAVRLIIRHTHIPRLIPVITSNCTSKSVAVRRRCFEFLDLLLQEWQTHSLERHISVLAETIKKGIHDADSEARIEARKCYWGFHSHFSREAEHLYHTLESSYQKALQSHLKNSDSIVSLPQSDRSSSSSQESLNRPLSAKRSPTGSTTSRASTVSTKSVSTTGSLQRSRSDIDVNAAASAKSKVSSSSGTTPFSSAAALPPGSYASLDGTTTKAEGRIRTRRQSSGSATNVASTPDNRGRSRAKVVSQSQRSRSANPAGAGSRSSSPGKLLGSGYGGLTGGSSRGPPVTPSSEKRSKIPRSQGCSRETSPNRIGLDRFGLGQPGRIPGSVNAMRVLSTSTDLEAAVADALLLGDSRSKKKPVRRRYEPYGMYSDDDANSDASSVCSERSYGSRNGGIPHYLRQTEDVAEVLNHCASSNWSERKEGLLGLQNLLKSQRTLSRVELKRLCEIFTRMFADPHSKVFSMFLETLVDFIIIHKDDLQDWLFVLLTQLLKKMGADLLGSVQAKVQKALDVTRDSFPFDQQFNILMRFIVDQTQTPNLKVKVAILKYIESLARQMDPTDFVNSSETRLAVSRIITWTTEPKSSDVRKAAQIVLISLFELNTPEFTMLLGALPKTFQDGATKLLHNHLKNSSNTSVGSPSNTIGRTPSRHTSSRTSPLTSPTNCSHGGLSPSMLDYDTENLNSEEIYSSLRGVTEAIEKFSFRSQEDLNEPIKRDGKKECDIVSRDGGAASPATEGRGGSEVEGGRTALDNKTSLLNTQPPRAFPGPRARDYNPYPYSDAINTYDKTALKEAVFDDDMEQLRDVPIDHSDLVADLLKELSNHNERVEERKGALLELLKITREDSLGVWEEHFKTILLLLLETLGDKDHSIRALALRVLREILRNQPARFKNYAELTIMKTLEAHKDSHKEVVRAAEEAASTLASSIHPEQCIKVLCPIIQTADYPINLAAIKMQTKVVERIAKESLLQLLVDIIPGLLQGYDNTESSVRKASVFCLVAIYSVIGEDLKPHLAQLTGSKMKLLNLYIKRAQTTNSNSSSSSDVSTHS

SEQ ID NO: 13405 - protein, 943 aa, Homo sapiens
MPSTSFPVPSKFPLGPAAAVFGRGETLGPAPRAGGTMKSAEEEHYGYASSNVSPALPLPTAHSTLPAPCHNLQTSTPGIIPPADHPSGYGAALDGGPAGYFLSSGHTRPDGAPALESPRIEITSCLGLYHNNNQFFHDVEVEDVLPSSKRSPSTATLSLPSLEAYRDPSCLSPASSLSSRSCNSEASSYESNYSYPYASPQTSPWQSPCVSPKTTDPEEGFPRGLGACTLLGSPRHSPSTSPRASVTEESWLGARSSRPASPCNKRKYSLNGRQPPYSPHHSPTPSPHGSPRVSVTDDSWLGNTTQYTSSAIVAAINALTTDSSLDLGDGVPVKSRKTTLEQPPSVALKVEPVGEDLGSPPPPADFAPEDYSSFQHIRKGGFCDQYLAVPQHPYQWAKPKPLSPTSYMSPTLPALDWQLPSHSGPYELRIEVQPKSHHRAHYETEGSRGAVKASAGGHPIVQLHGYLENEPLMLQLFIGTADDRLLRPHAFYQVHRITGKTVSTTSHEAILSNTKVLEIPLLPENSMRAVIDCAGILKLRNSDIELRKGETDIGRKNTRVRLVFRVHVPQPSGRTLSLQVASNPIECSQRSAQELPLVEKQSTDSYPVVGGKKMVLSGHNFLQDSKVIFVEKAPDGHHVWEMEAKTDRDLCKPNSLVVEIPPFRNQRITSPVHVSFYVCNGKRKRSQYQRFTYLPANVPIIKTEPTDDYEPAPTCGPVSQGLSPLPRPYYSQQLAMPPDPSSCLVAGFPPCPQRSTLMPAAPGVSPKLHDLSPAAYTKGVASPGHCHLGLPQPAGEAPAVQDVPRPVATHPGSPGQPPPALLPQQVSAPPSSSCPPGLEHSLCPSSPSPPLPPATQEPTCLQPCSPACPPATGRPQHLPSTVRRDESPTAGPRLLPEVHEDGSPNLAPIPVTVKREPEELDQLYLDDVNEIIRNDLSSTSTHS

SEQ ID NO: 13406 - protein, 1088 aa, Homo sapiens
MTTAQRDSLLWKLAGLLRESGDVVLSGCSTLSLLTPTLQQLNHVFELHLGPWGPGQTGFVALPSHPADSPVILQLQFLFDVLQKTLSLKLVHVAGPGPTGPIKIFPFKSLRHLELRGVPLHCLHGLRGIYSQLETLICSRSLQALEELLSACGGDFCSALPWLALLSANFSYNALTALDSSLRLLSALRFLNLSHNQVQDCQGFLMDLCELHHLDISYNRLHLVPRMGPSGAALGVLILRGNELRSLHGLEQLRNLRHLDLAYNLLEGHRELSPLWLLAELRKLYLEGNPLWFHPEHRAATAQYLSPRARDAATGFLLDGKVLSLTDFQTHTSLGLSPMGPPLPWPVGSTPETSGGPDLSDSLSSGGVVTQPLLHKVKSRVRVRRASISEPSDTDPEPRTLNPSPAGWFVQQHPELELMSSFRERFGRNWLQYRSHLEPSGNPLPATPTTSAPSAPPASSQGPDTAPRPSPPQEEARGPQESPQKMSEEVRAEPQEEEEEKEGKEEKEEGEMVEQGEEEAGEEEEEEQDQKEVEAELCRPLLVCPLEGPEGVRGRECFLRVTSAHLFEVELQAARTLERLELQSLEAAEIEPEAQAQRSPRPTGSDLLPGAPILSLRFSYICPDRQLRRYLVLEPDAHAAVQELLAVLTPVTNVAREQLGEARDLLLGRFQCLRCGHEFKPEEPRMGLDSEEGWRPLFQKTESPAVCPNCGSDHVVLLAVSRGTPNRERKQGEQSLAPSPSASPVCHPPGHGDHLDRAKNSPPQAPSTRDHGSWSLSPPPERCGLRSVDHRLRLFLDVEVFSDAQEEFQCCLKVPVALAGHTGEFMCLVVVSDRRLYLLKVTGEMREPPASWLQLTLAVPLQDLSGIELGLAGQSLRLEWAAGAGRCVLLPRDARHCRAFLEELLDVLQSLPPAWRNCVSATEEEVTPQHRLWPLLEKDSSLEARQFFYLRAFLVEGPSTCLVSLLLTPSTLFLLDEDAAGSPAEPSPPAASGEASEKVPPSGPGPAVRVREQQPLSSLSSVLLYRSAPEDLRLLFYDEVSRLESFWALRVVCQEQLTALLAWIREPWEELFSIGLRTVIQEALALDR

SEQ ID NO: 13407 - protein, 677 aa, Homo sapiens
MKVLGRSFFWVLFPVLPWAVQAVEHEEVAQRVIKLHRGRGVAAMQSRQWVRDSCRKLSGLLRQKNAVLNKLKTAIGAVEKDVGLSDEEKLFQVHTFEIFQKELNESENSVFQAVYGLQRALQGDYKDVVNMKESSRQRLEALREAAIKEETEYMELLAAEKHQVEALKNMQHQNQSLSMLDEILEDVRKAADRLEEEIEEHAFDDNKSVKGVNFEAVLRVEEEEANSKQNITKREVEDDLGLSMLIDSQNNQYILTKPRDSTIPRADHHFIKDIVTIGMLSLPCGWLCTAIGLPTMFGYIICGVLLGPSGLNSIKSIVQVETLGEFGVFFTLFLVGLEFSPEKLRKVWKISLQGPCYMTLLMIAFGLLWGHLLRIKPTQSVFISTCLSLSSTPLVSRFLMGSARGDKEGDIDYSTVLLGMLVTQDVQLGLFMAVMPTLIQAGASASSSIVVEVLRILVLIGQILFSLAAVFLLCLVIKKYLIGPYYRKLHMESKGNKEILILGISAFIFLMLTVTELLDVSMELGCFLAGALVSSQGPVVTEEIATSIEPIRDFLAIVFFASIGLHVFPTFVAYELTVLVFLTLSVVVMKFLLAALVLSLILPRSSQYIKWIVSAGLAQVSEFSFVLGSRARRAGVISREVYLLILSVTTLSLLLAPVLWRAAITRCVPRPERRSSL

SEQ ID NO: 13408 - protein, 486 aa, Homo sapiens
MQSGGAEGSPGAGRTGRGPGSGKAPPAEISSGAPDFPGGDPIKILMPSLSPTMEEGNIVKWLKKEGEAVSAGDALCEIETDKAVVTLDASDDGILAKIVVEEGSKNIRLGSLIGLIVEEGEDWKHVEIPKDVGPPPPVSKPSEPRPSPEPQISIPVKKEHIPGTLRFRLSPAARNILEKHSLDASQGTATGPRGIFTKEDALKLVQLKQTGKITESRPTPAPTATPTAPSPLQATAGPSYPRPVIPPVSTPGQPNAVGTFTEIPASNIRRVIAKRLTESKSTVPHAYATADCDLGAVLKVRQDLVKDDIKVSVNDFIIKAAAVTLKQMPDVNVSWDGEGPKQLPFIDISVAVATDKGLLTPIIKDAAAKGIQEIADSVKALSKKARDGKLLPEEYQGGSFSISNLGMFGIDEFTAVINPPQACILAVGRFRPVLKLTEDEEGNAKLQQRQLITVTMSSDSRVVDDELATRFLKSFKANLENPIRLA

SEQ ID NO: 13409 - protein, 470 aa, Homo sapiens
MSAVSQPQAAPSPLEKSPSTAILCNTCGNVCKGEVLRVQDKYFHIKCFVCKACGCDLAEGGFFVRQGEYICTLDYQRLYGTRCFSCDQFIEGEVVSALGKTYHPDCFVCAVCRLPFPPGDRVTFNGKECMCQKCSLPVSVGSSAHLSQGLRSCGGCGTEIKNGQALVALDKHWHLGCFKCKSCGKLLNAEYISKDGLPYCEADYHAKFGIRCDSCEKYITGRVLEAGEKHYHPSCALCVRCGQMFAEGEEMYLQGSSIWHPACRQAARTEDRNKETRTSSESIISVPASSTSGSPSRVIYAKLGGEILDYRDLAALPKSKAIYDIDRPDMISYSPYISHSAGDRQSYGESPQLLSPTPTEGDQDDRSYKQCRTSSPSSTGSVSLGRYTPTSRSPQHYSRPAARRSDGEDGSLDQDNRKQKSSWLMLKGDADTRTNSPDLDTQSLSHSSGTDRDPLQRMAGDSFHSREWFF

SEQ ID NO: 13410 - protein, 580 aa, Homo sapiens
MMEALGFLKLEVNGPMVTVALSVALLALLKWYSTSAFSRLEKLGLRHPKPSPFIGNLTFFRQGFWESQMELRKLYGPLCGYYLGRRMFIVISEPDMIKQVLVENFSNFTNRMASGLEFKSVADSVLFLRDKRWEEVRGALMSAFSPEKLNELGLLIMQERIKGHMGGQQAPQRIPPTRLSKPSGIYVNLHYATLPFCMVPLISQACDLLLAHLKRYAESGDAFDIQRCYCNYTTDVVASVAFGTPVDSWQAPEDPFVKHCKRFFEFCIPRPILVLLLSFPSIMVPLARILPNKNRDELNGFFNKLIRNVIALRDQQAAEERRRDFLQMVLDARHSASPMGVQDFDIVRDVFSSTGCKPNPSRQHQPSPMARPLTVDEIVGQAFIFLIAGYEIITNTLSFATYLLATNPDCQEKLLREVDVFKEKHMAPEFCSLEEGLPYLDMVIAETLRMYPPAFRFTREAAQDCEVLGQRIPAGAVLEMAVGALHHDPEHWPSPETFNPERFTAEARQQHRPFTYLPFGAGPRSCLGVRLGLLEVKLTLLHVLHKFRFQACPETQVPLQLESKSALGPKNGVYIKIVSR

SEQ ID NO: 13411 - protein, 613 aa, Homo sapiens
MDSHSGEPALLPCGTCDMVFRSSALLATHTQRFCIGHPTQEMTFGAQASVATEPQRAAVVPQEHQGVPQEPQGLPDQQASRSALKRLTEEEMRPWITEVPRVFAGPWTRSEARPQSPMSEAVGSPSERLRALFRTRARRVAEMEAQSRALQLRGEELSRRLQVVACTRGGMSRLFGLEQEIRELQAEAGRTRGALEVLGARIQELQAEPGNPLSSRREAELYSPVQKANPGTLAAEIRALREAYIRDGGRDPGVLGQIWQLQVEASALELQRSQTRRGRAGATSGELPVVEAENRRLEAEILALQMQRGRAPLGPQDLRLLGDASLQPKGRRDPPLLPPPVAPPLPPLPGFSEPQLPGTMTRNLGLDSHFLLPTSDMLGPAPYDPGAGLVIFYDFLRGLEASWIWVQLRTGLARDGRDTGRTTALPPALCLPPPPAPGPMGNCAILASRQPVPRLPPSSSVSLVCELQVWQGLAWARAPQPKAWVSLGLFDQDQRVLSGRWRLPLRALPLDPSLSLGQLNGIPQAGQAELFLRLVNARDAAVQTLAEINPASVHEYQYPPPVSSTSSLEASFLTPAVGFADPPPRTEEPLSGVKDRDEGLGPHHSSDLPPVSF

SEQ ID NO: 13412 - protein, 360 aa, Homo sapiens
GYLRPLIPAAAPQEPDTFEDIINDVEKIIMPGVTHWHSPYFFAYFPTASSYPAMLADMLCGAIGCIGFSWAHSSVERAGLIGGVKLKAIPSDGNFAMRASALQEALERDKAAGLIPFFMVATLGTTTCCSFDNLLEVGPICNKEDIWLHVDAAYAGSAFICPEFRHLLNGVEFADSFNFNPHKWLLVNFDCSAMWVKKRTDLTGAFRLDPTYLKHSHQDSGLITDYRHWQIPLGRRFRSLKMWFVFRMYGVKGLQAYIRKHVQLSHEFESLVRQDPRFEICVEVILGLVCFRLKGSNKVNEALLQRINSAKKIHLVPCHLRDKFVLRFAICSRTVESAHVQRAWEHIKELAADVLRAERE

SEQ ID NO: 13413 - protein, 255 aa, Homo sapiens
MKTRQAFYLHTTKLTRIARRLCREILRPWHAARHPYLPINSAAIKAECTARLPEASQSPLVLKQAVRKPLEAVLRYLETHPRPPKPDPVKSVSSVLSSLTPAKVAPVINNGSPTILGKRSYEQHNGVDGNMKKRLLMPSRGTYLGLANHGQARHMGPSRNLLLNGKSYPTKVRLIRGGSLPPVKRRRMNWIDAPDDVFYMATEETRKIRKLLSSSETKRAARRPYKPIALRQSQALPPRPPPPAPVNDEPIVIED

SEQ ID NO: 13414 - protein, 830 aa, Homo sapiens
MENELPVPHTSSSACATSSTSGASSSSGCNNSSSGGSGRPTGPQISVYSGIPDRQTVQVIQQALHRQPSTAAQYLQQMYAAQQQHLMLQTAALQQQHLSSAQLQSLAAVQQASLVSNRQGSTSGSNVSAQAPAQSSSINLAASPAAAQLLNRAQSVNSAAASGIAQQAVLLGNTSSPALTASQAQMYLRAQMVQNLTLRTQQTPAAAASGPTPTQPVLPSLALKPTPGGSQPLPTPAQSRNTAQASPAGAKPGIADSVMEPHKKGDGNSSVPGSMEGRAGLSRTVPAVAAHPLIAPAYAQLQPHQLLPQPSSKHLQPQFVIQQQPQPQQQQPPPQQSRPVLQAEPHPQLASVSPSVALQPSSEAHAMPLGPVTPALPLQCPTANLHKPGGSQQCHPPTPDTGPQNGHPEGVPHTPQRRFQHTSAVILQLQPASPVPQQCVPDDWKEVAPGEKSVPETRSGPSPHQQAIVTAMPGGLPVPTSPNIQPSPAHETGQGIVHALTDLSSPGMTSGNGNSASSIAGTAPQNGENKPPQAIVKPQILTHVIEGFVIQEGAEPFPVGRSSLLVGNLKKKYAQGFLPEKLPQQDHTTTTDSEMEEPYLQESKEEGAPLKLKCELCGRVDFAYKFKRSKRFCSMACAKRYNVGCTKRVGLFHSDRSKLQKAGAATHNRRRASKASLPPLTKDTKKQPTGTVPLSVTAALQLTHSQEDSSRCSDNSSYEEPLSPISASSSTSRRRQGQRDLELPDMHMRDLVGMGHHFLPSEPTKWNVEDVYEFIRSLPGCQEIAEEFRAQEIDGQALLLLKEDHLMSAMNIKLGPALKIYARISMLKDS

SEQ ID NO: 13415 - protein, 1233 aa, Homo sapiens
MNTKKRGSPARTHSMMSLSVRPQRRLLSARVNRSQSFAGVLGSHERGPRSFPVFSPPGPPRKPPALSRVSRMFSVAHPAAKVPQPERLDLVYTALKRGLTAYLEVHQQEQEKLQGQIRESKRNSRLGFLYDLDKQVKSIERFLRRLEFHASKIDELYEAYCVQRRLRDGAYNMVRAYTTGSPGSREARDSLAEATRGHREYTESMCLLESELEAQLGEFHLRMKGLAGFARLCVGDQYEICMKYGRQRWKLRGRIEGSGKQVWDSEETIFLPLLTEFLSIKVTELKGLANHVVVGSVSCETKDLFAALPQVVAVDINDLGTIKLSLEVTWSPFDKDDQPSAASSVNKASTVTKRFSTYSQSPPDTPSLREQAFYNMLRRQEELENGTAWSLSSESSDDSSSPQLSGTARHSPAPRPLVQQPEPLPIQVAFRRPETPSSGPLDEEGAVAPVLANGHAPYSRTLSHISEASVDAALAEASVEAVGPESLAWGPSPPTHPAPTHGEHPSPVPPALDPGHSATSSTLGTTGSVPTSTDPAPSAHLDSVHKSTDSGPSELPGPTHTTTGSTYSAITTTHSAPSPLTHTTTGSTHKPIISTLTTTGPTLNIIGPVQTTTSPTHTMPSPTHTTASPTHTSTSPTHTPTSPTHKTSMSPPTTTSPTPSGMGLVQTATSPTHPTTSPTHPTTSPILINVSPSTSLELATLSSPSKHSDPTLPGTDSLPCSPPVSNSYTQADPMAPRTPHPSPAHSSRKPLTSPAPDPSESTVQSLSPTPSPPTPAPQHSDLCLAMAVQTPVPTAAGGSGDRSLEEALGALMAALDDYRGQFPELQGLEQEVTRLESLLMQRQGLTRSRASSLSITVEHALESFSFLNEDEDEDNDVPGDRPPSSPEAGAEDSIDSPSARPLSTGCPALDAALVRHLYHCSRLLLKLGTFGPLRCQEAWALERLLREARVLEAVCEFSRRWEIPASSAQEVVQFSASRPGFLTFWDQCTERLSCFLCPVERVLLTFCNQYGARLSLRQPGLAEAVCVKFLEDALGQKLPRRPQPGPGEQLTVFQFWSFVETLDSPTMEAYVTETAEEVLLVRNLNSDDQAVVLKALRLAPEGRLRRDGLRALSSLLVHGNNKVMAAVSTQLRSLSLGPTFRERALLCFLDQLEDEDVQTRVAGCLALGCIKAPEGIEPLVYLCQTDTEAVREAARQSLQQCGEEGQSAHRRLEESLDALPRIFGPGSMASTAF

SEQ ID NO: 13416 - protein, 710 aa, Homo sapiens
MDQVATLRLESVDLQSSRNNKEHHTQEMGVKRLTVRRGQPFYLRLSFSRPFQSQNDHITFVAETGPKPSELLGTRATFFLTRVQPGNVWSASDFTIDSNSLQVSLFTPANAVIGHYTLKIEISQGQGHSVTYPLGTFILLFNPWSPEDDVYLPSEILLQEYIMRDYGFVYKGHERFITSWPWNYGQFEEDIIDICFEILNKSLYHLKNPAKDCSQRNDVVYVCRVVSAMINSNDDNGVLQGNWGEDYSKGVSPLEWKGSVAILQQWSARGGQPVKYGQCWVFASVMCTVMRCLGVPTRVVSNFRSAHNVDRNLTIDTYYDRNAEMLSTQKRDKIWNFHVWNECWMIRKDLPPGYNGWQVLDPTPQQTSSGLFCCGPASVKAIREGDVHLAYDTPFVYAEVNADEVIWLLGDGQAQEILAHNTSSIGKEISTKMVGSDQRQSITSSYKYPEGSPEERAVFMKASRKMLGPQRASLPFLDLLESGGLRDQPAQLQLHLARIPEWGQDLQLLLRIQRVPDSTHPRGPIGLVVRFCAQALLHGGGTQKPFWRHTVRMNLDFGKETQWPLLLPYSNYRNKLTDEKLIRVSGIAEVEETGRSMLVLKDICLEPPHLSIEVSERAEVGKALRVHVTLTNTLMVALSSCTMVLEGSGLINGQIAKDLGTLVAGHTLQIQLDLYPTKAGPRQLQVLISSNEVKEIKGYKDIFVTVAGAP

SEQ ID NO: 13417 - protein, 183 aa, Homo sapiens
MDFLLLGLCLYWLLRRPSGVVLCLLGACFQMLPAAPSGCPQLCRCEGRLLYCEALNLTEAPHNLSGLLGLSLRYNSLSELRAGQFTGLMQLTWLYLDHNHICSVQGDAFQKLRRVKELTLSSNQITQLPNTTFRPMPNLRSVDLSYNKLQALAPDLFHGLRKLTTLHMRANAIQFVPVRIFQD

SEQ ID NO: 13418 - protein, 582 aa, Homo sapiens
MLYLENNAQTQFSEPQYTNLGLLNSMDQQIQNGSSSTSPYNTDHAQNSVTAPSPYAQPSSTFDALSPSPAIPSNTDYPGPHSFDVSFQQSSTAKSATWTYSTELKKLYCQIAKTCPIQIKVMTPPPQGAVIRAMPVYKKAEHVTEVVKRCPNHELSREFNEGQIAPPSHLIRVEGNSHAQYVEDPITGRQSVLVPYEPPQVGTEFTTVLYNFMCNSSCVGGMNRRPILIIVTLETRDGQVLGRRCFEARICACPGRDRKADEDSIRKQQVSDSTKNGDAFRQNTHGIQMTSIKKRRSPDDELLYLPVRGRETYEMLLKIKESLELMQYLPQHTIETYRQQQQQQHQHLLQKQTSIQSPSSYGNSSPPLNKMNSMNKLPSVSQLINPQQRNALTPTTIPDGMGANIPMMGTHMPMAGDMNGLSPTQALPPPLSMPSTSHCTPPPPYPTDCSIVSFLARLGCSSCLDYFTTQGLTTIYQIEHYSMDDLASLKIPEQFRHAIWKGILDHRQLHEFSSPSHLLRTPSSASTVSVGSSETRGERVIDAVRFTLRQTISFPPRDEWNDFNFDMDARRNKQQRIKEEGE

SEQ ID NO: 13419 - protein, 753 aa, Homo sapiens
MPKDSGALLGLKVVGGKMTDLGRLGAFITKVKKGSLADVVGHLRAGDEVLEWNGKPLPGATNEEVYNIILESKSEPQVEIIVSRPIGDIPRIPESSHPPLESSSSSFESQKMERPSISVISPTSPGALKDAPQVLPGQLSVKLWYDKVGHQLIVNVLQATDLPARVDGRPRNPYVKMYFLPDRSDKSKRRTKTVKKILEPKWNQTFVYSHVHRRDFRERMLEITVWDQPRVQEEESEFLGEILIELETALLDDEPHWYKLQTHDESSLPLPQPSPFMPRRHIHGESSSKKLQRSQRISDSDISDYEVDDGIGVVPPVGYRSSARESKSTTLTVPEQQRTTHHRSRSVSPHRGNDQGKPRSRLPNVPLQRSLDEIHPTRRSRSPTRHHDASRSPVDHRTRDVDSQYLSEQDRMHRQRSPTQSPPADTSFSSRRGRQLPQVPVRSGSIEQASLVVEERTRQMKMKVHRFKQTTGSGSSQELDREQYSKYNIHKDQYRSCDNVSAKSSDSDVSDVSAISRTSSASRLSSTSFMSEQSERPRGRISSFTPKMQGRRMGTSGRSIMKSTSVSGEMYTLEHNDGSQSDTAVGTVGAGGKKRRSSLSAKVVAIVSRRSRSTSQLSQTESGHKKLKSTIQRSTETGMAAEMRKMVRQPSRESTDGSINSYSSEGNLIFPGVRLGADSQFSDFLDGLGPAQLVGRQTLATPAMGDIQIGMEDKKGQLEVEVIRARSLTQKPGSKSTPAPYVKVYLLENGACI

SEQ ID NO: 13420 - protein, 675 aa, Homo sapiens
KVKGEETEEHQRGRLGYLTVGEQSEELVTRETGDGDPVSNISQTHFKCRGILNHAEKQQSPEVLDYMLQKEEKYIRQQKAHTISQQCISSSLLLDDAQNQNQPKADKDESTMINEITLAKLAKDSIVAQTQKLEDQKEERLHHPLRKDTESCTSPCLLGAPRKAQDPSSAGCDQIHGAFAKKGVLPLKKQPHRTCKKVSYQEQIIVGRKIGKIRSSAFLKSSSNPIPTKAHRLLSLCTLSAPTRLEPETAPTKSLVSHIPKQMSTPCHPLRSLNFRKTTKESALLNKLSILASKLAPAMKTQKLRYRRCSSELLPMAKSYKRLRYKRLLDGFSSSTEQLNPYLAASGWDKRPNSKPMALYSLESIKMTFIDLSNKMPSLLFGSEIFPVSFHVKSSSSDCTTESSRTFPEHCAPARLALGEALQCPSQPPKWTFSFFLSHGCPGMATFREDTGVHSQTHTQAPPQPPAPLQDYGGTAIVQTRADCSVLGLHTLLALCSPGCYRIWTKKRSFSSHMPTMQRLFMTQFTQGLKGLRSPASIADKVFCSLPYSVGRVLSIWSQHGPSVCSFEISSLHSPHCKRQPSLGTTSSHTMLPYVPLPGMEATYNTSGSQTRLEPPFPALVPKSCLVAESAVSKLLLSASEFQVRGLDELDGVKAACPCPQSSPPEQKEVKEEGV

SEQ ID NO: 13421 - protein, 708 aa, Homo sapiens
MRKHRHLPLVAVFCLFLSGFPTTHAQQQQADVKNGAAADIIFLVDSSWTIGEEHFQLVREFLYDVVKSLAVGENDFHFALVQFNGNPHTEFLLNTYRTKQEVLSHISNMSYIGGTNQTGKGLEYIMQSHLTKAAGSRAGDGVPQVIVVLTDGHSKDGLALPSAELKSADVNVFAIGVEDADEGALKEIASEPLNMHMFNLENFTSLHDIVGNLVSCVHSSVSPERAGDTETLKDITAQDSADIIFLIDGSNNTGSVNFAVILDFLVNLLEKLPIGTQQIRVGVVQFSDEPRTMFSLDTYSTKAQVLGAVKALGFAGGELANIGLALDFVVENHFTRAGGSRVEEGVPQVLVLISAGPSSDEIRYGVVALKQASVFSFGLGAQAASRAELQHIATDDNLVFTVPEFRSFGDLQEKLLPYIVGVAQRHIVLKPPTIVTQVIEVNKRDIVFLVDGSSALGLANFNAIRDFIAKVIQRLEIGQDLIQVAVAQYADTVRPEFYFNTHPTKREVITAVRKMKPLDGSALYTGSALDFVRNNLFTSSAGYRAAEGIPKLLVLITGGKSLDEISQPAQELKRSSIMAFAIGNKGADQAELEEIAFDSSLVFIPAEFRAAPLQGMLPGLLAPLRTLSGTPEESKRDILFLFDGSANLVGQFPVVRDFLYKIIDELNVKPEGTRIAVAQYSDDVKVESRFDEHQSKPEILNLVKRMKI

SEQ ID NO: 13422 - protein, 353 aa, Homo sapiens
MWLLEKAGYKVGAAEPAARWAPSGLFSKRRAPGPPTSACPNVLTPDRIPQFFIPPRLPDPGGAVPAARRHVAGRGLPATCSLPHLAGREGWAFLPESPHTRRRESLFHGPPPAPAGGLPAAQSRLHVSAPDLRLCRAPDSDTASSPDSSPFGSPRPGLGRRRVSRPHSLSPEKASSADTSPHSPRRAGPPTPPLFHLDFLCCQLRPTRESVLRLGPRGGQLRLSTEYQAGPGRLRLRLVSAEGLPRPRSRPGSGGGGCCVVLRLRPRVRPREQQSRVVKCSANPIFNEDFFFDGLGPPDLAARSLRAKVLDRGAGLRRDVLLGECETPLIALLPPLGGGLGPGSSLAPTHLSL

SEQ ID NO: 13423 - protein, 1150 aa, Homo sapiens
DVSPTSRDNLVAKQLARNTVTQALSRFTSPQAGAPSRPGVPPTGDVGTHPPVGRTSLKTHGVARVDRGNPPPIPPKKPGLSQTPSPPHPQLKVIIDSSRASNTGAKVDNKTVASTPSSLPQGNRVINEENLPKSSSPQLPPKPSIDLTVAPAGCAVSALATSQKIQKVKCTREEPSCWSPSLTPLLMSGGPAPLAGRPTLLQQAAAQGNVTLLSMLLNEEGLDINYSCEDGHSALYSAAKNGHTDCVRLLLSAEAQVNAADKNGFTPLCAAAAQGHFECVELLISYDANINHAADGGQTPLYLACKNGNKECIKLLLEAGTNRSVKTTDGWTPVHAAVDTGNVDSLKLLMYHRIPAHGNSFNEEESESSVFDLDGGEESPEGISKPVVPADLINHANREGWTAAHIAASKGFKNCLEILCRHGGLEPERRDKCNRTVHDVATDDCKHLLENLNALKIPLRISVGEIEPSNYGSDDLECENTICALNIRKQTSWDDFSKAVSQALTNHFQAISSDGWWSLEDVTCNNTTDSNIGLSARSIRSITLGNVPWSVGQSFAQSPWDFMRKNKAEHITVLLSGPQEGCLSSVTYASMIPLQMMQNYLRLVEQYHNVIFHGPEGSLQDYIVHQLALCLKHRQMAAGFSCEIVRAEVDAGFSKEQLLDLFISSACLIPVKQSPSKKKIIIILENLEKSSLSELLRDFLAPLENRSTESPCTFQKGNGLSECYYFHENCFLMGTIAKACLQGSDLLVQQHFRWVQLRWDGEPMQGLLQRFLRRKVVNKFKGQAPSPCDPVCKIVDWALSVWRQLNSCLARLGTPEALLGPKYFLSCPVVPGHAQVTVKWMSKLWNGVIAPRVQEAILSRASVKRQPGFGQTTAKRHPSQGQQAVVKAALSILLNKAVLHGCPLPRAELDQHTADFKGGSFPLSIVSSYNTCNKKKGESGAWRKVNTSPRRKSGRFSLPTWNKPDLSTEGMKNKTISQLNCNRNASLSKQKSLENDLSLTLNLDQRLSLGSDDEADLVKELQSMCSSKSESDISKIADSRDDLRMFDSSGNNPVLSATINNLRMPVSQKEVSPLSSHQTTECSNSKSKTELGVSRVKSFLPVPRSKVTQCSQNTKRSSSSSNTRQIEINNNSKEVNWNLHKNEHLEKPNK

SEQ ID NO: 13424 - protein, 1205 aa, Homo sapiens
MLHLSAEEAIGCVRVRRSFIDELAFGRGHSTGTGKQKRRDRVSGSSWCLACVSWMPCGFSPSPVAHHLVPGPPDTPAQQLRCGWTVGGWLLSLVRGLLPCLPPGARTAEGPIMVLAGPLAVSLLLPSLTLLVSHLSSSQDVSSEPSSEQQLCALSKHPTVAFEDLQPWVSNFTYPGARDFSQLALDPSGNQLIVGARNYLFRLSLANVSLLQATEWASSEDTRRSCQSKGKTEEECQNYVRVLIVAGRKVFMCGTNAFSPMCTSRQVGNLSRTIEKINGVARCPYDPRHNSTAVISSQGELYAATVIDFSGRDPAIYRSLGSGPPLRTAQYNSKWLNEPNFVAAYDIGLFAYFFLRENAVEHDCGRTVYSRVARVCKNDVGGRFLLEDTWTTFMKARLNCSRPGEVPFYYNELQSAFHLPEQDLIYGVFTTNVNSIAASAVCAFNLSAISQAFNGPFRYQENPRAAWLPIANPIPNFQCGTLPETGPNENLTERSLQDAQRLFLMSEAVQPVTPEPCVTQDSVRFSHLVVDLVQAKDTLYHVLYIGTESGTILKALSTASRSLHGCYLEELHVLPPGRREPLRSLRILHSARALFVGLRDGVLRVPLERCAAYRSQGACLGARDPYCGWDGKQQRCSTLEDSSNMSLWTQNITACPVRNVTRDGGFGPWSPWQPCEHLDGDNSGSCLCRARSCDSPRPRCGGLDCLGPAIHIANCSRNGAWTPWSSWALCSTSCGIGFQVRQRSCSNPAPRHGGRICVGKSREERFCNENTPCPVPIFWASWGSWSKCSSNCGGGMQSRRRACENGNSCLGCGVEFKTCNPEGCPEVRRNTPWTPWLPVNVTQGGARQEQRFRFTCRAPLADPHGLQFGRRRTETRTCPADGSGSCDTDALVEVLLRSGSTSPHTVSGGWAAWGPWSSCSRDCELGFRVRKRTCTNPEPRNGGLPCVGDAAEYQDCNPQACPVRGAWSCWTSWSPCSASCGGGHYQRTRSCTSPAPSPGEDICLGLHTEEALCATQACPEGWSPWSEWSKCTDDGAQSRSRHCEELLPGSSACAGNSSQSRPCPYSEIPVILPASSMEEATDCAGFNLIHLVATGISCFLGSGLLTLAVYLSCQHCQRQSQESTLVHPATPNHLHYKGGGTPKNEKYTPMEFKTLNKNNLIPDDRANFYPLQQTNVYTTTYYPSPLNKHSFRPEASPGQRCFPNS

SEQ ID NO: 13425 - protein, 455 aa, Homo sapiens
MWLKVFTTFLSFATGACSGLKVTVPSHTVHGVRGQALYLPVHYGFHTPASDIQIIWLFERPHTMPKYLLGSVNKSVVPDLEYQHKFTMMPPNASLLINPLQFPDEGNYIVKVNIQGNGTLSASQKIQVTVDDPVTKPVVQIHPPSGAVEYVGNMTLTCHVEGGTRLAYQWLKNGRPVHTSSTYSFSPQNNTLHIAPVTKEDIGNYSCLVRNPVSEMESDIIMPIIYYGPYGLQVNSDKGLKVGEVFTVDLGEAILFDCSADSHPPNTYSWIRRTDNTTYIIKHGPRLEVASEKVAQKTMDYVCCAYNNITGRQDETHFTVIITSVGLEKLAQKGKSLSPLASITGISLFLIISMCLLFLWKKYQPYKGQKQNTGKLKHFQAMKMLWMTSEYMNLLLFQMFLVFPGSQAGLFQPLIVYRGKICTVQCMKLFSTSLPSSKTIQSELSWAKQYIRVKF

SEQ ID NO: 13426 - protein, 195 aa, Homo sapiens
KKIRSDHNEEDEKACVLQVVWNGLEELNNAIKYTKNVEVLHLGKVWIPDDLRKRLNIEMHAVVRITPVEVTPKIPRSLKLQPRENLPKDISEEDIKTVFYSWLQQSTTTMLPLVISEEEFIKLETKDGLKEFSLSIVHSWEKEKDKNIFLLSPNLLQKTTIQRSEFLRRILLGAHHSQPPGTPFVSAADVSCCRT

SEQ ID NO: 13427 - protein, 344 aa, Homo sapiens
MTCCSCTSLSALLDFWAEVCWLAPEQTAGKKKPFVYTQGQAVLNRAFFPCFDTPAVKYKYSALIEVPDGFTAVMSASTWEKRGPNKFFFQMCQPIPSYLIALAIGDLVSAEVGPRSRVWAEPCLIDAAKEEYNGVIEEFLATGEKLFGPYVWGRYDLLFMPPSFPFGGMENPCLTFVTPCLLAGDRSLADVIIHEISHSWFGNLVTNANWGEFWLNEGFTMYAQRRISTILFGAAYTCLEAATGRALLRQHMDITGEENPLNKLRVKIEPGVDPDDTYNETPYEKGFCFVSYLAHLVGDQDQFDSFLKAYVHEFKFRSILADDFLDFYLEYFPELKKKRVDIIP

SEQ ID NO: 13428 - protein, 463 aa, Homo sapiens
MGRKKIQITRIMDERNRQVTFTKRKFGLMKKAYELSVLCDCEIALIIFNSTNKLFQYASTDMDKVLLKYTEYNEPHESRTNSDIVEALNKKENKGCESPDPDSSYALTPRTEEKYKKINEEFDNMIKSHKIPAVPPPNFEMPVSIPVSSHNSLVYSNPVSSLGNPNLLPLAHPSLQRNSMSPGVTHRPPSAGNTGGLMGGDLTSGAGTSAGNGYGNPRNSPGLLVSPGNLNKNMQAKSPPPMNLGMNNRKPDLRVLIPPGSKNTMPSVNQRINNSQSAQSLATPVVSVATPTLPGQGMGGYPSAISTTYGTEYSLSSADLSSLSGFNTASALHLGSVTGWQQQHLHNMPPSALSQLGACTSTHLSQSSNLSLPSTQSLNIKSEPVSPPRDRTTTPSRYPQHTRHEAGRSPVDSLSSCSSSYDGSDREDHRNEFHSPIGLTRPSPDERESPSVKRMRLSEGWAT

SEQ ID NO: 13429 - protein, 312 aa, Homo sapiens
MARENSTFNSDFILLGIFNHSPTHTFLFFLVLAIFSVAFMGNSVMVLLIYLDTQLHTPMYLLLSQLSLMDLMLICTTVPKMAFNYLSGSKSISMAGCATQIFFYTSLLGSECFLLAVMAYDRYTAICHPLRYTNLMSPKICGLMTAFSWILGSTDGIIDVVATFSFSYCGSREIAHFFCDFPSLLILSCSDTSIFEKILFICCIVMIVFPVAIIIASYARVILAVIHMGSGEGRRKAFTTCSSHLLVVGMYYGAALFMYIRPTSDRSPTQDKMVSVFYTILTPMLNPLIYSLRNKEVTRAFMKILGKGKSGE

SEQ ID NO: 13430 - protein, 723 aa, Homo sapiens
MAEEEGPPVELRQRKKPKSSENKESAKEEKISDIPIPERAPKHVLFQRFAKIFIGCLAAVTSGMMYALYLSAYHERKFWFSNRQELEREITFQGDSAIYYSYYKDMLKAPSFERGVYELTHNNKTVSLKTINAVQQMSLYPELIASILYQATGSNEIIEPVYFYIGIVFGLQGIYVTALFVTSWLMSGTWLAGMLTVAWFVINRVDTTRIEYSIPLRENWALPYFACQIAALTGYLKSNLNTYGERFCYLLMSASTYTFMMMWEYSHYLLFLQAISLFLLDTFSVEQSDKVYEVYKIYIFSLFLGYLLQFENPALLVSPLLSLVAALMLAKCLQLNVKKGSFVAKIIKVINFYLVCTLTITLNIIMKMFVPHKENGHMLKFLEVKFGLNMTKNFTMNWLLCQESLQAPSQDFFLRLTQSSLLPFYILVLIICFLSMLQVIFRRINGKSLKETVTLEDGRIGERPEIIYHVIHTILLGSLAMVIEGLKYIWIPYVCMLAAFGVCSPELWMTLFKWLRLRTVHPILLALILSMAVPTIIGLSLWKEFFPRLMTELMELQEFYDPDTVELMTWIKRQAPVAAVFAGSPQLMGAIKLCTGWMVTSLPLYNDDDLLKRNENIYQIYSKRSAEDIYKILTSYKANYLIVEDAICNEVGPMRGCRVKDLLDIANGHMVCEEGDKLTYSKYGRFCHEVKINYSPYVNYFTRVYWNRSYFVYKINTVISFQS

SEQ ID NO: 13431 - protein, 189 aa, Homo sapiens
MACLLRSFQRISAGVFFLALWGMVVGDKLLVVPQDGSHWLSMKDIVEVLSDRGHEIVVVVPEVNLLLKESKYYTRKIYPVPYDQEELKNRYQSFGNNHFAERSFLTAPQTEYRNNMIVIGLYFINCQSLLQDRDTLNFFKESKFDALFTDPALPCGVILAEYLGLPSVYLFRGFPCSLEHTFSRSPDPV

SEQ ID NO: 13432 - protein, 181 aa, Homo sapiens
MPCNNGDDHSEGGLVENHVDSTMNMLGGGGSAGRKPLKSGMKELAVFREKVTEQHRQMGKGGKHHLGLEEPKKLRPPPARTPCQQELDQVLERISTMRLPDERGPLEHLYSLHIPNCDKHGLYNLKQCKMSLNGQRGECWCVNPNTGKLIQGAPTIRGDPECHLFYNEQQEARGVHTQRMQ

SEQ ID NO: 13433 - protein, 426 aa, Homo sapiens
MKNATIVMSVRREQGSSSGEGSLSFEDVAVGFTREEWQFLDQSQKVLYKEVMLENYINLVSIGYRGTKPDSLFKLEQGEPPGIAEGAAHSQICPGGKPHECSVCGRAFSRKAQLIQHQRTERGEKPHGCGECGKTFMRKIQLTEHQRTHTGEKPHECSECGKAFSRKSQLMVHQRTHTGEKPYRCSKCGKAFSRKCRLNRHQRSHTGEKLYGCSVCGKAFSQKAYLTAHQRLHTGDKPYKCSDCGRTFYFKSDLTRHQRIHTGEKPYECSECEKAFRSKSKLIQHQRTHTGERPYSCRECGKAFAHMSVLIKHEKTHIRETAINSLTVEKPSSRSHTSLYMSELIQEQKTVNTVPIEMPSSGTPPLLNKSERLVGRNVVIVEQPFPRNQAFVVNQEFEQRISLTNEVNVAPSVINYILYLTDIVSE

SEQ ID NO: 13434 - protein, 132 aa, Homo sapiens
MRSAVCQFPRHRLAAGRPHPESGRGNASESEEDRSAGSVESPSVSSTHRVSDPKFHPLHSKIIIIKKGHAKDSQRYKVDYESQSTDTQNFSSESKRETEYGPCRREMEDTLNHLKFLNVLSPRGVHIPNCDK

SEQ ID NO: 13435 - protein, 1146 aa, Homo sapiens
MTRSPPLRELPPSYTPPARTAAPQILAGSLKAPLWLRAYFQGLLFSLGCGIQRHCGKVLFLGLLAFGALALGLRMAIIETNLEQLWVEVGSRVSQELHYTKEKLGEEAAYTSQMLIQTARQEGENILTPEALGLHLQAALTASKVQVSLYGKSWDLNKICYKSGVPLIENGMIERMIEKLFPCVILTPLDCFWEGAKLQGGSAYLPGRPDIQWTNLDPEQLLEELGPFASLEGFRELLDKAQVGQAYVGRPCLHPDDLHCPPSAPNHHSRQAPNVAHELSGGCHGFSHKFMHWQEELLLGGMARDPQGELLRAEALQSTFLLMSPRQLYEHFRGDYQTHDIGWSEEQASTVLQAWQRRFVQLAQEALPENASQQIHAFSSTTLDDILHAFSEVSAARVVGGYLLMLAYACVTMLRWDCAQSQGSVGLAGVLLVALAVASGLGLCALLGITFNAATTQVLPFLALGIGVDDVFLLAHAFTEALPGTPLQERMGECLQRTGTSVVLTSINNMAAFLMAALVPIPALRAFSLQAAIVVGCTFVAVMLVFPAILSLDLRRRHCQRLDVLCCFSSPCSAQVIQILPQELGDGTVPVGIAHLTATVQAFTHCEASSQHVVTILPPQAHLVPPPSDPLGSELFSPGGSTRDLLGQEEETRQKAACKSLPCARWNLAHFARYQFAPLLLQSHAKAIVLVLFGALLGLSLYGATLVQDGLALTDVVPRGTKEHAFLSAQLRYFSLYEVALVTQGGFDYAHSQRALFDLHQRFSSLKAVLPPPATQAPRTWLHYYRNWLQGIQAAFDQDWASGRITRHSYRNGSEDGALAYKLLIQTGDAQEPLDFSQLTTRKLVDREGLIPPELFYMGLTVWVSSDPLGLAASQANFYPPPPEWLHDKYDTTGENLRIPPAQPLEFAQFPFLLRGLQKTADFVEAIEGARAACAEAGQAGVHAYPSGSPFLFWEQYLGLRRCFLLAVCILLVCTFLVCALLLLNPWTAGLIVLVLAMMTVELFGIMGFLGIKLSAIPVVILVASVGIGVEFTVHVALGFLTTQGSRNLRAAHALEHTFAPVTDGAISTLLGLLMLAGSHFDFIVRYFFAALTVLTLLGLLHGLVLLPVLLSILGPPPEVIQMYKESPEILSPPAPQGGGLRPEEI

SEQ ID NO: 13436 - protein, 2383 aa, Homo sapiens
FQSPESWKEHKPSSIDRRASDSVFQPKSLEFTKSGPWESEFGQPELGSNDIQDKNEESLPFQNLPMEKSPLPNTSPQGTNHLIEDFASLWHSGRSPTAMPEPWGNPTDDGEPAAVAPFPAWSAFGKEDHDEALKNTWNLHPTSSKTPSVRDPNEWAMAKSGFAFSSSELLDNSPSEINNEAAPEIWGKKNNDSRDHIFAPGNPSSDLDHTWTNSKPPKEDQNGLVDPKTRGKVYEKVDSWNLFEENMKKGGSDVLVPWEDSFLSYKCSDYSASNLGEDSVPSPLDTNYSTSDSYTSPTFAGDEKETEHKPFAKEEGFESKDGNSTAEETDIPPQSLQQSSRNRISSGPGNLDMWASPHTDNSSEINTTHNLDENELKTEHTDGKNISMEDDVGESSQSSYDDPSMMQLYNETNRQLTLLHSSTNSRQTAPDSLDLWNRVILEDTQSTATISDMDNDLDWDDCSGGAAIPSDGQTEGYMAEGSEPETRFTVRQLEPWGLEYQEANQVDWELPASDEHTKDSAPSEHHTLNEKSGQLIANSIWDSVMRDKDMSSFMLPGSSHITDSEQRELPPEIPSHSANVKDTHSPDAPAASGTSESEALISHLDKQDTERETLQSDAASLATRLENPGYFPHPDPWKGHGDGQSESEKEAQGATDRGHLDEEEVIASGVENASGISEKGQSDQELSSLVASEHQEICIKSGKISSLAVTFSPQTEEPEEVLEYEEGSYNLDSRDVQTGMSADNLQPKDTHEKHLMSQRNSGETTETSDGMNFTKYVSVPEKDLEKTEECNFLEPENVGGGPPHRVPRSLDFGDVPIDSDVHVSSTCSEITKNLDVKGSENSLPGAGSSGNFDRDTISSEYTHSSASSPELNDSSVALSSWGQQPSSGYQEENQGNWSEQNHQESELITTDGQVEIVTKVKDLEKNRINEFEKSFDRKTPTFLEIWNDSVDGDSFSSLSSPETGKYSEHSGTHQESNLIASYQEKNEHDISATVQPEDARVISTSSGSDDDSVGGEESIEEEIQVANCHVAEDESRAWDSLNESNKFLVTADPKSENIYDYLDSSEPAENENKSNPFCDNQQSSPDPWTFSPLTETEMQITAVEKEKRSSPETGTTGDVAWQISPKASFPKNEDNSQLEMLGFSADSTEWWKASPQEGRLIESPFERELSDSSGVLEINSSVHQNASPWGVPVQGDIEPVETHYTNPFSDNHQSPFLEGNGKNSHEQLWNIQPRQPDPDADKFSQLVKLDQIKEKDSREQTFVSAAGDELTPETPTQEQCQDTMLPVCDHPDTAFTHAEENSCVTSNVSTNEGQETNQWEQEKSYLGEMTNSSIATENFPAVSSPTQLIMKPGSEWDGSTPSEDSRGTFVPDILHGNFQEGGQLASAAPDLWIDAKKPFSLKADGENPDILTHCEHDSNSQASDSPDICHDSEAKQETEKHLSACMGPEVESSELCLTEPEIDEEPIYEPGREFVPSNAELDSENATVLPPIGYQADIKGSSQPASHKGSPEPSEINGDNSTGLQVSEKGASPDMAPILEPVDRRIPRIENVATSIFVTHQEPTPEGDGSWISDSFSPESQPGARALFDGDPHLSTENPALVPDALLASDTCLDISEAAFDHSFSDASGLNTSTGTIDDMSKLTLSEGHPETPVDGDLGKQDICSSEASWGDFEYDVMGQNIDEDLLREPEHFLYGGDPPLEEDSLKQSLAPYTPPFDLSYLTEPAQSAETIEEAGSPEDESLGCRAAEIVLSALPDRRSEGNQAETKNRLPGSQLAVLHIREDPESVYLPVGAGSNILSPSNVDWEVETDNSDLPAGGDIGPPNGASKEISELEEEKTIPTKEPEQIKSEYKEERCTEKNEDRHALHMDYILVNREENSHSKPETCEERESIAELELYVGSKETGLQGTQLASFPDTCQPASLNERKGLSAEKMSSKSDTRSSFESPAQDQSWMFLGHSEVGDPSLDARDSGPGWSGKTVEPFSELGLGEGPQLQILEEMKPLESLALEEASGPVSQSQKSKSRGRAGPDAVTLQAVTHDNEWEMLSPQPVQKNMIPDTEMEEETEFLELGTRISRPNGLLSEDVGMDIPFEEGVLSPSAADMRPEPPNSLDLNDTHPRRIKLTAPNINLSLDQSEGSILSDDNLDSPDEIDINVDELDTPDEADSFEYTGHDPTANKDSGQESESIPEYTAEEEREDNRLWRTVVIGEQEQRIDMKVIEPYRRVISHGGDSGYYGDGLNAIIVFAACFLPDSSRADYHYVMENLFLYVISTLELMVAEDYMIVYLNGATPRRRMPGLGWMKKCYQMIDRRLRKNLKSFIIVHPSWFIRTILAVTRPFISSKFSSKIKYVNSLSELSGLIPMDCIHIPESIINIDLKLKEKP

SEQ ID NO: 13437 - protein, 374 aa, Homo sapiens
SAVDNILLKLAKFKIGFLRLGQIQKVHPAIQQFTEQEICRSKSIKSLALLEELYNSQLIVATTCMGINHPIFSRKIFDFCIVDEASQISQPICLGPLFFSRRFVLVGDHQQLPPLVLNREARALGMSESLFKRLEQNKSAVVQLTVQYRMNSKIMSLSNKLTYEGKLECGSDKVANAVINLRHFKDVKLELEFYADYSDNPWLMGVFEPNNPVCFLNTDKVPAPEQVEKGGVSNVTEAKLIVFLTSIFVKAGCSPSDIGIIAPYRQQLKIINDLLARSIGMVEVNTVDKYQGRDKSIVLVSFVRSNKDGTVGELLKDWRRLNVAITRAKHKLILLGCVPSLNCYPPLEKLLNHLNSEKLISFFFCIWSHLIALL

SEQ ID NO: 13438 - protein, 895 aa, Homo sapiens
MSAETPITLNIDPQDLQVQTFTVEKLLEPLIIQVTTLVNCPQNPSSRKKGRSKRASVLLASVEEATWNLLDKGEKIAQEATVLKDELTASLEEVRKESEALKVSAERFTDDPCFLPKREAVVQAARALLAAVTRLLILADMIDVMCLLQHVSAFQRTFESLKNVANKSDLQKTYQKLGKELENLDYLAFKRQQDLKSPNQRDEIAGARASLKENSPLLHSICSACLEHSDVASLKASKDTVCEEIQNALNVISNASQGIQNMTTPPEPQAATLGSALDELENLIVLNPLTVTEEEIRPSLEKRLEAIISGAALLADSSCTRDLHRERIIAECNAIRQALQDLLSEYMNNAGKKERSNTLNIALDNMCKKTRDLRRQLRKAIIDHVSDSFLDTTVPLLVLIEAAKNGREKEIKEYAAIFHEHTSRLVEVANLACSMSTNEDGIKIVKIAANHLETLCPQIINAALALAARPKSQAVKNTMEMYKRTWENHIHVLTEAVDDITSIDDFLAVSESHILEDVNKCIIALRDQDADNLDRAAGAIRGRAARVAHIVTGEMDSYEPGAYTEGVMRNVNFLTSTVIPEFVTQVNVALEALSKSSLNVLDDNQFVDISKKIYDTIHDIRCSVMMIRTPEELEDVSDLEEEHEVRSHTSIQTEGKTDRAKMTQLPEAEKEKIAEQVADFKKVKSKLDAEIEIWDDTSNDIIVLAKNMCMIMMEMTDFTRGKGPLKHTTDVIYAAKMISESGSRMDVLARQIANQCPDPSCKQDLLAYLEQIKFYSHQLKICSQVKAEIQNLGGELIMSALDSVTSLIQAAKNLMNAVVQTVKMSYIASTKIIRIQSPAGPRHPVVMWRMKAPAKKPLIKREKPEETCAAVRRGSAKKKIHPLQVMSEFRGRQIY

SEQ ID NO: 13439 - protein, 921 aa, Homo sapiens
MIDLSISNLEGLRTKCATSNDLTQKEIRTLESKLVKYFSRQLSCKKKVALQERNAELDGFPQLRHWFRIVDVRKEVLEEISPGQLSLEDLLEMTDEQVCETVEKYGANREECARLNASLSCLRNVHMSGGNLSKQDWTIQWPTTETGKENNPVCPPEPTPWIRTHLSQSPRVPSKCVQHYCHTSPTPGAPVYTHVDRLTVDAYPGLCPPPPLESGHRSLPPSPRQRHAVRTPPRTPNIVTTVTPPGTPPMRKKNKLKPPGTPPPSSRKLIHLIPGFTALHRSKSHEFQLGHRVDEAHTPKAKKKSKPLNLKIHSSVGSCENIPSQQRSPLLSERSLRSFFVGHAPFLPSTPPVHTEANFSANTLSVPRWSPQIPRRDLGNSIKHRFSTKYWMSQTCTVCGKGMLFGLKCKNCKLKCHNKCTKEAPPCHLLIIHRGDPARLVRTESVPCDINNPLRKPPRYSDLHISQTLPKTNKINKDHIPVPYQPDSSSNPSSTTSSTPSSPAPPLPPSATPPSPLHPSPQCTRQQKNFNLPASHYYKYKQQFIFPDVVPVPETPTRAPQVILHPVTSNPILEGNPLLQIEVEPTSENEEVHDEAEESEDDFEEMNLSLLSARSFPRKASQTSIFLQEWDIPFEQLEIGELIGKGRFGQVYHGRWHGEVAIRLIDIERDNEDQLKAFKREVMAYRQTRHENVVLFMGACMSPPHLAIITSLCKGRTLYSVVRDAKIVLDVNKTRQIAQEIVKGMGYLHAKGILHKDLKSKNVFYDNGKVVITDFGLFSISGVLQAGRREDKLRIQNGWLCHLAPEIIRQLSPDTEEDKLPFSKHSDVFALGTIWYELHAREWPFKTQPAEAIIWQMGTGMKPNLSQIGMGKEISDILLFCWAFEQEERPTFTKLMDMLEKLPKRNRRLSHPGHFWKSAEL

SEQ ID NO: 13440 - protein, 388 aa, Homo sapiens
MEPLASNIQVLLQAAEFLERREREAEHGYASLCPHRSPGPIHRRKKRPPQAPGAQDSGRSVHNELEKRRRAQLKRCLERLKQQMPLGADCARYTTLSLLRRARMHIQKLEDQEQRARQLKERLRSKQQSLQRQLEQLRGLAGAAERERLRADSLDSSGLSSERSDSDQGECPEAEGLCGPRGEPGLLTGPLPAQRSWRWMWRAWCLGVRPSCCGASSPARSTATRTAAAPGYDVPHPGRASALYSCQAHLPGRSPPQAFRAARSHLLEWTKRTLVWEQVLPKHPAAGCQAGPLEGKGQDSSGPPWTPAGQAAWARAQAFGSAAPKGTGSLLGLFPSWTRPPAFASHKLYSIFIKSLFHNFPSIVLPNENGGTPNHRPTGRGNNISSHH

SEQ ID NO: 13441 - protein, 501 aa, Homo sapiens
MAKPDMIRKLEQGEELWTQRIFPSYSYLEEDGKTEDVLVKFKEYQDRHSRPLIFINHKKLIKERSNIYGKTFTLGKNRISKTILCEYKPDGKVLKNISELVIRNISPIKEKFGDSTGWEKSLLNTKHEKIHPAVNLHKQTERVLSGKQELIQHQKVQAPEQPFDHNECEKSFLMKGMLFTHTRAHRGERTFEYNKDGIAFIEKSSLSVHPSNLMEKKPSAYNKYGKFLCRKPVFIMPQRPQTEEKPFHCPYCGNNFRRKSYLIEHQRIHTGEKPYVCNQCGKAFRQKTALTLHEKTHIEGKPFICIDCGKSFRQKATLTRHHKTHTGEKAYECPQCGSAFRKKSYLIDHQRTHTGEKPYQCNECGKAFIQKTTLTVHQRTHTGEKPYICNECGKSFCQKTTLTLHQRIHTGEKPYICNECGKSFRQKAILTVHHRIHTGEKSNGCPQCGKAFSRKSNLIRHQKTHTGEKPYECKQCGKFFSCKSNLIVHQKTHKVETTGIQ

SEQ ID NO: 13442 - protein, 1381 aa, Homo sapiens
MGKATGRKAPLWLRAKFQRLLFKLGCYIQKNCGKFLVVGLLIFGAFAVGLKAANLETNVEELWVEVGGRVSRELNYTRQKIGEEAMFNPQLMIQTPKEEGANVLTTEALLQHLDSALQASRVHVYMYNRQWKLEHLCYKSGELITETGYMDQIIEYLYPCLIITPLDCFWEGAKLQSGTAYLLGKPPLRWTNFDPLEFLEELKKINYQVDSWEEMLNKAEVGHGYMDRPCLNPADPDCPATAPNKNSTKPLDMALVLNGGCHGLSRKYMHWQEELIVGGTVKNSTGKLVSAHALQTMFQLMTPKQMYEHFKGYEYVSHINWNEDKAAAILEAWQRTYVEVVHQSVAQNSTQKVLSFTTTTLDDILKSFSDVSVIRVASGYLLMLAYACLTMLRWDCSKSQGAVGLAGVLLVALSVAAGLGLCSLIGISFNAATTQVLPFLALGVGVDDVFLLAHAFSETGQNKRIPFEDRTGECLKRTGASVALTSISNVTAFFMAALIPIPALRAFSLQAAVVVVFNFAMVLLIFPAILSMDLYRREDRRLDIFCCFTSPCVSRVIQVEPQAYTDTHDNTRYSPPPPYSSHSFAHETQITMQSTVQLRTEYDPHTHVYYTTAEPRSEISVQPVTVTQDTLSCQSPESTSSTRDLLSQFSDSSLHCLEPPCTKWTLSSFAEKHYAPFLLKPKAKVVVIFLFLGLLGVSLYGTTRVRDGLDLTDIVPRETREYDFIAAQFKYFSFYNMYIVTQKADYPNIQHLLYDLHRSFSNVKYVMLEENKQLPKMWLHYFRDWLQGLQDAFDSDWETGKIMPNNYKNGSDDGVLAYKLLVQTGSRDKPIDISQLTKQRLVDADGIINPSAFYIYLTAWVSNDPVAYAASQANIRPHRPEWVHDKADYMPETRLRIPAAEPIEYAQFPFYLNGLRDTSDFVEAIEKVRTICSNYTSLGLSSYPNGYPFLFWEQYIGLRHWLLLFISVVLACTFLVCAVFLLNPWTAGIIVMVLALMTVELFGMMGLIGIKLSAVPVVILIASVGIGVEFTVHVALAFLTAIGDKNRRAVLALEHMFAPVLDGAVSTLLGVLMLAGSEFDFIVRYFFAVLAILTILGVLNGLVLLPVLLSFFGPYPEVSPANGLNRLPTPSPEPPPSVVRFAMPPGHTHSGSDSSDSEYSSQTTVSGLSEELRHYEAQQGAGGPAHQVIVEATENPVFAHSTVVHPESRHHPPSNPRQQPHLDSGSLPPGRQGQQPRRDPPREGLWPPPYRPRRDAFEISTEGHSGPSNRARWGPRGARSHNPRNPASTAMGSSVPGYCQPITTVTASASVTVAVHPPPVPGPGRNPRGGLCPGYPETDHGLFEDPHVPFHVRCERRDSKVEVIELQDVECEERPRGSSSN

SEQ ID NO: 13443 - protein, 414 aa, Homo sapiens
MAAYQQEEQMQLPRADAIRSRLIDTFSLIEHLQGLSQAVPRHTIRELLDPSRQKKLVLGDQHQLVRFSIKPQRIEQISHAQRLLSRLHVRCSQRPPLSLWAGWVLECPLFKNFIIFLVFLNTIILMVEIELLESTNTKLWPLKLTLEVAAWFILLIFILEILLKWLSNFSVFWKSAWNVFDFVVTMLSLLPEVVVLVGVTGQSVWLQLLRICRVLRSLKLLAQFRQIQIIILVLVRALKSMTFLLMLLLIFFYIFAVTGVYVFSEYTRSPRQDLEYHVFFSDLPNSLVTVFILFTLDHWYALLQDVWKVPEVSRIFSSIYFILWLLLGSIIFRSIIVAMMVTNFQNIRKELNEEMARREVQLKADMFKRQIIQRRKNMSHEALTSSHSKIEDRSFGLGDSCARKSARANGNGSG

SEQ ID NO: 13444 - protein, 1154 aa, Homo sapiens
MANDSPAKSLVDIDLSSLRDPAGIFELVEVVGNGTYGQVYKGRHVKTGQLAAIKVMDVTEDEEEEIKLEINMLKKYSHHRNIATYYGAFIKKSPPGHDDQLWLVMEFCGAGSITDLVKNTKGNTLKEDWIAYISREILRGLAHLHIHHVIHRDIKGQNVLLTENAEVKLVDFGVSAQLDRTVGRRNTFIGTPYWMAPEVIACDENPDATYDYRSDLWSCGITAIEMAEGAPPLCDMHPMRALFLIPRNPPPRLKSKKWSKKFFSFIEGCLVKNYMQRPSTEQLLKHPFIRDQPNERQVRIQLKDHIDRTRKKRGEKDETEYEYSGSEEEEEEVPEQEGEPSSIVNVPGESTLRRDFLRLQQENKERSEALRRQQLLQEQQLREQEEYKRQLLAERQKRIEQQKEQRRRLEEQQRREREARRQQEREQRRREQEEKRRLEELERRRKEEEERRRAEEEKRRVEREQEYIRRQLEEEQRHLEVLQQQLLQEQAMLLHDHRRPHPQHSQQPPPPQQERSKPSFHAPEPKAHYEPADRAREVPVRTTSRSPVLSRRDSPLQGSGQQNSQAGQRNSTSIEPRLLWERVEKLVPRPGSGSSSGSSNSGSQPGSHPGSQSGSGERFRVRSSSKSEGSPSQRLENAVKKPEDKKEVFRPLKPADLTALAKELRAVEDVRPPHKVTDYSSSSEESGTTDEEDDDVEQEGADESTSGPEDTRAASSLNLSNGETESVKTMIVHDDVESEPAMTPSKEGTLIVRQTQSASSTLQKHKSSSSFTPFIDPRLLQISPSSGTTVTSVVGFSCDGMRPEAIRQDPTRKGSVVNVNPTNTRPQSDTPEIRKYKKRFNSEILCAALWGVNLLVGTESGLMLLDRSGQGKVYPLINRRRFQQMDVLEGLNVLVTISGKKDKLRVYYLSWLRNKILHNDPEVEKKQGWTTVGDLEGCVHYKVVKYERIKFLVIALKSSVEVYAWAPKPYHKFMAFKSFGELVHKPLLVDLTVEEGQRLKVIYGSCAGFHAVDVDSGSVYDIYLPTHIQCSIKPHAIIILPNTDGMELLVCYEDEGVYVNTYGRITKDVVLQWGEMPTSVAYIRSNQTMGWGEKAIEIRSVETGHLDGVFMHKRAQRLKFLCERNDKVFFASVRSGGSSQVYFMTLGRTSLLSW

SEQ ID NO: 13445 - protein, 372 aa, Homo sapiens
MSKISEAVKRARAAFSSGRTRPLQFRIQQLEALQRLIQEQEQELVGALAADLHKNEWNAYYEEVVYVLEEIEYMIQKLPEWAADEPVEKTPQTQQDELYIHSEPLGVVLVIGTWNYPFNLTIQPMVGAIAAGNSVVLKPSELSENMASLLATIIPQYLDKDLYPVINGGVPETTELLKERFDHILYTGSTGVGKIIMTAAAKHLTPVTLELGGKSPCYVDKNCDLDVACRRIAWGKFMNSGQTCVAPDYILCDPSIQNQIVEKLKKSLKEFYGEDAKKSRDYGRIISARHFQRVMGLIEGQKVAYGGTGDAATRYIAPTILTDVDPQSPVMQEEIFGPVLPIVCVRSLEEAIQFINQREKPLALYMFSSNDK

SEQ ID NO: 13446 - protein, 279 aa, Homo sapiens
MVDHLANTEINSQRIAAVESCFGASGQPLALPGRVLLGEGVLTKECRKKAKPRIFFLFNDILVYGSIVLNKRKYRSQHIIPLEEVTLELLPETLQAKNRWMIKTAKKSFVVSAASATERQEWISHIEECVRRQLRATGRPPSTEHAAPWIPDKATDICMRCTQTRFSALTRRHHCRKCGFVVCAECSRQRFLLPRLSPKPVRVCSLCYRELAAQQRQEEAEEQGAGSPGQPAHLARPICGASSGDDDDSDEDKEGSRDGDWPSSVEFYASGVAWSAFHS

SEQ ID NO: 13447 - protein, 583 aa, Homo sapiens
MTSQSSVISNSCVTMERLSHMMERKAWCSQESALSEEEEDTTRPLETVTFKDVAVDLTQEEWEQMKPAQRNLYRDVMLENYSNLVTVGCQVTKPDVIFKLEQEEEPWVMEEEMFGRHCPEPRRGENCCASEVMAEGLKFKDVVIYFSQKEWECLHSAQKDLYRDVMLENYGNLVLLGLSDTKPNVISLLEQKKEPWMVKRKETKEWCPDWEFGRETKNLSPKENIYEIRSPQQEKARVIREIRCQVERQQGHQEGHFRPAVIPFTSMQCTAHREYQWLHTGEKSCECRKCKNAFRYQSCPIQHEIIHNKEKEPECGECRKIFNSGSDLIKHQTLHESKKHSENNKCAFNHDSGITQPQSINTGEKPHKCKECGKAFRSSSQISQHQRMHLGEKPYKCRECGKAFPSTAQLNLHQRIHTDEKYYESKACGKAFTRPSHLFRHQRIHTGEKPHKCKECGKAFRYDTQLSLHQIIHTGERRYECRECGKVYSCASQLSLHQRIHTGEKPHECKECGKAFISDSHLIRHQSVHTGEKPCKCKECGKSFRRGSELTRHQRAHTGEKPYECKECEKAFTCSTELVRHQK

SEQ ID NO: 13448 - protein, 482 aa, Homo sapiens
MPRNQGFSEPEYSAEYSAEYSVSLPSDPDRGVGRTHEISVRNSGSCLCLPRFMRLTFVPESLENLYQTYFKRQRHETLLVLVVFAALFDCYVVVMCAVVFSSDKLASLAVAGIGLVLDIILFVLCKKGLLPDRVTRRVLPYVLWLLITAQIFSYLGLNFARAHAASDTVGWQVFFVFSFFITLPLSLSPIVIISVVSCVVHTLVLGVTVAQQQQEELKGMQLLREENLMLSILPKHVADEMLKDMKKDESQKDQQQFNTMYMYRHENVSILFADIVGFTQLSSACSAQELVKLLNELFARFDKLAAKYHQLRIKILGDCYYCICGLPDYREDHAVCSILMGLAMVEAISYVREKTKTGVDMRVGVHTGTVLGGVLGQKRWQYDVWSTDVTVANKMEAGGIPGRVHISQSTMDCLKGEFDVEPGDGGSRCDYLEEKGIETYLIIASKPEVKKTATQNGLNGSALPNGAPASSKSSSPALIETK

SEQ ID NO: 13449 - protein, 1416 aa, Homo sapiens; identical to SEQ ID NO: 10327

SEQ ID NO: 13450 - protein, 333 aa, Homo sapiens
MGTARIAPGLALLLCCPVLSSAYALVDADDVMTKEEQIFLLHRAQAQCEKRLKEVLQRPASIMESDKGWTSASTSGKPRKDKASGKLYPESEEDKEAPTGSRYRGRPCLPEWDHILCWPLGAPGEVVAVPCPDYIYDFNHKGHAYRRCDRNGSWELVPGHNRTWANYSECVKFLTNETREREVFDRLGMIYTVGYSVSLASLTVAVLILAYFRRLHCTRNYIHMHLFLSFMLRAVSIFVKDAVLYSGATLDEAERLTEEELRAIAQAPPPPATAAAGYAGCRVAVTFFLYFLATNYYWILVEGLYLHSLIFMAFFSEKKYLWGFTVFGWGAGT

SEQ ID NO: 13451 - protein, 1090 aa, Homo sapiens
MCVRSCFQSPRLQWVWRTAFLKHTQRRHQGSHRWTHLGGSTYRAVIFDMGGVLIPSPGRVAAEWEVQNRIPSGTILKALMEGGENGPWMRFMRAEITAEGFLREFGRLCSEMLKTSVPVDSFFSLLTSERVAKQFPVMTEAITQIRAKGLQTAVLSNNFYLPNQKSFLPLDRKQFDVIVESCMEGICKPDPRIYKLCLEQLGLQPSESIFLDDLGTNLKEAARLGIHTIKRQGFAVLPKLVSNSWAQAIYPPYPPKVVRLQVNDPETAVKELEALLGFTLRVGVPNTRPVKKTMEIPKDSLQKYLKDLLGIQTTGPLELLQFDHGQSNPTYYIRLANRDLVLRKKPPGTLLPSAHAIEREFRIMKALANAGVPVPNVLDLCEDSSVIGTPFYVMEYCPGLIYKDPSLPGLEPSHRRAIYTAMNTVLCKIHSVDLQAVGLEDYGKQGDYIPRQVRTWVKQYRASETSTIPAMERLIEWLPLHLPRQQRTTVVHGDFRLDNLVFHPEEPEVLAVLDWELSTLGDPLADVAYSCLAHYLPSSFPVLRGINDCDLTQLGIPAAEEYFRMYCLQMGLPPTENWNFYMAFSFFRVAAILQGVYKRSLTGQASSTYAEQTGKLTEFVSNLAWDFAVKEGFRVFKEMPFTNPLTRSYHTWARPQSQWCPTGSRSYSSVPEASPAHTSRGGLVISPESLSPPVRELYHRLKHFMEQRVYPAEPELQSHQASAARWSPSPLIEDLKEKAKAEGLWNLFLPLEADPEKKYGAGLTNVEYAHLCELMGTSLYAPEVCNCSAPDTGNMELLVRYGTEAQKARWLIPLLEGKARSCFAMTEPQVASSDATNIEASIREEDSFYVINGHKWWITGILDPRCQLCVFMGKTDPHAPRHRQQSVLLVPMDTPGIKIIRPLTVYGLEDAPGGHGEVRFEHVRVPKENMVLGPGRGFEIAQGRLGPGRIHHCMRLIGFSERALALMKARVKSRLAFGKPLVEQGTVLADIAQSRVEIEQARLLVLRAAHLMDLAGNKAAALDIAMIKMVAPSMASRVIDRAIQAFGAAGLSSDYPLAQFFTWARALRFADGPDEVHRATVAKLELKHRI

SEQ ID NO: 13452 - protein, 715 aa, Homo sapiens
MFGRKRSVSFGGFGWIDKTMLASLKVKKQELANSSDATLPDRPLSPPLTAPPTMKSSEFFEMLEKMQDDYIPYPSIDEVVEKGGPYPQVILPQFGGYWIEDPENVGTPTSLGSSICEEEEEDNLSPNTFGYKLECKGEARAYRRHFLGKDHLNFYCTGSSLGNLILSVKCEEAEGIEYLRVILRSKLKTVHERIPLAGLSKLPSVPQIAKAFCDDAVGLRFNPVLYPKASQMIVSYDEHEVNNTFKFGVIYQKARQTLEEELFGNNEESPAFKEFLDLLGDTITLQDFKGFRGGLDVTHGQTGVESVYTTFRDREIMFHVSTKLPFTDGDAQQLQRKRHIGNDIVAIIFQEENTPFVPDMIASNFLHAYIVVQVETPGTETPSYKVSVTAREDVPTFGPPLPSPPVFQKGPEFREFLLTKLTNAENACCKSDKFAKLEDRTRAALLDNLHDELHAHTQAMLGLGPEEDKFENGGHGGFLESFKRAIRVRSHSMETMVGGQKKSHSGGIPGSLSGGISHNSMEVTKTTFSPPVVAATVKNQSRSPIKRRSGLFPRLHTGSEGQGDSRARCDSTSSTPKTPDGGHSSQEIKSETSSNPSSPEICPNKEKPFMKLKENGRAISRSSSSTSSVSSTAGEGEAMEEGDSGGSQPSTTSPFKQEVFVYSPSPSSESPSLGAAATPIIMSRSPTDAKSRNSPRSNLKFRFDKLSHASSGAGH

SEQ ID NO: 13453 - protein, 681 aa, Homo sapiens
MFVGSDTVNEFKSEDGAIHVIERRCKLDVDAPRLLKKIAGVDYVYFVQKNSLNSRERTLHIEAYNETFSNRVIINEHCCYTVHPENEDWTCFEQSASLDIKSFFGFESTVEKIAMKQYTSNIKKGKEIIEYYLRQLEEEGITFVPRWSPPSITTSSETSSSSSKKQAASMAVVIPEAALKEGLSGDALSSPSAPEPVVGTPDDKLDADYIKRYLGDLTPLQESCLIRLRQWLQETHKGKIPKDEHILRFLRARDFNIDKAREIMCQSLTWRKQHQVDYILETWTPPQVLQDYYAGGWHHHDKDGRPLYVLRLGQMDTKGLVRALGEEALLRYVLSINEEGLRRCEENTKVFGRPISSWTCLVDLEGLNMRHLWRPGVKALLRIIEVVEANYPETLGRLLILRAPRVFPVLWTLVSPFIDDNTRRKFLIYAGNDYQGPGGLLDYIDKEIIPDFLSGECMCEVPEGGLVPKSLYRTAEELENEDLKLWTETIYQSASVFKGAPHEILIQIVDASSVITWDFDVCKGDIVFNIYHSKRSPQPPKKDSLGAHSITSPGGNNVQLIDKVWQLGRDYSMVESPLICKEGESVQGSHVTRWPGFYILQWKFHSMPACAASSLPRVDDVLASLQVSSHKCKVMYYTEVIGSEDFRGSMTSLESSHSGFSQLSAATTSSSQSHSSSMISR

SEQ ID NO: 13454 - protein, 543 aa, Homo sapiens
MVRPQDTVAYEDLSEDYTQKKWKGLALSQRALHWNMMLENDRSMASLGRNMMESSELTPKQEIFKGSESSNSTSGGLFGVVPGGTETGDVCEDTFKELEGQPSNEEGSRLESDFLEIIDEDKKKSTKDRYEEYKEVEEHPPLSSSPVEHEGVLKGQKSYRCDECGKAFYWSSHLIGHRRIHTGEKPYECNECGKTFRQTSQLIVHLRTHTGEKPYECSECGKAYRHSSHLIQHQRLHNGEKPYKCNECAKAFNQSSKLFDHQRTHTGEKPYECKECGAAFSRSKNLVRHQFLHTGKKPYKCNECGRAFCSNRNLIDHQRTHTGEKPYKCNECGKAFSRSKCLIRHQSLHTGEKPYKCSECGKAFNQISQLVEHERIHTGEKPFKCSECGKAFGLSKCLIRHQRLHTSEKPYKCNECGKSFNQNSYLIIHQRIHTGEKPYECNECGKVFSYNSSLMVHQRTHTGEKPYKCNSCGKAFSDSSQLTVHQRVHTGEKNLMNVLSVGKPLVSVPLLITTSELMLERSPQVWLGHLLKAWFSETDSKDL

SEQ ID NO: 13455 - protein, 290 aa, Homo sapiens
MWVTKLLPALLLQHVLLHLLLLPIAIPYAEGQRKRRNTIHEFKKSAKTTLIKIDPALKIKTKKVNTADQCANRCTRNKGLPFTCKAFVFDKARKQCLWFPFNSMSSGVKKEFGHEFDLYENKDYIRNCIIGKGRSYKGTVSITKSGIKCQPWSSMIPHEHSFLPSSYRGKDLQENYCRNPRGEEGGPWCFTSNPEVRYEVCDIPQCSEVECMTCNGESYRGLMDHTESGKICQRWDHQTPHRHKFLPERYPDKGFDDNYCRNPDGQPRPWCYTLDPHTRWEYCAIKTCET

SEQ ID NO: 13456 - protein, 127 aa, Homo sapiens
MGRPLLLPLLLLLQPPAFLQPGGSTGSGPSYLYGVTQPKHLSASMGGSVEIPFSFYYPWELAIVPNVRISWRRGHFHGQSFYSTRPPSIHKDYVNRLFLNWTEGQESGFLRISNLRKEDQSVYFCRV

SEQ ID NO: 13457 - protein, 706 aa, Homo sapiens
MAGLTAAAPRPGVLLLLLSILHPSRPGGVPGAIPGGVPGGVFYPGAGLGALGGGALGPGGKPLKPVPGGLAGAGLGAGLGAFPAVTFPGALVPGGVADAAAAYKAAKAGAGLGGVPGVGGLGVSAGAVVPQPGAGVKPGKVPGVGLPGVYPGGVLPGARFPGVGVLPGVPTGAGVKPKAPGVGGAFAGIPGVGPFGGPQPGVPLGYPIKAPKLPGGYGLPYTTGKLPYGYGPGGVAGAAGKAGYPTGTGVGPQAAAAAAAKAAAKFGAGAAGVLPGVGGAGVPGVPGAIPGIGGIAGVGTPAAAAAAAAAAKAAKYGAAAGLVPGGPGFGPGVVGVPGAGVPGVGVPGAGIPVVPGAGIPGAAVPGVVSPEAAAKAAAKAAKYGARPGVGVGGIPTYGVGAGGFPGFGVGVGGIPGVAGVPGVGGVPGVGGVPGVGISPEAQAAAAAKAAKYGVGTPAAAAAKAAAKAAQFGLVPGVGVAPGVGVAPGVGVAPGVGLAPGVGVAPGVGVAPGVGVAPGIGPGGVAAAAKSAAKVAAKAQLRAAAGLGAGIPGLGVGVGVPGLGVGAGVPGLGVGAGVPGFGAVPGALAAAKAAKYGAAVPGVLGGLGALGGVGIPGGVVGAGPAAAAAAAKAAAKAAQFGLVGAAGLGGLGVGGLGVPGVGGLGGIPPAAAAKAAKYGVAARPGFGLSPIFPGGACLGKACGRKRK

SEQ ID NO: 13458 - protein, 389 aa, Homo sapiens
LTDRQTDTAPSPSYHLLPGRRRTVDAAASRGQGPEPAPGGGVEGVGARGVALKLFVQLLGCSRFGGAVVRAGEAEPSGAARSASSGREEPQPEEGEEEEEKEEERGPQWRLGARKPGSWTGEAAVCADSAPAARAPQALARASGRGGRVARRGAEESGPPHSPSRRGSASRAGPGRASETMNFLLSWVHWSLALLLYLHHAKWSQAAPMAEGGGQNHHEVVKFMDVYQRSYCHPIETLVDIFQEYPDEIEYIFKPSCVPLMRCGGCCNDEGLECVPTEESNITMQIMRIKPHQGQHIGEMSFLQHNKCECRPKKDRARQEKKSVRGKGKGQKRKRKKSRPCGPCSERRKHLFVQDPQTCKCSCKNTDSRCKARQLELNERTCRCDKPRR

SEQ ID NO: 13459 - protein, 330 aa, Homo sapiens
MTPKISWTSKFSVCPESAMACAAVMIPGLLRCSVGAIRIEAASLRLTLSTLRHLTLTSIMKSKRKTDHMERTASVLRREIVSAAKVCGAASESPSVKSLRLLVADQDFSFKAGQWVDFFIPGVSVVGGFSICSSPRLLEQERVIELAVKYTNHPPALWVHNTCTLDCEVAVRVGGEFFFDPQPADASRNLVLIAGGVGINPLLSILRHAADLLREQANKRNGYEIGTIKLFYSAKNTSELLFKKNILDLVNEFPEKIACSLHVTKQTTQINAELKPYITEGRITEKEIRDHISKETLFYICGPPPMTDFFSKQLENNHVPKEHICFEKWW

SEQ ID NO: 13460 - protein, 102 aa, Homo sapiens
MLPPQKKPWESMAKGLVLGALFTSFLLLVYSYAVPPLHAGLASTTPEAAASCSPPALEPEAVIRANGSAGECQPRRNIVFLKTHKTASSTLLNILFRFGQKH

SEQ ID NO: 13461 - protein, 677 aa, Homo sapiens
MLARRQRDPLQALRRRNQELKQQVDSLLSESQLKEALEPNKRQHIYQRCIQLKQAIDENKNALQKLSKADESAPVANYNQRKEEEHTLLDKLTQQLQGLAVTISRENITEVGAPTEEEEESESEDSEDSGGEEEDAEEEEEEKEENESHKWSTGEEYIAVGDFTAQQVGDLTFKKGEILLVIEKKPDGWWIAKDAKGNEGLVPRTYLEPYSEEEEGQESSEEGSEEDVEAVDETADGAEVKQRTDPHWSAVQKAISEQINTVDVLTTMGAIPAGFRPSTLSQLLEEGNQFRANYFLQPELMPSQLAFRDLMWDATEGTIRSRPSRISLILTLWSCKMIPLPGMSIQVLSRHVRLCLFDGNKVLSNIHTVRATWQPKKPKTWTFSPQVTRILPCLLDGDCFIRSNSASPDLGILFELGISYIRNSTGERGELSCGWVFLKLFDASGVPIPAKTYELFLNGGTPYEKGIEVDPSISRRAHGSVFYQIMTMRRQPQLLVKLRSLNRRSRNVLSLLPETLIGNMCSIHLLIFYRQILGDVLLKDRMSLQSTDLISHPMLATFPMLLEQPDVMDALRSSWAGKESTLKRSEKRDKEFLKSTFLLVYHDCVLPLLHSTRLPPFRWAEEETETARWKVITDFLKQNQENQGALQALLSPDGVHEPFDLSEQTYDFLGEMRKNAV

SEQ ID NO: 13462 - protein, 297 aa, Homo sapiens
MEVMNLMEQPIKVTEWQQTYTYDSGIHSGANTCVPSVSSKGIMEEDEACGRQYTLKKTTTYTQGVPPSQGDLEYQMSTTARAKRVREAMCPGVSGEDSSLLLATQVEGQATNLQRLAEPSQLLKSAIVHLINYQDDAELATRALPELTKLLNDEDPVVVTKAAMIVNQLSKKEASRRALMGSPQLVAAVVRTMQNTSDLDTARCTTSILHNLSHHREGLLAIFKSGGIPALVRMLSSPVESVLFYAITTLHNLLLYQEGAKMAVRLADGLQKMVPLLNKNNPKFLAITTDCLQLLAY

SEQ ID NO: 13463 - protein, 612 aa, Homo sapiens
MRNPNDEKYRSIRIGNTAFSTRLLPVRGAVECLFEMGFEEGETHLIFPKKASVEQLQKIRDLIAIERSSRLDGSNKSHKVKSSQQPAASTQLPTTPSSNPSGLNQHTRNRQGQSSDPPSASTVAADSAILEVLQSNIQHVLVYENPALQEKALACIPVQELKRKSQEKLSRARKLDKGINISDEDFLLLELLHWFKEEFFHWVNNVLCSKCGGQTRSRDRSLLPSDDELKWGAKEVEDHYCDACQFSNRFPRYNNPEKLLETRCGRCGEWANCFTLCCRAVGFEARYVWDYTDHVWTEVYSPSQQRWLHCDACEDVCDKPLLYEIGWGKKLSYVIAFSKDEVVDVTWRYSCKHEEVIARRTKVKEALLRDTINGLNKQRQLFLSENRRKELLQRIIVELVEFISPKTPKPGELGGRISGSVAWRVARGEMGLQRKETLFIPCENEKISKQLHLCYNIVKDRYVRVSNNNQTISGWENGVWKMESIFRKVETDWHMVYLARKEGSSFAYISWKFECGSVGLKVDSISIRTSSQTFQTGTVEWKLRSDTAQVELTGDNSLHSYADFSGATEVILEAELSRGDGDVAWQHTQLFRQSLNDHEENCLEIIIKFSDL

SEQ ID NO: 13464 - protein, 310 aa, Homo sapiens
MEEDSLEDSNLPPKVWHSEMTVSVTGEPPSTVEEEGIPKETDIEIIPEIPETLEPLSLPDVLRISAVLEDTTDQLSILNYIMPVQYEGRQSICVKSREMNLEGTNLDKLPMASTITKIPSPLITEEGPNLPEIRHRGRFAVEFNKMQDLVFKKPTRQTIMTTETLKKIQIDRQFFSDVIADTIKELQDSATYNSLLQALSKERENKMHFYDIIAREEKGRKQIISLQKQLINVKKEWQFEVQSQNEYIANLKDQLQEMKAKSNLENRYMKTNTELQIAQTQKKCNRTEELLVEEIEVIPGTLAKNPGDGN

SEQ ID NO: 13465 - protein, 373 aa, Homo sapiens
MALSRVCWARSAVWGSAVTPGHFVTRRLQLGRSGLAWGAPRSSKLHLSPKADVKNLMSYVVTKTKAINGKYHRFLGRHFPRFYVLYTIFMKGLQMLWADAKKARRIKTNMWKHNIKFHQLPYREMEHLRQVWARGRYPEVHGEFRQDVTKCLFLGIISIPPFANYLVFLLMYLFPRQLLIRHFWTPKQQTDFLDIYHAFRKQSHPEIISYLEKVIPLISDAGLRWRLTDLCTKIQRGTHPAIHDILALRECFSNHPLGMNQLQALHVKALSRAMLLTSYLPPPLLRHRLKTHTTVIHQLDKALAKLGIGQLTAQEVKSACYLRGLNSTHIGEDRCRTWLGEWLQISCSLKEAELSLLLHNVVLLSTNYLGTRR

SEQ ID NO: 13466 - protein, 2502 aa, Homo sapiens
NWEDNSVIFLLVQSMVVDLKNLLFNPSKPFSRGSQPADVDLMIDCLVSCFRISPHNNQHFKICLAQNSPSTFHYVLVNSLHRIITNSALDWWPKIDAVYCHSVELRNMFGETLHKAVQGCGAHPAIRMAPSLTFKEKVTSLKFKEKPTDLETRSYKYLLLSMVKLIHADPKLLLCNPRKQGPETQGSTAELITGLVQLVPQSHMPEIAQEAMEALLVLHQLDSIDLWNPDAPVETFWEISSQMLFYICKKLTSHQMLSSTEILKWLREILICRNKFLLKNKQADRSSCHFLLFYGVGCDIPSSGNTSQMSMDHEELLRTPGASLRKGKGNSSMDSAAGCSGTPPICRQAQTKLEVALYMFLWNPDTEAVLVAMSCFRHLCEEADIRCGVDEVSVHNLLPNYNTFMEFASVSNMMSTGRAALQKRVMALLRRIEHPTAGNTEAWEDTHAKWEQATKLILNYPKAKMEDGQAAESLHKTIVKRRMSHVSGGGSIDLSDTDSLQEWINMTGFLCALGGVCLQQRSNSGLATYSPPMGPVSERKGSMISVMSSEGNADTPVSKFMDRLLSLMVCNHEKVGLQIRTNVKDLVGLELSPALYPMLFNKLKNTISKFFDSQGQVLLTDTNTQFVEQTIAIMKNLLDNHTEGSSEHLGQASIETMMLNLVRYVRVLGNMVHAIQIKTKLCQLVEVMMARRDDLSFCQEMKFRNKMVEYLTDWVMGTSNQAADDDVKCLTRDLDQASMEAVVSLLAGLPLQPEEGDGVELMEAKSQLFLKYFTLFMNLLNDCSEVEDESAQTGGRKRGMSRRLASLRHCTVLAMSNLLNANVDSGLMHSIGLGYHKDLQTRATFMEVLTKILQQGTEFDTLAETVLADRFERLVELVTMMGDQGELPIAMALANVVPCSQWDELARVLVTLFDSRHLLYQLLWNMFSKEVELADSMQTLFRGNSLASKIMTFCFKVYGATYLQKLLDPLLRIVITSSDWQHVSFEVDPTRLEPSESLEENQRNLLQMTEKFFHAIISSSSEFPPQLRSVCHCLYQVVSQRFPQNSIGAVGSAMFLRFINPAIVSPYEAGILDKKPPPRIERGLKLMSKILQSIANHVLFTKEEHMRPFNDFVKSNFDAARRFFLDIASDCPTSDAVNHSLSFISDGNVLALHRLLWNNQEKIGQYLSSNRDHKAVGRRPFDKMATLLAYLGPPEHKPVADTHWSSLNLTSSKFEEFMTRHQVHEKEEFKALKTLSIFYQAGTSKAGNPIFYYVARRFKTGQINGDLLIYHVLLTLKPYYAKPYEIVVDLTHTGPSNRFKTDFLSKWFVVFPGFAYDNVSAVYIYNCNSWVREYTKYHERLLTGLKGSKRLVFIDCPGKLAEHIEHEQQKLPAATLALEEDLKVFHNALKLAHKDTKVSIKVGSTAVQVTSAERTKVLGQSVFLNDIYYASEIEEICLVDENQFTLTIANQGTPLTFMHQECEAIVQSIIHIRTRWELSQPDSIPQHTKIRPKDVPGTLLNIALLNLGSSDPSLRSAAYNLLCALTCTFNLKIEGQLLETSGLCIPANNTLFIVSISKTLAANEPHLTLEFLEECISGFSKSSIELKHLCLEYMTPWLSNLVRFCKHNDDAKRQRVTAILDKLITMTINEKQMYPSIQAKIWGSLGQITDLLDVVLDSFIKTSATGGLGSIKAEVMADTAVALASGNVKLVSSKVIGRMCKIIDKTCLSPTPTLEQHLMWDDIAILARYMLMLSFNNSLDVAAHLPYLFHVVTFLVATGPLSLRASTHGLVINIIHSLCTCSQLHFSEETKQVLRLSLTEFSLPKFYLLFGISKVKSAAVIAFRSSYRDRSFSPGSYERETFALTSLETVTEALLEIMEACMRDIPTCKWLDQWTELAQRFAFQYNPSLQPRALVVFGCISKRVSHGQIKQIIRILSKALESCLKGPDTYNSQVLIEATVIALTKLQPLLNKDSPLHKALFWVAVAVLQLDEVNLYSAGTALLEQNLHTLDSLRIFNDKSPEEVFMAIRNPLEWHCKQMDHFVGLNFNSNFNFALVGHLLKGYRHPSPAIVARTVRILHTLLTLVNKHRNCDKFEVNTQSVAYLAALLTVSEEVRSRCSLKHRKSLLLTDISMENVPMDTYPIHHGDPSYRTLKETQPWSSPKGSEGYLAATYPTVGQTSPRARKSMSLDMGQPSQANTKKLLGTRKSFDHLISDTKAPKRQEMESGITTPPKMRRVAETDYEMETQRISSSQQHPHLRKVSVSESNVLLDEEVLTDPKIQALLLTVLATLVKYTTDEFDQRILYEYLAEASVVFPKVFPVVHNLLDSKINTLLSLCQDPNLLNPIHGIVQSVVYHEESPPQYQTSYLQSFGFNGLWRFAGPFSKQTQIPDYAELIVKFLDALIDTYLPGIDEETSEESLLTPTSPYPPALQSQLSITANLNLSNSMTSLATSQHSPASLPCSKSAVFMQLFPHQGIDKENVELSPTTGHCNSGRTRHGSASQVQKQRSAGSFKRNSIKKIV

SEQ ID NO: 13467 - protein, 556 aa, Homo sapiens
MSALPRDLELSNPREKLTKPVQATLSSLKMLDVGKWPIFSLCSEEELQLIRQACVFGSAGNEVLYTTVNDEIFVLGTNCCGCLGLGDVQSTIEPRRLDSLNGKKIACLSYGSGPHIVLATTEGEVFTWGHNAYSQLGNGTTNHGLVPCHISTNLSNKQVIEVACGSYHSLVLTSDGEVFAWGYNNSGQVGSGSTVNQPIPRRVTGCLQNKVVVTIACGQMCCMAVVDTGEVYVWGYNGNGQLGLGNSGNQPTPCRVAALQGIRVQRVACGYAHTLVLTDEGQVYAWGANSYGQLGTGNKSNQSYPTPVTVEKDRIIEIAACHSTHTSAAKTQGGHVYMWGQCRGQSVILPHLTHFSCTDDVFACFATPAVTWRLLSVEPDDHLTVAESLKREFDNPDTADLKFLVDGKYIYAHKVLLKIRCEHFRSSLEDNEDDIVEMSEFSYPVYRAFLEYLYTDSISLSPEEAVGLLDLATFYRENRLKKLCQQTIKQGICEENAIALLSAAVKYDAQDLEEFCFRFCINHLTVVTQTSGFAEMDHDLLKNFISKASRVGAFKN

SEQ ID NO: 13468 - protein, 140 aa, Homo sapiens
KRVNLAQVDRPRVDIECAGKGVQSSLIHNYKKNPNFNTLVKWFEVDLPENELLHPPLNIRVVDCRAFGRYTLVGSHAVSSLRRFIYRPPDRSAPSWNTTGEVVVTMEPEVPIKKLETMVKLDAVRRVGSAPCWLGTCNFV

SEQ ID NO: 13469 - protein, 711 aa, Homo sapiens [sequence omitted]

SEQ ID NO: 13470 - protein, 120 aa, Homo sapiens
MKKKLVVLGLLAVVLVLVIVGLCLWLPSASKEPDNHVYTRAAVAADAKQCSKIGRDALRDGGSAVDAAIAALLCVGLMNAHSMGIGGGLFLTIYNSTTRKAEVINAREVAPRLAFATMFN

SEQ ID NO: 13471 - protein, 300 aa, Homo sapiens
MAEEVSTLMKATVLMRQPGRVQEIVGALRKGGGDRLQVISDFDMTLSRFAYNGKRCPSSYNILDNSKIISEECRKELTALLHHYYPIEIDPHRTVKEKLPHMVEWWTKAHNLLCQQKIQKFQIAQVVRESNAMLREGYKTFFNTLYHNNIPLFIFSAGIGDILEEIIRQMKVFHPNIHIVSNYMDFNEDGFLQGFKGQLIHTYNKNSSACENSGYFQQLEGKTNVILLGDSIGDLTMADGVPGVQNILKIGFLNDKVEERRERYMDSYDIVLEKDETLDVVNGLLQHILCQGVQLEMQGP

SEQ ID NO: 13472 - protein, 440 aa, Homo sapiens
MQTKGGQTWARRALLLGILWATAHLPLSGTSLPQRLPRATALGLSQDVAGTTFMAAGSSAPELVTAFLGVFITKGDIGISTILGSAIYNLLGICAACGLLSNTVSTLSCWPLFRDCAAYTISAAAVLGIIYDNQVYWYEGALLLLIYGLYVLVLCFDIKINQYIIKKCSPCCACLAKAMERSEQQPLMGWEDEGQPFIRRQSRTDSGIFYEDSGYSQLSISLHGLSQVSEDPPSVFNMPEADLKRIFWVLSLPIITLLFLTTPDCRKKFWKNYFVITFFMSAIWISAFTYILVWMVTITGETLEIPDTVMGLTLLAAGTSIPDTIASVLVARKGKGDMAMSNIVGSNVFDMLCLGIPWFIKTAFINGSAPAEVNSRGLTYITISLNISIIFLFLAVHFNGWKLDRKLGIVCLLSYLGLATLSVLYELGIIGNNKIRGCGG

SEQ ID NO: 13473 - protein, 179 aa, Homo sapiens
MDGSGEQPRGGGPTSSEQIMKTGALLLQGFIQDRAGRMGGEAPELALDPVPQDASTKKLSECLKRIGDELDSNMELQRMIAAVDTDSPREVFFRVAADMFSDGNFNWGRVVALFYFASKLVLKALCTKVPELIRTIMGWTLDFLRERLLGWIQDQGGWTVTIFVAGVLTASLTIWKKMG

SEQ ID NO: 13474 - protein, 251 aa, Homo sapiens
MAAGGPGAGSAAPVSSTSSLPLAALNMRVRRRLSLFLNVRTQVAADWTALAEEMDFEYLEIRQLETQADPTGRLLDAWQGRPGASVGRLLELLTKLGRDDVLLELGPSIGHMPERFDAFICYCPSDIQFVQEMIRQLEQTNYRLKLCVSDRDVLPGTCVWSIASELIEKRCRRMVVVVSDDYLQSKECDFQTKFALSLSPGAHQKRLIPIKYKAMKKEFPSILRFITVCDYTNPCTKSWFWTRLAKALSLP

SEQ ID NO: 13475 - protein, 535 aa, Homo sapiens
MDNYSTGYDVKPPCLYQMPLSGQQSSIKVEDIQMHNYQQHSHLPPQSEEMMPHSGSVYYKPSSPPTPTTPGFQVQHSPMWDDPGSLHNFHQNYVATTHMIEQRKTPVSRLSLFSFKQSPPGTPVSSCQMRFDGPLHVPMNPEPAGSHHVVDGQTFAVPNPIRKPASMGFPGLQIGHASQLLDTQVPSPPSRGSPSNEGLCAVCGDNAACQHYGVRTCEGCKGFFKRTVQKNAKYVCLANKNCPVDKRRRNRCQYCRFQKCLAVGMVKEVVRTDSLKGRRGRLPSKPKSPQEPSPPSPPVSLISALVRAHVDSNPAMTSLDYSRFQANPDYQMSGDDTQHIQQFYDLLTGSMEIIRGWAEKIPGFADLPKADQDLLFESAFLELFVLRLAYRSNPVEGKLIFCNGVVLHRLQCVRGFGEWIDSIVEFSSNLQNMNIDISAFSCIAALAMVTERHGLKEPKRVEELQNKIVNCLKDHVTFNNGGLNRPNYLSKLLGKLPELRTLCTQGLQRIFYLKLEDLVPPPAIIDKLFLDTLPF

SEQ ID NO: 13476 - protein, 365 aa, Homo sapiens
MASNSSSCPTPGGGHLNGYPVPPYAFFFPPMLGGLSPPGALTTLQHQLPVSGYSTPSPATVRNDRNKKKKEVPKPECSESYTLTPEVGELIEKVRKAHQETFPALCQLGKYTTNNSSEQRVSLDIDLWDKFSELSTKCIIKTVEFAKQLPGFTTLTIADQITLLKAACLDILILRICTRYTPEQDTMTFSDGLTLNRTQMHNAGFGPLTDLVFAFANQLLPLEMDDAETGLLSAICLICGDRQDLEQPDRVDMLQEPLLEALKVYVRKRRPSRPHMFPKMLMKITDLRSISAKGAERVITLKMEIPGSMPPLIQEMLENSEGLDTLSGQPGGGGRDGGGLAPPPGSCSPSLSPSSNRSSPATHSP

SEQ ID NO: 13477 - protein, 995 aa, Homo sapiens
MATRGGAGVAMAVWSLLSARAVTAFLLLFLPRFLQAQTFSFPFQQPEKCDNNQYFDISALSCVPCGANQRQDARGTSCVCLPGFQMISNNGGPAIICKKCPENMKGVTEDGWNCISCPSDLTAEGKCHCPIGHILVERDINGTLLSQATCELCDGNENSFMVVNALGDRCVRCEPTFVNTSRSCACSEPNILTGGLCFSSTGNFPLRRISAARYGEVGMSLTSEWFAKYLQSSAAACWVYANLTSCQALGNMCVMNMNSYDFATFDACGLFQFIFENTAGLSTVHSISFWRQNLPWLFYGDQLGLAPQVLSSTSLPTNFSFKGENQNTKLKFVAASYDIRGNFLKWQTLEGGVLQLCPDTETRLNAAYSFGTTYQQNCEIPISKILIDFPTPIFYDVYLEYTDENQHQYILAVPVLNLNLQHNKIFVNQDSNSGKWLLTRRIFLVDAVSGRENDLGTQPRVIRVATQISLSVHLVPNTINGNIYPPLITIAYSDIDIKDANSQSVKVSFSVTYEMDHGEAHVQTDIALGVLGGLAVLASLLKTAGWKRRIGSPMIDLQTVVKFLVYYAGDLANVFFIITVGTGLYWLIFFKAQKSVSVLLPMPIQEERFVTYVGCAFALKALQFLHKLISQITIDVFFIDWERPKGKVLKAVEGEGGVRSATVPVSIWRTYFVANEWNEIQTVRKINSLFQVLTVLFFLEVVGFKNLALMDSSSSLSRNPPSYIAPYSCILRYAVSAALWLAIGIIQVVFFAVFYERFIEDKIRQFVDLCSMSNISVFLLSHKCFGYYIHGRSVHGHADTNMEEMNMNLKREAENLCSQRGLVPNTDGQTFEIAISNQMRQHYDRIHETLIRKNGPARLLSSSASTFEQSIKAYHMMNKFLGSFIDHVHKEMDYFIKDKLLLERILGMEFMEPMEKSIFYNDEGYSFSSVLYYGNEATLLIFDLLFFCVVDLACQNFILASFLTYLQQEIFRYIRNTVGQKNLASKTLVDQRFLI

SEQ ID NO: 13478 - protein, 403 aa, Homo sapiens
MRPPQCLLHTPSLASPLLLLLLWLLGGGVGAEGREDAELLVTVRGGRLRGIRLKTPGGPVSAFLGIPFAEPPMGPRRFLPPEPKQPWSGVVDATTFQSVCYQYVDTLYPGFEGTEMWNPNRELSEDCLYLNVWTPYPRPTSPTPVLVWIYGGGFYSGASSLDVYDGRFLVQAERTVLVSMNYRVGAFGFLALPGSREAPGNVGLLDQRLALQWVQENVAAFGGDPTSVTLFGESAGAASVGMHLLSPPSRGLFHRAVLQSGAPNGPWATVGMGEARRRATQLAHLVGCPPGGTGGNDTELVACLRTRPAQVLVNHEWHVLPQESVFRFSFVPVVDGDFLSDTPEALINAGDFHGLQVLVGVVKDEGSYFLVYGAPGFSKDNESLISRAEFLAGVRVGVPQGSQ

SEQ ID NO: 13479 - protein, 348 aa, Homo sapiens
MPAPPCASCHAARAALRRPLSGQALCGACFCAAFEAEVLHTVLAGRLLPPGAVVAVGASGGKDSTVLAHVLRALAPRLGISLQLVAVDEGIGGYRDAALAAVRRQAARWELPLTVVAYEDLFGGWTMDAVARSTAGSGRSRSCCTFCGVLRRRALEEGARRVGATHIVTGHNADDMAETVLMNFLRGDAGRLARGGGLGSPGEGGALPRCRPLQFASQKEVVLYAHFRRLDYFSEECVYAPEAFRGHARDLLKRLEAARPSAVLDLVHSAERLALAPAARPPRPGACSRCGALASRALCQACALLDGLNRGRPRLAIGKGRRGLDEEATPGTPGDPARPPASKAVPTF

SEQ ID NO: 13480 - protein, 888 aa, Homo sapiens
LLESKLESTLKKSLEIKEEKIAALEARLEESTNYNQQLRQELKTVKKNYEALKQRQDEERMVQSSPPISGEDNKWERESQETTRELLKVKDRLIEVERNNATLQAEKQALKTQLKQLETQNNNLQAQILALQRQTVSLQEQNTTLQTQNAKLQVENSTLNSQSTSLMNQNAQLLIQQSSLENENESVIKEREDLKSLYDSLIKDHEKLELLHERQASEYESLISKHGTLKSAHKNLEVEHRDLEDRYNQLLKQKGQLEDLEKMLKVEQEKMLLENKNHETVAAEYKKLCGENDRLNHTYSQLLKETEVLQTDHKNLKSLLNNSKLEQTRLEAEFSKLKEQYQQLDITSTKLNNQCELLSQLKGNLEEENRHLLDQIQTLMLQNRTLLEQNMESKDLFHVEQRQYIDKLNELRRQKEKLEEKIMDQYKFYDPSPPRRRGNWITLKMRKLIKSKKDINRERQKSLTLTPTRSDSSEGFLQLPHQDSQDSSSVGSNSLEDGQTLGTKKSSTMNDLVQSMVLAGQWTGSTENLEVPDDISTGKRRKELGAMAFSTTAINFSTVNSSAGFRSKQLVNNKDTTSFEDISPQGVSDDSSTGSRVHASRPASLDSGRTSTSNSNNNASLHEVKAGAVNNQSRPQSHSSGEFSLLHDHEAWSSSGSSPIQYLKRQTRSSPVLQHKISETLESRHHKIKTGSPGSEVVTLQQFLEESNKLTSVQIKSSSQENLLDEVMKSLSVSSDFLGKDKPVSCGLARSVSGKTPGDFYDRRTTKPEFLRPGPRKTEDTYFISSAGKPTPGTQGKIKLVKESSLSRQSKDSNPYATLPRASSVISTAEGTTRRTSIHDFLTKDSRLPISVDSPPAAADSNTTAASNVDKVQESRNSKSRSREQQSS

SEQ ID NO: 13481 - protein, 226 aa, Homo sapiens
MGRPLLLPLLPLLLPPAFLQPSGSTGSGPSYLYGVTQPKHLSASMGGSVEIPFSFYYPWELATAPDVRISWRRGHFHRQSFYSTRPPSIHKDYVNRLFLNWTEGQKSGFLRISNLQKQDQSVYFCRVELDTRSSGRQQWQSIEGTKLSITQGQQRTKATTPAREPFQNTEEPYENIRNEGQNTDPKLNPKLHLTQSTSQPPSPQEPPERDPVLCLKGLTNGQPSQD

SEQ ID NO: 13482 - protein, 188 aa, Homo sapiens
MFPPSGSTGLIPPSHFQARPLSTLPRMAPTWLSDIPLVQPPGHQDVSERRLDTQRPQVTMWERDVSSDRQEPGRRGRSWGLEGSQALSQQAEVIVRQLQELRRLEEEVRLLRETSLQQKMRLEAQAMELEALARAEKAGRAEAEGLRAALAGAEVVRKNLEEGSQRELEEVQRLHQEQLSSLTQAHEE

SEQ ID NO: 13483 - protein, 1072 aa, Homo sapiens
PKENSELPEDEDEEENDEDVEQEVPIEPPSATTTTTIGISATSATFTNVFGKKRANVVTTPSTNRKNKKNKTKETPPTAHLILPEQHMSLAQQKADKNKINGEPRGGGAGGNSDSDNLDSTDCNSESSSGGKSQELNFVMDVNSSKYPSLLLHSQEEKTSTATSKTQTRLEGEVTPNSLSTSYKTVSLPLSSPNIKLNLTSPKRGQKREEGWKEVVRRSKKLSVPASVVSRIMGRGGCNITAIQDVTGAHIDVDKQKDKNGERMITIRGGTESTRYAVQLINALIQDPAKELEDLIPKNHIRTPASTKSIHANFSSGVGTTAASSKNAFPLGAPTLVTSQATTLSTFQPANKLNKNVPTNVRSSFPVSLPLAYPHPHFALLAAQTMQQIRHPRLPMAQFGGTFSPSPNTWGPFPVRPVNPGNTNSSPKHNNTSRLPNQNGTVLPSESAGLATASCPITVSSVVAASQQLCVTNTRTPSSVRKQLFACVPKTSPPATVISSVTSTCSSLPSVSSAPITSGQAPTTFLPASTSQAQLSSQKMESFSAVPPTKEKVSTQDQPMANLCTPSSTANSCSSSASNTPGAPETHPSSSPTPTSSNTQEEAQPSSVSDLSPMSMPFASNSEPAPLTLTSPRMVAADNQDTSNLPQLAVPAPRVSHRMQPRGSFYSMVPNATIHQDPQSIFVTNPVTLTPPQGPPAAVQLSSAVNIMNGSQMHINPANKSLPPTFGPATLFNHFSSLFDSSQVPANQGWGDGPLSSRVATDASFTVQSAFLGNSVLGHLENMHPDNSKAPGFRPPSQRVSTSPVGLPSIDPSGSSPSSSSAPLASFSGIPGTRVFLQGPAPVGTPSFNRQHFSPHPWTSASNSCDSPIPSVSSGSSSPLSATSAPPTLGQPKGVSASQDRKIPPPIGTERLARIRQGGSVAQAPAGTSFVAPVGHSGIWSFGVNAVSEGLSGWSQSVMGNHPMHQQLSDPSTFSQHQPMERDDSGMVAPSNIFHQPMGLPISMYGGTIIPSHPQLADVPGGPLFNGLHNPDPAWNPMIKVIQNSTECTDAQQIWPGTWAPHIGNMHLKYVN

SEQ ID NO: 13484 - protein, 71 aa, Homo sapiens
MLPPQKKPWESMAKGLVLGALFTSFLLLVYSYAVPPLHAGLASTTPEAAASCSPPALEPEAVIRANGSAGE

SEQ ID NO: 13485 - protein, 378 aa, Homo sapiens
MGAFLDKPKTEKHNAHGAGNGLRYGLSSMQGWRVEMEDAHTAVVGIPHGLEDWSFFAVYDGHAGSRVANYCSTHLLEHITTNEDFRAAGKSGSALELSVENVKNGIRTGFLKIDEYMRNFSDLRNGMDRSGSTAVGVMISPKHIYFINCGDSRAVLYRNGQVCFSTQDHKPCNPREKERIQNAGGSVMIQRVNGSLAVSRALGDYDYKCVDGKGPTEQLVSPEPEVYEILRAEEDEFIILACDGIWDVMSNEELCEYVKSRLEVSDDLENVCNWVVDTCLHKGSRDNMSIVLVCFSNAPKVSDEAVKKDSELDKHLESRVEEIMEKSGEEGMPDLAHVMRILSAENIPNLPPGGGLAGKRNVIEAVYSRLNPHRESDG

SEQ ID NO: 13486 - protein, 244 aa, Homo sapiens
MSALVPDTPPDTPPAMKNATSSKQLPLEPESPSGQVGPRPAPPQEESPSSEAKSRGPTPPAMGPRDARPPRRSSQPSPTAVPASDSPPTKQEVKKAGERHKLAKERREERAKYLAAKKAVWLEKEEKAKALREKQLQERRRRLEEQRLKAEQRRAALEERQRQKLEKNKERYEAAIQRSVKKTWAEIRQQRWSWAGALHHSSPGHKTSGSRCSVSAVNLPKHVDSIINKRLSKSSATLWNSPSR

SEQ ID NO: 13487 - protein, 312 aa, Homo sapiens
NRGVVSRGWRPGWRRPGRGSPKDRLPPAPRKRALVSVGVAERAVHETPTLTHETFKALKPGLSAYADDVEKSAQGIRELLDVAKQDIPFDFWKATPLVLKATAGLRLLPGEKAQKLLQKVKKVFKASPFLVGDDCVSIMNGTDEGVSAWITINFLTGSLKTPGGSSVGMLDLGGGSTQIAFLPRVEGTLQASPPGYLTALRMFNRTYKLYSYSYLGLGLMSARLAILGGVEGQPAKDGKELVSPCLSPSFKGEWEHAEVTYRVSGQKAAASLHELCAARVSEVLQNRVHRTEEVKHVDFYAFSYYYDLAAGV

SEQ ID NO: 13488 - protein, 169 aa, Homo sapiens
MDSVAFEDVAVSFTQEEWALLDPSQKNLYRDVMQETFKNLTSVGKTWKVQNIEDEYKNPRRNLSLMREKLCESKESHHCGESFNQIADDMLNRKTLPGITPCESSVCGEVGTGHSSLNTHIRADTGHKSSEYQEYGENPYRNKECKKAFSYLDSFQSHDKACTKEKPYD

SEQ ID NO: 13489 - protein, 708 aa, Homo sapiens
MAEVEDQAARDMKRLEEKDKERKNVKGIRDDIEEEDDQEAYFRYMAENPTAGVVQEEEEDNLEYDSDGNPIAPTKKIIDPLPPIDHSEIDYPPFEKNFYNEHEEITNLTPQQLIDLRHKLNLRVSGAAPPRPGSSFAHFGFDEQLMHQIRKSEYTQPTPIQCQGVPVALSGRDMIGIAKTGSGKTAAFIWPMLIHIMDQKELEPGDGPIAVIVCPTRELCQQIHAECKRFGKAYNLRSVAVYGGGSMWEQAKALQEGAEIVVCTPGRLIDHVKKKATNLQRVSYLVFDEADRMFDMGFEYQVRSIASHVRPDRQTLLFSATFRKKIEKLARDILIDPIRVVQGDIGEANEDVTQIVEILHSGPSKWNWLTRRLVEFTSSGSVLLFVTKKANAEELANNLKQEGHNLGLLHGDMDQSERNKVISDFKKKDIPVLVATDVAARGLDIPSIKTVINYDVARDIDTHTHRIGRTGRAGEKGVAYTLLTPKDSNFAGDLVRNLEGANQHVSKELLDLAMQNAWFRKSRFKGGKGKKLNIGGGGLGYRERPGLGSENMDRGNNNVMSNYEAYKPSTGAMGDRLTAMKAAFQSQYKSHFVAASLSNQKAGSSAAGASGWTSAGSLNSVPTNSAQQGHNSPDSPVTSAAKGIPGFGNTGNISGAPVTYPSAGAQGVNNTASGNNSREGTGGSNGKRERYTENRGSPSQSRRDWQSA

SEQ ID NO: 13490 - protein, 210 aa, Homo sapiens
MASLRNANPRLKNYFKENYIPQVCEALLCGILVTCPEDPLRYLEGMIMVIIKSGLQNLLWDMCITPSMKPNIRRLSETYLEQLFELDDQLMTPELMIKACSFYTGHLVKTHFCTWRDIARTNENVVLAEKMNRAVTCYNFRLQKSVFHHWHSYMEDQKEKLKNILLRIQQIIYCHKLTIILTKWRNTARHKSKKKEDELILKHELQLKKW

SEQ ID NO: 13491 - protein, 4861 aa, Homo sapiens
MATMIPPVKLKWLEHLNSSWITEDSESIATREGVAVLYSKLVSNKEVVPLPQQVLCLKGPQLPDFERESLSSDEQDHYLDALLSSQLALAKMVCSDSPFAGALRKRLLVLQRVFYALSNKYHDKGKVKQQQHSPESSSGSADVHSVSERPRSSTDALIEMGVRTGLSLLFALLRQSWMMPVSGPGLSLCNDVIHTAIEVVSSLPPLSLANESKIPPMGLDCLSQVTTFLKGVTIPNSGADTLGRRLASELLLGLAAQRGSLRYLLEWIEMALGASAVVHTMEKGKLLSSQEGMISFDCFMTILMQMRRSLGSSADRSQWREPTRTSDGLCSLYEAALCLFEEVCRMASDYSRTCASPDSIQTGDAPIVSETCEVYVWGSNSSHQLVEGTQEKILQPKLAPSFSDAQTIEAGQYCTFVISTDGSVRACGKGSYGRLGLGDSNNQSTLKKLTFEPHRSIKKVSSSKGSDGHTLAFTTEGEVFSWGDGDYGKLGHGNSSTQKYPKLIQGPLQGKVVVCVSAGYRHSAAVTEDGELYTWGEGDFGRLGHGDSNSRNIPTLVKDISNVGEVSCGSSHTIALSKDGRTVWSFGGGDNGKLGHGDTNRVYKPKVIEALQGMFIRKVCAGSQSSLALTSTGQVYAWGCGACLGCGSSEATALRPKLIEELAATRIVDVSIGDSHCLALSHDNEVYAWGNNSMGQCGQGNSTGPITKPKKVSGLDGIAIQQISAGTSHSLAWTALPRDRQVVAWHRPYCVDLEESTFSHLRSFLERYCDKINSEIPPLPFPSSREHHSFLKLCLKLLSNHLALALAGGVATSILGRQAGPLRNLLFRLMDSTVPDEIQEVVIETLSVGATMLLPPLRERMELLHSLLPQGPDRWESLSKGQRMQLDIILTSLQDHTHVASLLGYSSPSDAADLSSVCTGYGNLSDQPYGTQSCHPDTHLAEILMKTLLRNLGFYTDQAFGELEKNSDKFLLGTSSSENSQPAHLHELLCSLQKQLLAFCHINNISENSSSVALLHKHLQLLLPHATDIYSRSANLLKESPWNGSVGEKLRDVIYVSAAGSMLCQIVNSLLLLPVSVARPLLSYLLDLLPPLDCLNRLLPAADLLEDQELQWPLHGGPELIDPAGLPLPQPAQSWVWLVDLERTIALLIGRCLGGMLQGSPVSPEEQDTAYWMKTPLFSDGVEMDTPQLDKCMSCLLEVALSGNEEQKPFDYKLRPEIAVYVDLALGCSKEPARSLWISMQDYAVSKDWDSATLSNESLLDTVSRFVLAALLKHTNLLSQACGESRYQPGKHLSEVYRCVYKVRSRLLACKNLELIQTRSSSRDRWISENQDSADVDPQEHSFTRTIDEEAEMEEQAERDREEGHPEPEDEEEEREHEVMTAGKIFQCFLSAREVARSRDRDRMNSGAGSGARADDPPPQSQQERRVSTDLPEGQDVYTAACNSVIHRCALLILGVSPVIDELQKRREEGQLQQPSTSASEGGGLMTRSESLTAESRLVHTSPNYRLIKSRSESDLSQPESDEEGYALSGRRNVDLDLAASHRKRGPMHSQLESLSDSWARLKHSRDWLCNSSYSFESDFDLTKSLGVHTLIENVVSFVSGDVGNAPGFKEPEESMSTSPQASIIAMEQQQLRAELRLEALHQILVLLSGMEEKGSISLAGSRLSSGFQSSTLLTSVRLQFLAGCFGLGTVGHTGGKGESGRLHHYQDGIRAAKRNIQIEIQVAVHKIYQQLSATLERALQANKHHIEAQQRLLLVTVFALSVHYQPVDVSLAISTGLLNVLSQLCGTDTMLGQPLQLLPKTGVSQLSTALKVASTRLLQILAITTGTYADKLSPKVVQSLLDLLCSQLKNLLSQTGVLHMASFGEGEQEDGEEEEKKVDSSGETEKKDFRAALRKQHAAELHLGDFLVFLRRVVSSKAIQSKMASPKWTEVLLNIASQKCSSGIPLVGNLRTRLLALHVLEAVLPACESGVEDDQMAQIVERLFSLLSDCMWETPIAQAKHAIQIKEKEQEIKLQKQGELEEEDENLPIQEVSFDPEKAQCCLVENGQILTHGSGGKGYGLASTGVTSGCYQWKFYIVKENRGNEGTCVGVSRWPVHDFNHRTTSDMWLYRAYSGNLYHNGEQTLTLSSFTQGDFITCVLDMEARTISFGKNGEEPKLAFEDVDAAELYPCVMFYSSNPGEKVKICDMQMRGTPRDLLPGDPICSPVAAVLAEATIQLIRILHRTDRWTYCINKKMMERLHKIKICIKESGQKLKKSRSVQSREENEMREEKESKEEEKGKHTRHGLADLSELQLRTLCIEVWPVLAVIGGVDAGLRVGGRCVHKQTGRHATLLGVVKEGSTSAKVQWDEAEITISFPTFWSPSDTPLYNLEPCEPLPFDVARFRGLTASVLLDLTYLTGVHEDMGKQSTKRHEKKHRHESEEKGDVEQKPESESALDMRTGLTSDDVKSQSTTSSKSENEIASFSLDPTLPSVESQHQITEGKRKNHEHMSKNHDVAQSEIRAVQLSYLYLGAMKSLSALLGCSKYAELLLIPKVLAENGHNSDCASSPVVHEDVEMRAALQFLMRHMVKRAVMRSPIKRALGLADLERAQAMIYKLVVHGLLEDQFGGKIKQEIDQQAEESDPAQQAQTPVTTSPSASSTTSFMSSSLEDTTTATTPVTDTETVPASESPGVMPLSLLRQMFSSYPTTTVLPTRRAQTPPISSLPTSPSDEVGRRQSLTSPDSQSARPANRTALSDPSSRLSTSPPPPAIAVPLLEMGFSLRQIAKAMEATGARGEADAQNITVLAMWMIEHPGHEDEEEPQSGSTADSRPGAAVLGSGGKSNDPCYLQSPGDIPSADAAEMEEGFSESPDNLDHTENAASGSGPSARGRSAVTRRHKFDLAARTLLARAAGLYRSVQAHRNQSRREGISLQQDPGALYDFNLDEELEIDLDDEAMEAMFGQDLTSDNDILGMWIPEVLDWPTWHVCESEDREEVVVCELCECSVVSFNQHMKRNHPGCGRSANRQGYRSNGSYVDGWFGGECGSGNPYYLLCGTCREKYLAMKTKSKSTSSERYKGQAPDLIGKQDSVYEEDWDMLDVDEDEKLTGEEEFELLAGPLGLNDRRIVPEPVQFPDSDPLGASVAMVTATNSMEETLMQIGCHGSVEKSSSGRITLGEQAAALANPHDRVVALRRVTAAAQVLLARTMVMRALSLLSVSGSSCSLAAGLESLGLTDIRTLVRLMCLAAAGRAGLSTSPSAMASTSERSRGGHSKANKPISCLAYLSTAVGCLASNAPSAAKLLVQLCTQNLISAATGVNLTTVDDSIQRKFLPSFLRGIAEENKLVTSPNFVVTQALVALLADKGAKLRPNYDKSEVEKKGPLELANALAACCLSSRLSSQHRQWAAQQLVRTLAAHDRDNQTTLQTLADMGGDLRKCSFIKLEAHQNRVMTCVWCNKKGLLATSGNDGTIRVWNVTKKQYSLQQTCVFNRLEGDAEESLGSPSDPSFSPVSWSISGKYLAGALEKMVNIWQVNGGKGLVDIQPHWVSALAWPEEGPATAWSGESPELLLVGRMDGSLGLIEVVDVSTMHRRELEHCYRKDVSVTCIAWFSEDRPFAVGYFDGKLLLGTKEPLEKGGIVLIDAHKDTLISMKWDPTGHILMTCAKEDSVKLWGSISGCWCCLHSLCHPSIVNGIAWCRLPGKGSKLQLLMATGCQSGLVCVWRIPQDTTQTNVTSAEGWWEQESNCQDGYRKSSGAKCVYQLRGHITPVRTVAFSSDGLALVSGGLGGLMNIWSLRDGSVLQTVVIGSGAIQTTVWIPEVGVAACSNRSKDVLVVNCTAEWAAANHVLATCRTALKQQGVLGLNMAPCMRAFLERLPMMLQEQYAYEKPHVVCGDQLVHSPYMQCLASLAVGLHLDQLLCNPPVPPHHQNCLPDPASWNPNEWAWLECFSTTIKAAEALTNGAQFPESFTVPDLEPVPEDELVFLMDNSKWINGMDEQIMSWATSRPEDWHLGGKCDVYLWGAGRHGQLAEAGRNVMVPAAAPSFSQAQQVICGQNCTFVIQANGTVLACGEGSYGRLGQGNSDDLHVLTVISALQGFVVTQLVTSCGSDGHSMALTESGEVFSWGDGDYGKLGHGNSDRQRRPRQIEALQGEEVVQMSCGFKHSAVVTSDGKLFTFGNGDYGRLGLGNTSNKKLPERVTALEGYQIGQVACGLNHTLAVSADGSMVWAFGDGDYGKLGLGNSTAKSSPQKIDVLCGIGIKKVACGTQFSVALTKDGHVYTFGQDRLIGLPEGRARNHNRPQQIPVLAGVIIEDVAVGAEHTLALASNGDVYAWGSNSEGQLGLGHTNHVREPTLVTGLQGKNVRQISAGRCHSAAWTAPPVPPRAPGVSVPLQLGLPDTVPPQYGALREVSIHTVRARLRLLYHFSDLMYSSWRLLNLSPNNQNSTSHYNAGTWGIVQGQLRPLLAPRVYTLPMVRSIGKTMVQGKNYGPQITVKRISTRGRKCKPIFVQIARQVVKLNASDLRLPSRAWKVKLVGEGADDAGGVFDDTITEMCQELETGIVDLLIPSPNATAEVGYNRDRFLFNPSACLDEHLMQFKFLGILMGVAIRTKKPLDLHLAPLVWKQLCCVPLTLEDLEEVDLLYVQTLNSILHIEDSGITEESFHEMIPLDSFVGQSADGKMVPIIPGGNSIPLTFSNRKEYVERAIEYRLHEMDRQVAAVREGMSWIVPVPLLSLLTAKQLEQMVCGMPEISVEVLKKVVRYREVDEQHQLVQWFWHTLEEFSNEERVLFMRFVSGRSRLPANTADISQRFQIMKVDRPYDSLPTSQTCFFQLRLPPYSSQLVMAERLRYAINNCRSIDMDNYMLSRNVDNAEGSDTDY

SEQ ID NO: 13492 - protein, 609 aa, Homo sapiens
MAVGLCKAMSQGLVTFRDVALDFSQEEWEWLKPSQKDLYRDVMLENYRNLVWLGLSISKPNMISLLEQGKEPWMVERKMSQGHCADWESWCEIEELSPKWFIDEDEISQEMVMERLASHGLECSSFREAWKYKGEFELHQGNAERHFMQVTAVKEISTGKRDNEFSNSGRSIPLKSVFLTQQKVPTIQQVHKFDIYDKLFPQNSVIIEYKRLHAEKESLIGNECEEFNQSTYLSKDIGIPPGEKPYESHDFSKLLSFHSLFTQHQTTHFGKLPHGYDECGDAFSCYSFFTQPQRIHSGEKPYACNDCGKAFSHDFFLSEHQRTHIGEKPYECKECNKAFRQSAHLAQHQRIHTGEKPFACNECGKAFSRYAFLVEHQRIHTGEKPYECKECNKAFRQSAHLNQHQRIHTGEKPYECNQCGKAFSRRIALTLHQRIHTGEKPFKCSECGKTFGYRSHLNQHQRIHTGEKPYECIKCGKFFRTDSQLNRHHRIHTGERPFECSKCGKAFSDALVLIHHKRSHAGEKPYECNKCGKAFSCGSYLNQHQRIHTGEKPYECSECGKAFHQILSLRLHQRIHAGEKPYKCNECGNNFSCVSALRRHQRIHNRETL

SEQ ID NO: 13493 - protein, 1530 aa, Homo sapiens
MSSQGSPSVALSTTTVSSVAVQAGDSKIVIAVIKCGKWVQLQLAESQPNLLEIGSSQDETKKLLHDHELLLAKLKALEDRVWELLQEADKTAEENKDQSQVYDAMAETLGEAWAALVSMLERRTELLRLTSEFFENALEFAIKIDQAEDFLQNTHEFESAESLKSLLQLHEHHTKELLERSLALLNKSQQLTDFIEKFKCEGPNVNPELTQGAHSSCLKVDRLLELLQDRRRQLDKYLKQQWQELSQVLQICQWDQQENQVTCWFQKTIRNLQEQSLGSSLSDNEDRIHKQEELIIKAKEWNSAVEKLKSEALRILLSKDYVEKEHLQLSHQKLSQLQEEFGQLMVERNTWLKKANEFFNSANKAFDVLGRVEAYLKLLKSEGLSLAVLAVRHEELHRKIKDCTTDALQKGQTLISQVDSCSSQVSGIHEMMGCIKRRVDHLTEQCSAHKEYALKKQQLTASVEGYLRKVEMSIQKISPVLSNAMDVGSTRSESEKILNKYLELDIQAKETSHELEAAAKTMMEKNEFVSDEMVSLSSKARWLAEELNLFGQSIDYRSQVLQTYVAFLKSSEEVEMQFQSLKEFYETEIPQKEQDDAKAKHCSDSAEKQWQLFLKKSFITQDLGLEFLNLINMAKENEILDVKNEVYLMKNTMENQKAEREELSLLRLAWQLKATESKPGKQQWAAFKEQLKKTSHNLKLLQEALMPVSALDLGGSLQFILDLRQKWNDMKPQFQQLNDEVQYIMKESEELTGRGAPVKEKSQQLKDLIHFHQKQKERIQDYEDILYKVVQFHQVKEELGRLIKSRELEFVEQPKELGDAHDVQIHLRCSQEKQARVDHLHRLALSLGVDIISSVQRPHCSNVSAKNLQQQLELLEEDSMKWRAKAEEYGRTLSRSVEYCAMRDEINELKDSFKDIKKKFNNLKFNYTKKNEKSRNLKALKYQIQQVDMYAEKMQALKRKMEKVSNKTSDSFLNYPSDKVNVLLEVMKDLQKHVDDFDKVVTDYKKNLDLTEHFQEVIEECHFWYEDASATVVRVGKYSTECKTKEAVKILHQQFNKFIAPSVPQQEERIQEATDLAQHLYGLEEGQKYIEKIVTKHKEVLESVTELCESLTELEEKLKQGDVLKMNPNLEDFHYDYIDLLKEPAKNKQTIFNEERNKGQVQVADLLGINGTGEERLPQDLKVSTDKEGGVQDLLLPEDMLSGEEYECVSPDDISLPPLPGSPESPLAPSDMEVEEPVSSSLSLHISSYGVQAGTSSPGDAQESVLPPPVAFADACNDKRETFSSHFERPYLQFKAEPPLTSRGFVEKSTALHRISAEHPESMMSEVHERALQQHPQAQGGLLETREKMHADNNFTKTQDRLHASSDAFSGLRFQSGTSRGYQRQMVPREEIKSTSAKSSVVSLADQAPNFSRLLSNVTVMEGSPVTLEVEVTGFPEPTLTWYKKGQKLSADGHLQVLHKETRHSVFIPKVCKADAGLYVARAQNSSGALSSNVILHVTGNCRLPITRVNWITLCVVYVSVSLMYWLLTQ

SEQ ID NO: 13494 - protein, 339 aa, Homo sapiens
MEKGLSSTIRVVGHVPGEFPVSVWVTAADCWMCQPVARGFVVLPITEFLVGDLVVTQNTSLPWPSSYLTKTVLKVSFLLHDPSNFLKTALFLYSWDFGDGTQMVTEDSVVYYNYSIIGTFTVKLKVVAEWEEVEPDATRAVKQKTGDFSASLKLQETLRGIQVLGPTLIQTFQKMTVTLNFLGSPPLTVCWRLKPECLPLEEGECHPVSVASTAYNLTHTFRDPGDYCFSIRAENIISKTHQYHKIQVWPSRIQPAVFAFPCATLITVMLAFIMYMTLRNATQQKDMVENPEPPSGVRCCCQMCCGPFLLETPSEYLEIVRENHGLLPPLYKSVKTYTV

SEQ ID NO: 13495 - protein, 485 aa, Homo sapiens
MGQDAFMEPFGDTLGVFQCKIYLLLFDIVANCLLLRFKLSVSSYEIWKKGACSGLKVTVPSHTVHGVRGQALYLPVHYGFHTPASDIQIIWLFERPHTMPKYLLGSVNKSVVPDLEYQHKFTMMPPNASLLINPLQFPDEGNYIVKVNIQGNGTLSASQKIQVTVDDPVTKPVVQIHPPSGAVEYVGNMTLTCHVEGGTRLAYQWLKNGRPVHTSSTYSFSPQNNTLHIAPVTKEDIGNYSCLVRNPVSEMESDIIMPIIYYGPYGLQVNSDKGLKVGEVFTVDLGEAILFDCSADSHPPNTYSWIRRTDNTTYIIKHGPRLEVASEKVAQKTMDYVCCAYNNITGRQDETHFTVIITSVGLEKLAQKGKSLSPLASITGISLFLIISMCLLFLWKKYQPYKVIKQKLEGRPETEYRKAQTFSGHEDALDDFGIYEFVAFPDVSGVSRIPSRSVPASDCVSGQDLHSTVYEVIQHIPAQQQDHPE

SEQ ID NO: 13496 - protein, 500 aa, Homo sapiens
MGSPLRFDGRVVLVTGAGAGLGRAYALAFAERGALVVVNDLGGDFKGVGKGSLAADKVVEEIRRRGGKAVANYDSVEEGEKVVKTALDAFGRIDVVVNNAGILRDRSFARISDEDWDIIHRVHLRGSFQVTRAAWEHMKKQKYGRIIMTSSASGIYGNFGQANYSAAKLGLLGLANSLAIEGRKSNIHCNTIAPNAGSRMTQTVMPEDLVEALKPEYVAPLVLWLCHESCEENGGLFEVGAGWIGKLRWERTLGAIVRQKNHPMTPEAVKANWKKICDFENASKPQSIQESTGSIIEVLSKIDSEGGVSANHTSRATSTATSGFAGAIGQKLPPFSYAYTELEAIMYALGVGASIKDPKDLKFIYEGSSDFSCLPTFGVIIGQKSMMGGGLAEIPGLSINFAKVLHGEQYLELYKPLPRAGKLKCEAVVADVLDKGSGVVIIMDVYSYSEKELICHNQFSLFLVGSGGFGGKRTSDKVKPTQCEDDEDEDLYDDLLPLTE

SEQ ID NO: 13497 - protein, 983 aa, Homo sapiens
MVSKMIIENFEALKSWLSKTLEPICDADPSALAKYVLALVKKDKSEKELKALCIDQLDVFLQKETQIFVEKLFDAVNTKSYLPPPEQPSSGSLKVEFFPHQEKDIKKEEITKEEEREKKFSRRLNHSPPQSSSRYRENRSRDERKKDDRSRKRDYDRNPPRRDSYRDRYNRRRGRSRSYSRSRSRSWSKERLRERDRDRSRTRSRSRTRSRERDLVKPKYDLDRTDPLENNYTPVSSVPSISSGHYPVPTLSSTITVIAPTHHGNNTTESWSEFHEDQVDHNSYVRPPMPKKRCRDYDEKGFCMRGDMCPFDHGSDPVVVEDVNLPGMLPFPAQPPVVEGPPPPGLPPPPPILTPPPVNLRPPVPPPGPLPPSLPPVTGPPPPLPPLQPSGMDAPPNSATSSVPTVVTTGIHHQPPPAPPSLFTADTYDTDGYNPEAPSITNTSRPMYRHRVHAQRPNLIGLTSGDMDLPPREKPPNKSSMRIVVDSESRKRTIGSGEPGVPTKKTWFDKPNFNRTNSPGFQKKVQFGNENTKLELRKVPPELNNISKLNEHFSRFGTLVNLQVAYNGDPEGALIQFATYEEAKKAISSTEAVLNNRFIKVYWHREGSTQQLQTTSPKVMQPLVQQPILPVVKQSVKERLGPVPSSTIEPAEAQSASSDLPQVLSTSTGLTKTVYNPAALKAAQKTLLVSTSAVDNNEAQKKKQEALKLQQDVRKRKQEILEKHIETQKMLISKLEKNKTMKSEDKAEIMKTLEVLTKNITKLKDEVKAASPGRCLPKSIKTKTQMQKELLDTELDLYKKMQAGEEVTELRRKYTELQLEAAKRGILSSGRGRGIHSRGRGAVHGRGRGRGRGRGVPGHAVVDHRPRALEISAFTESDREDLLPHFAQYGEIEDCQIDDSSLHAVITFKTRAEAEAAAVHGARFKGQDLKLAWNKPVTNISAVETEEVEPDEEEFQEESLVDDSLLQDDDEEEEDNESRSWRR

SEQ ID NO: 13498 - protein, 398 aa, Homo sapiens
MATAIQNPLKSLGEDFYREAIEHCRSYNARLCAERSLRLPFLDSQTGVAQNNCYIWMEKTHRGPGLAPGQIYTYPARCWRKKRRLNILEDPRLRPCEYKIDCEAPLKKEGGLPEGPVLEALLCAETGEKKIELKEEETIMDCQKQQLLEFPHDLEVEDLEDDIPRRKNRAKGKAYGIGGLRKRQDTASLEDRDKPYVCDICGKRYKNRPGLSYHYTHTHLAEEEGEENAERHALPFHRKNNHKQFYKELAWVPEAQRKHTAKKAPDGTVIPNGYCDFCLGGSKKTGCPEDLISCADCGRSGHPSCLQFTVNMTAAVRTYRWQCIECKSCSLCGTSENDGASWAGLTPQDQLLFCDDCDRGYHMYCLSPPMAEPPEGSWSCHLCLRHLKEKASAYITLT

SEQ ID NO: 13499 - protein, 801 aa, Homo sapiens
MFINDVEQCQWIRQKFETPGVMQFSSEEKRTLLARLVRSMRFEDFLARKWSSEKRFGLEGCEVMIPALKTIIDKSSEMGIENVILGMPHRGRLNVLANVIRKDLEQIFCQFDPKLEAADEGSGDVKYHLGMYHERINRVTNRNITLSLVANPSHLEAVDPVVQGKTKAEQFYRGDAQGKKVMSILVHGDAAFAGQGVVYETFHLSDLPSYTTNGTVHVVVNNQIGFTTDPRMARSSPYPTDVARVVNAPIFHVNADDPEAVIYVCSVAAEWRNTFNKDVVVDLVCYRRRGHNEMDEPMFTQPLMYKQIHRQVPVLKKYADKLIAEGTVTLQEFEEEIAKYDRICEEAYGRSKDKKILHIKHWLDSPWPGFFNVDGEPKSMTCPATGIPEDMLTHIGSVASSVPLEDFKIHTGLSRILRGRADMTKNRTVDWALAEYMAFGSLLKEGIHVRLSGQDVERGTFSHRHHVLHDQEVDRRTCVPMNHLWPDQAPYTVCNSSLSEYGVLGFELGYAMASPNALVLWEAQFGDFHNTAQCIIDQFISTGQAKWVRHNGIVLLLPHGMEGMGPEHSSARPERFLQMSNDDSDAYPAFTKDFEVSQLYDCNWIVVNCSTPANYFHVLRRQILLPFRKPLIIFTPKSLLRHPEAKSSFDQMVSGTSFQRVIPEDGAAARAPEQVQRLIFCTGKVYYDLVKERSSQDLEEKVAITRLEQISPFPFDLIKQEAEKYPGAELAWCQEEHKNMGYYDYISPRFMTILRRARPIWYVGRDPAAAPATGNRNTHLVSLKKFLDTAFNLQAFEGKTF

SEQ ID NO: 13500 - protein, 972 aa, Homo sapiens
YQRVREVTGHLPPLNETANFISNSKIKTSDTTQKNSFQSHINSVANDIVESVLGKMYLVVVTSLYENNKSRTEVEISDHNDSLLMKPLRFRETKQAGKISNSPRYAISQAYSYVDSQNISVMENTLLPYLPLQVKKDLIQMVLNKITNFVSLPLKVSPKDNPKPCFKAHLKTRSKITTLPKFTKKTHLGLSAAKAKSKTKLGPGEKTLKDSRSKTAIGLSHIMSAGDAKNLLDTKLPTSELKIYAKDIIINILETIVKEFGKVKQTKALPSDQIIAAGKIVNTVLQELYVTNNCNLAYPMKSSHLRLSQGNIGTGSLPKQQACFYLENVSSQLEHIFPREGIFKKLFDKWQTESNDKENEKCKLLMIAENVLTEISIKAKELEYSLSLLNLPPLENCESRFYNHFKGASTRAEDTKAQINMFGREIVEMLLEKLQLCFLSQIPTPDSEETLSNSKEHITAKSKYGFPNKHSLSSLPIYNTKTKDQISVGSSNQIVQEIVETVLNMLESFVDLQFKHISKYEFSEIVKMPIENLSSIQQKLLNKKMLPKLQPLKMFSDKSESNTINFKENIQNILLRVHSFHSQLLTYAVNIISDMLAVIKNKLDNEISQMEPSSISILKENIVASEIIGTLMDQCTYFNESLIQNLSRESLFQGAENAYTVNQVELATNMKMFTSKLKEGSLGINPSQVSKTGFVFCSDEDMKEKYRVSSDLPTSVRSSVEDTVKNSEPTKRPDSETMPSCSTRNKVQDHRPRESNFGSFDQTMKGNSYLPEGSFLQKLLRKASDSTEAALKQVLSFIEMGKGENLRVFHYENLKPVVEPNQIQTTISPLKICLAAENIVNTVLSSCGFPSQPHTNENREIMKPFFISKQSSLSEVSGGQKDNEKSLLRMQDKKINYIPEEENENLEASREDSSFLQKLKKKEYPKIETVKEVEAFTFADHEMGSNEVHLIARHVTTSVVTYLKNFETTGRC

SEQ ID NO: 13501 - protein, 472 aa, Homo sapiens
MAAVSLRLGDLVWGKLGRYPPWPGKIVNPPKDLKKPRGKKCFFVKFFGTEDHAWIKVEQLKPYHAHKEEMIKINKGKRFQQAVDAVEEFLRRAKGKDQDLTIPESSTVKGMMAGPMAAFKWQPTASEPVKDADPHFHHFLLSQTEKPAVCYQAITKKLKICEEETGSTSIQAADSTAVNGSITPTDKKIGFLGLGLMGSGIVSNLLKMGHTVTVWNRTAEKCDLFIQEGARLGRTPAEVVSTCDITFACVSDPKAAKDLVLGPSGVLQGIRPGKCYVDMSTVDADTVTELAQVIVSRGGRFLEAPVSGNQQLSNDGMLVILAAGDRGLYEDCSSCFQAMGKTSFFLGEVGNAAKMMLIVNMVQGSFMATIAEGLTLAQVTGQSQQTLLDILNQGQLASIFLDQKCQNILQGNFKPDFYLKYIQKDLRLAIALGDAVNHPTPMAAAANEVYKRAKALDQSDNDMSAVYRAYIH

SEQ ID NO: 13502 - protein, 224 aa, Homo sapiens
GPPGSEGLPGPPGPAGPRGERGPQGNSGEKGDQGFQGQPGFPGPPGPPGFPGKVGSPGPPGPQAEKGPAGLDGLDGKDGKPGLRGDPGPAGPPGLMGPPGFKGKTGHPGLPGPKGDCGKPGPPGSTGRPGAEGEPGAMGPQGRPGPPGHVGPPGPPGQPGPAGISAVGLKGDRGATGERGLAGLPGQPGPPGHPGPPGEPGTDGAAGKEGPPGKQGFYGPPGPK

SEQ ID NO: 13503 - protein, 256 aa, Homo sapiens
MAASRLELNLVRLLSRCEAMAAEKRDPDEWRLEKYVGALEDMLQALKVHASKPASEVINEYSWKVDFLKGMLQAEKLTSSSEKALANQFLAPGRVPTTARERVPATKTVHLQSRARYTSEMRSELLGTEPEMDVRKRTGVAGSQPVSEKQLAAELDLVLQRHQNLQEKLAEEMLGLARSLKTNTLAAQSVIKKDNQTLSHSLKMADQNLEKLKTESERLEQHTQKSVNWLLWAMLIIVCFIFISMILFIRIMPKLK

SEQ ID NO: 13504 - protein, 81 aa, Homo sapiens
MSSVAVLTQESFAEHRSGLVPQQIKVATLNSEEESDPPTYKDAFPPLPEKAACLESAQEPAGAWGNKIRPIKASVITQVFH

SEQ ID NO: 13505 - protein, 142 aa, Homo sapiens
ESPSVSSTHRVSDPKFHPLHSKIIIIKKGHAKDSQRYKVDYESQSTDTQNFSSESKRETEYGPCRREMEDTLNHLKFLNVLSPRGVHIPNCDKKGFYKKKQCRPSKGRKRGFCWCVDKYGQPLPGYTTKGKEDVHCYSMQSK

SEQ ID NO: 13506 - protein, 1901 aa, Homo sapiens
MDQMGKMRPQPYGGTNPYSQQQGPPSGPQQGHGYPGQPYGSQTPQRYPMTMQGRAQSAMGGLSYTQQIPPYGQQGPSGYGQQGQTPYYNQQSPHPQQQQPPYSQQPPSQTPHAQPSYQQQPQSQPPQLQSSQPPYSQQPSQPPHQQSPAPYPSQQSTTQQHPQSQPPYSQPQAQSPYQQQQPQQPAPSTLSQQAAYPQPQSQQSQQTAYSQQRFPPPQELSQDSFGSQASSAPSMTSSKGGQEDMNLSLQSRPSSLPDLSGSIDDLPMGTEGALSPGVSTSGISSSQGEQSNPAQSPFSPHTSPHLPGIRGPSPSPVGSPASVAQSRSGPLSPAAVPGNQMPPRPPSGQSDSIMHPSMNQSSIAQDRGYMQRNPQMPQYSSPQPGSALSPRQPSGGQIHTGMGSYQQNSMGSYGPQGGQYGPQGGYPRQPNYNALPNANYPSAGMAGGINPMGAGGQMHGQPGIPPYGTLPPGRMSHASMGNRPYGPNMANMPPQVGSGMCPPPGGMNRKTQETAVAMHVAANSIQNRPPGYPNMNQGGMMGTGPPYGQGINSMAGMINPQGPPYSMGGTMANNSAGMAASPEMMGLGDVKLTPATKMNNKADGTPKTESKSKKSSSSTTTNEKITKLYELGGEPERKMWVDRYLAFTEEKAMGMTNLPAVGRKPLDLYRLYVSVKEIGGLTQVNKNKKWRELATNLNVGTSSSAASSLKKQYIQCLYAFECKIERGEDPPPDIFAAADSKKSQPKIQPPSPAGSGSMQGPQTPQSTSSSMAEGGDLKPPTPASTPHSQIPPLPGMRSNSVGIQDAFNDGSDSTFQKRNSMTPNPGYQPSMNTSDMMGRMSYEPNKDPYGSMRKAPGSDPFMSSGQGPNGGMGDPYSRAAGPGLGNVAMGPRQHYPYGGPYDRVRTEPGIGPEGNMSTGAPQPNLMPSNPDSGMYSPSRYPPQQQQQQQQRHDSYGNQFSTQGTPSGSPFPSQQTTMYQQQQQNYKRPMDGTYGPPAKRHEGEMYSVPYSTGQGQPQQQQLPPAQPQPASQQQAAQPSPQQDVYNQYGNAYPATATAATERRPAGGPQNQFPFQFGRDRVSAPPGTNAQQNMPPQMMGGPIQASAEVAQQGTMWQGRNDMTYNYANRQSTGSAPQGPAYHGVNRTDEMLHTDQRANHEGSWPSHGTRQPPYGPSAPVPPMTRPPPSNYQPPPSMQNHIPQVSSPAPLPRPMENRTSPSKSPFLHSGMKMQKAGPPVPASHIAPAPVQPPMIRRDITFPPGSVEATQPVLKQRRRLTMKDIGTPEAWRVMMSLKSGLLAESTWALDTINILLYDDNSIMTFNLSQLPGLLELLVEYFRRCLIEIFGILKEYEVGDPGQRTLLDPGRFSKVSSPAPMEGGEEEEELLGPKLEEEEEEEVVENDEEIAFSGKDKPASENSEEKLISKFDKLPVKIVQKNDPFVVDCSDKLGRVQEFDSGLLHWRIGGGDTTEHIQTHFESKTELLPSRPHAPCPPAPRKHVTTAEGTPGTTDQEGPPPDGPPEKRITATMDDMLSTRSSTLTEDGAKSSEAIKESSKFPFGISPAQSHRNIKILEDEPHSKDETPLCTLLDWQDSLAKRCVCVSNTIRSLSFVPGNDFEMSKHPGLLLILGKLILLHHKHPERKQAPLTYEKEEEQDQGVSCNKVEWWWDCLEMLRENTLVTLANISGQLDLSPYPESICLPVLDGLLHWAVCPSAEAQDPFSTLGPNAVLSPQRLVLETLSKLSIQDNNVDLILATPPFSRLEKLYSTMVRFLSDRKNPVCREMAVVLLANLAQGDSLAARAIAVQKGSIGNLLGFLEDSLAATQFQQSQASLLHMQNPPFEPTSVDMMRRAARALLALAKVDENHSEFTLYESRLLDISVSPLMNSLVSQVICDVLFLIGQS

SEQ ID NO: 13507 - protein, 1143 aa, Homo sapiens
MAVPARTCGASRPGPARTARPWPGCGPHPGPGTRRPTSGPPRPLWLLLPLLPLLAAPGASAYSFPQQHTMQHWARRLEQEVDGVMRIFGGVQQLREIYKDNRNLFEVQENEPQKLVEKVAGDIESLLDRKVQALKRLADAAENFQKAHRWQDNIKEEDIVYYDAKADAELDDPESEDVERGSKASTLRLDFIEDPNFKNKVNYSYAAVQIPTDIYKGSTVILNELNWTEALENVFMENRRQDPTLLWQVFGSATGVTRYYPATPWRAPKKIDLYDVRRRPWYIQGASSPKDMVIIVDVSGSVSGLTLKLMKTSVCEMLDTLSDDDYVNVASFNEKAQPVSCFTHLVQANVRNKKVFKEAVQGMVAKGTTGYKAGFEYAFDQLQNSNITRANCNKMIMMFTDGGEDRVQDVFEKYNWPNRTVRVFTFSVGQHNYDVTPLQWMACANKGYYFEIPSIGAIRINTQEYLDVLGRPMVLAGKEAKQVQWTNVYEDALGLGLVVTGTLPVFNLTQDGPGEKKNQLILGVMGIDVALNDIKRLTPNYTLGANGYVFAIDLNGYVLLHPNLKPQTTNFREPVTLDFLDAELEDENKEEIRRSMIDGNKGHKQIRTLVKSLDERYIDEVTRNYTWVPIRSTNYSLGLVLPPYSTFYLQANLSDQILQVKYFEFLLPSSFESEGHVFIAPREYCKDLNASDNNTEFLKNFIELMEKVTPDSKQCNNFLLHNLILDTGITQQLVERVWRDQDLNTYSLLAVFAATDGGITRVFPNKAAEDWTENPEPFNASFYRRSLDNHGYVFKPPHQDALLRPLELENDTVGILVSTAVELSLGRRTLRPAVVGVKLDLEAWAEKFKVLASNRTHQDQPQKCGPNSHCEMDCEVNNEDLLCVLIDDGGFLVLSNQNHQWDQVGRFFSEVDANLMLALYNNSFYTRKESYDYQAACAPQPPGNLGAAPRGVFVPTVADFLNLAWWTSAAAWSLFQQLLYGLIYHSWFQADPAEAEGSPETRESSCVMKQTQYYFGSVNASYNAIIDCGNCSRLFHAQRLTNTNLLFVVAEKPLCSQCEAGRLLQKETHSDGPEQCELVQRPRYRRGPHICFDYNATEDTSDCGRGASFPPSLGVLVSLQLLLLLGLPPRPQPQVLVHASRRL

SEQ ID NO: 13508 - protein, 221 aa, Homo sapiens
PCGPPSRALALSCAWTWFCLLDNLSGVRLLRQDPIECLFSFICSSNNNIARITGMVERLCQAFGPRLIQLDDVTYHGFPSLQALAGPEVEAHLRKLGLGYRARYVSASARAILEEQGGLAWLQQLRESSYEEAHKALCILPGVGTKVADCICLMALDKPQAVPVDVHMWHIAQRDYSWHPTTSQAKGPSPQTNKELGNFFRSLWGPYAGWAQAVSVPRCPP

SEQ ID NO: 13509 - protein, 342 aa, Homo sapiens
MLSGRSPFYEPDPQETEARIVGGRFDAFQLYPNTSQSATLFLRKVLSVHPWSRPSLQDCLAHPWLQDAYLMKLRRQTLTFTTNRLKEFLGEQRRRRAEAATRHKMSKAAPAKKPVAVAPAPGCTLDINDPQVQSAAIRIQASYRGHRSRKELREKGPPRVLEPLKDVVLIEGSAAKLTCRISAFPDPFIRWSKDGKELRDGPKYRYVFEDPDVVALVVRDGELADLGQYSINVTNPFGQCSDSARILVEVPTKIQKGPDNTKARKGTTVTLTAEILGEPAPDVGWTKDGEDIEEDDRVFFEIGSTTTTLTIRRATPQDSGKYEVYVENSLGMDQSFARVDVA

SEQ ID NO: 13510 - protein, 165 aa, Homo sapiens
MKSTADLHQKLGKAIELEAIKPTYQVLNVQEKKRKSLDNEVEKTANLVISNWNQQIKAKKKLMVSTKKHEALFQLVESSKQSMTEKEKRKLLNKLTKSTEKLEKEDENYYQKNMAGYSTRLKWENTLENCYQSILELEKERIQLLCNNLNQYSQHISLFGQTLTT

SEQ ID NO: 13511 - protein, 715 aa, Homo sapiens
MVQKYQSPVRVYKYPFELIMAAYERRFPTCPLIPMFVGSDTVNEFKSEDGAIHVIERRCKLDVDAPRLLKKIAGVDYVYFVQKNSLNSRERTLHIEAYNETFSNRVIINEHCCYTVHPENEDWTCFEQSASLDIKSFFGFESTVEKIAMKQYTSNIKKGKEIIEYYLRQLEEEGITFVPRWSPPSITTSSETSSSSSKKQAASMAVVIPEAALKEGLSGDALSSPSAPEPVVGTPDDKLDADYIKRYLGDLTPLQESCLIRLRQWLQETHKGKIPKDEHILRFLRARDFNIDKAREIMCQSLTWRKQHQVDYILETWTPPQVLQDYYAGGWHHHDKDGRPLYVLRLGQMDTKGLVRALGEEALLRYVLSINEEGLRRCEENTKVFGRPISSWTCLVDLEGLNMRHLWRPGVKALLRIIEVVEANYPETLGRLLILRAPRVFPVLWTLVSPFIDDNTRRKFLIYAGNDYQGPGGLLDYIDKEIIPDFLSGECMCEVPEGGLVPKSLYRTAEELENEDLKLWTETIYQSASVFKGAPHEILIQIVDASSVITWDFDVCKGDIVFNIYHSKRSPQPPKKDSLGAHSITSPGGNNVQLIDKVWQLGRDYSMVESPLICKEGESVQGSHVTRWPGFYILQWKFHSMPACAASSLPRVDDVLASLQVSSHKCKVMYYTEVIGSEDFRGSMTSLESSHSGFSQLSAATTSSSQSHSSSMISR

SEQ ID NO: 13512 - protein, 1259 aa, Homo sapiens
MEADGAGEQMRPLLTRVTSRGPDEEAVVDLGKTSSTVNTKFEKEELESHRAVYIGVHVPFSKESRRRHRHRGHKHHHRRRKDKESDKEDGRESPSYDTPSQRVQFILGTEDDDEEHIPHDLFTEMDELCYRDGEEYEWKETARWLKFEEDVEDGGDRWSKPYVATLSLHSLFELRSCILNGTVMLDMRASTLDEIADMVLDNMIASGQLDESIRENVREALLKRHHHQNEKRFTSRIPLVRSFADIGKKHSDPHLLERNGEGLSASRHSLRTGLSASNLSLRGESPLSLLLGHLLPSSRAGTPAGSRCTTPVPTPQNSPPSSPSISRLTSRSSQESQRQAPELLVSPASDDIPTVVIHPPEEDLEAALKGEEQKNEENVDLTPGILASPQSAPGNLDNSKSGEIKGNGSGGSRENSTVDFSKVDMNFMRKIPTGAEASNVLVGEVDFLERPIIAFVRLAPAVLLTGLTEVPVPTRFLFLLLGPAGKAPQYHEIGRSIATLMTDEIFHDVAYKAKDRNDLLSGIDEFLDQVTVLPPGEWDPSIRIEPPKSVPSQEKRKIPVFHNGSTPTLGETPKEAAHHAGPELQRTGRLFGGLILDIKRKAPFFLSDFKDALSLQCLASILFLYCACMSPVITFGGLLGEATEGRISAIESLFGASLTGIAYSLFAGQPLTILGSTGPVLVFEKILYKFCRDYQLSYLSLRTSIGLWTSFLCIVLVATDASSLVCYITRFTEEAFAALICIIFIYEALEKLFDLGETYAFNMHNNLDKLTSYSCVCTEPPNPSNETLAQWKKDNITAHNISWRNLTVSECKKLRGVFLGSACGHHGPYIPDVLFWCVILFFTTFFLSSFLKQFKTKRYFPTKVRSTISDFAVFLTIVIMVTIDYLVGVPSPKLHVPEKFEPTHPERGWIISPLGDNPWWTLLIAAIPALLCTILIFMDQQITAVIINRKEHKLKKGAGYHLDLLMVGVMLGVCSVMGLPWFVAATVLSISHVNSLKVESECSAPGEQPKFLGIREQRVTGLMIFILMGLSVFMTSVLKFIPMPVLYGVFLYMGVSSLKGIQLFDRIKLFGMPAKHQPDLIYLRYVPLWKVHIFTVIQLTCLVLLWVIKVSAAAVVFPMMVLALVFVRKLMDLCFTKRELSWLDDLMPESKKKKEDDKKKKEKEEAERMLQDDDDTVHLPFEGGSLLQIPVKALKYSVDPSIVNISDEMAKTAQWKALSMNTENAKVTRSNMSPDKPVSVKISFEDEPRKKYVDAETSL

SEQ ID NO: 13513 - protein, 246 aa, Homo sapiens
MTPGTANRATNPLNKELDWASINGFCEQLNEDFEGPPLATRLLAHKIQSPQEWEAIQALTVLETCMKSCGKRFHDEVGKFRFLNELIKVVSPKYLGSRTSEKVKNKILELLYSWTVGLPEEVKIAEAYQMLKKQGIVKSDPKLPDDTTFPLPPPRPKNVIFEDEEKSKMLARLLKSSHPEDLRAANKLIKEMVQEDQKRMEKISKRVNAIEEVNNNVKLLTEMVMSHSQGGAAAGSSEDLMKELYQ

SEQ ID NO: 13514 - protein, 732 aa, Homo sapiens
MLSFFRRTLGRRSMRKHAEKERLREAQRAATHIPAAGDSKSIITCRVSLLDGTDVSVDLPKKAKGQELFDQIMYHLDLIESDYFGLRFMDSAQVAHWLDGTKSIKKQVKIGSPYCLHLRVKFYSSEPNNLREELTRYLFVLQLKQDILSGKLDCPFDTAVQLAAYNLQAELGDYDLAEHSPELVSEFRFVPIQTEEMELAIFEKWKEYRGQTPAQAETNYLNKAKWLEMYGVDMHVVKARDGNDYSLGLTPTGVLVFEGDTKIGLFFWPKITRLDFKKNKLTLVVVEDDDQGKEQEHTFVFRLDHPKACKHLWKCAVEHHAFFRLRGPVQKSSHRSGFIRLGSRFRYSGKTEYQTTKTNKARRSTSFERRPSKRYSRRTLQMKACATKPEELSVHNNVSTQSNGSQQAWGMRSALPVSPSISSAPVPVEIENLPQSPGTDQHDRKCIPLNIDLLNSPDLLEATIGDVIGASDTMETSQALNDVNVATRLPGLGEPEVEYETLKDTSEKLKQLEMENSPLLSPRSNIDVNINSQEEVVKLTEKCLNNVIESPGLNVMRVPPDFKSNILKAQVEAVHKVTKEDSLLSHKNANVQDAATNSAVLNENNVPLPKESLETLMLITPADSGSVLKEATDELDALLASLTENLIDHTVAPQVSSTSMITPRWIVPSGAMSNGLAGCEMLLTGKEGHGNKDGISLISPPAPFLVDAVTSSGPILAEEAVLKQKCLLTTEL

SEQ ID NO: 13515 - protein, 84 aa, Homo sapiens
MEPLLLGRGLIVYLMFLLLKFSKAIEIPSSVQQVPTIIKQSKVQVAFPFDEYFQIECEAKGNPEPTFSWTKDGNPFYFTDHRII

SEQ ID NO: 13516 - protein, 1013 aa, Homo sapiens
QLETHNHKMVTFKFDLDGDAPDEIATYMVEHDFILQAERETFIEQMKDVMDKAEDMLSEDTDADRGSDPGTSPPHLSTCGLGTGEESRQSQANAPVYQQNVLHTGKRWFIICPVAEHPAPEAPESSPPLPLSSLPPEASQDSAPYKDQLSSKEQPSFLASQQLLSQAGPSNPPGAPPAPLAPSSPPVTALPQDGAAPATSTMPEPASGTASQAGGPGTPQGLTSELETSQPLAETHEAPLAVQPLVVGLAPCTPAPEAASTRDASAPREPLPPPAPEPSPHSGTPQPALGQPAPLLPAAVGAVSLATSQLPSPPLGPTVPPQPPSALESDGEGPPPRVGFVDSTIKSLDEKLRTLLYQEHVPTSSASAGTPVEVGDRDFTLEPLRGDQPRSEVCGGDLALPPVPKEAVSGRVQLPQPLVEKSELAPTRGAVMEQGTSSSMTAESSPRSMLGYDRDGRQVASDSHVVPSVPQDVPAFVRPARVEPTDRDGGEAGESSAEPPPSDMGTVGGQASHPQTLGARALGSPRKRPEQQDVSSPAKTVGRFSVVSTQDEWTLASPHSLRYSAPPDVYLDEAPSSPDVKLAVRRAQTASSIEVGVGEPVSSDSGDEGPRARPPVQKQASLPVSGSVAGDFVKKATAFLQRPSRAGSLGPETPSRVGMKVPTISVTSFHSQSSYISSDNDSELEDADIKKELQSLREKHLKEISELQSQQKQEIEALYRRLGKPLPPNVGFFHTAPPTGRRRKTSKSKLKAGKLLNPLVRQLKVVASSTGHLADSSRGPPAKDPAQASVGLTADSTGLSGKAVQTQQPCSVRASLSSDICSGLASDGGGARGQGWTVYHPTSERVTYKSSSKPRARFLSGPVSVSIWSALKRLCLGKEHSSRSSTSSLAPGPEPGPQPALHVQAQVNNSNNKKGTFTDDLHKLVDEWTSKTVGAAQLKPTLNQLKQTQKLQDMEAQAGWAAPGEARAMTAPRAGVGMPRLPPAPGPLSTTVIPGAAPTLSVPTPDPESEKPD

SEQ ID NO: 13517 - protein, 1261 aa, Homo sapiens
MAAAAASGAGGAAGAGTGGAGPAGRLLPPPAPGSPAAPAAVSPAAGQPRPPAPASRGPMPARIGYYEIDRTIGKGNFAVVKRATHLVTKAKVAIKIIDKTQLDEENLKKIFREVQIMKMLCHPHIIRLYQVMETERMIYLVTEYASGGEIFDHLVAHGRMAEKEARRKFKQIVTAVYFCHCRNIVHRDLKAENLLLDANLNIKIADFGFSNLFTPGQLLKTWCGSPPYAAPELFEGKEYDGPKVDIWSLGVVLYVLVCGALPFDGSTLQNLRARVLSGKFRIPFFMSTECEHLIRHMLVLDPNKRLSMEQICKHKWMKLGDADPNFDRLIAECQQLKEERQVDPLNEDVLLAMEDMGLDKEQTLQAEQAGTAMNISVPQVQLINPENQIVEPDGTLNLDSDEGEEPSPEALVRYLSMRRHTVGVADPRTEVMEDLQKLLPGFPGVNPQAPFLQVAPNVNFMHNLLPMQNLQPTGQLEYKEQSLLQPPTLQLLNGMGPLGRRASDGGANIQLHAQQLLKRPRGPSPLVTMTPAVPAVTPVDEESSDGEPDQEAVQRYLANRSKRHTLAMTNPTAEIPPDLQRQLGQQPFRSRVWPPHLVPDQHRSTYKDSNTLHLPTERFSPVRRFSDGAASIQAFKAHLEKMGNNSSIKQLQQECEQLQKMYGGQIDERTLEKTQQQHMLYQQEQHHQILQQQIQDSICPPQPSPPLQAACENQPALLTHQLQRLRIQPSSPPPNHPNNHLFRQPSNSPPPMSSAMIQPHGAASSSQFQGLPSRSAIFQQQPENCSSPPNVALTCLGMQQPAQSQQVTIQVQEPVDMLSNMPGTAAGSSGRGISISPSAGQMQMQHRTNLMATLSYGHRPLSKQLSADSAEAHSAHQQPPHYTTSALQQALLSPTPPDYTRHQQVPHILQGLLSPRHSLTGHSDIRLPPTEFAQLIKRQQQQRQQQQQQQQQQEYQELFRHMNQGDAGSLAPSLGGQSMTERQALSYQNADSYHHHTSPQHLLQIRAQECVSQASSPTPPHGYAHQPALMHSESMEEDCSCEGAKDGFQDSKSSSTLTKGCHDSPLLLSTGGPGDPESLLGTVSHAQELGIHPYGHQPTAAFSKNKVPSREPVIGNCMDRSSPGQAVELPDHNGLGYPARPSVHEHHRPRALQRHHTIQNSDDAYVQLDNLPGMSLVAGKALSSARMSDAVLSQSSLMGSQQFQDGENEECGASLGGHEHPDLSDGSQHLNSSCYPSTCITDILLSYKHPEVSFSMEQAGV

SEQ ID NO: 13518 - protein, 679 aa, Homo sapiens
IDASGKGEFSRRWCVLGDGVLSYFENERAVTPNGEIRASEIVCLAVPPPDTHGFEHTFEVYTEGERLYLFGLESAEQAHEWVKCIAKAFVPPLAEDLLARDFERLGRLPYKAGLSLQRAQEGWFSLSGSELRAVFPEGPCEEPLQLRKLQELSIQGDSENQVLVLVERRRTLYIQGERRLDFMGWLGAIQKAAASMGDTLSEQQLGDSDIPVIVYRCVDYITQCGLTSEGIYRKCGQTSKTQRLLESLRQDARSVHLKEGEQHVDDVSSALKRFLRDLPDGLFTRAQRLTWLEASEIEDEEEKVSRYRELLVRLPPVNRATVKALISHLYCVQCFSDTNQMNVHNLAIVFGPTLFQTDGQDYKAGRVVEDLINHYVVVFSVDEEELRKQREEITAIVKMRVAGTASGTQHAGDFICTVYLEEKKAETEQHIKVPASMTAEELTLEILDRRNVGIREKDYWTCFEVNEREEAERPLHFAEKVLPILHGLGTDSHLVVKKHQAMEAMLLYLASRVGDTKHGMMKFREDRSLLGLGLPSGGFHDRYFILNSSCLRLYKEVRSHRPEKEWPIKSLKVYLGVKKKLRPPTCWGFTVVHETEKHEKQQWYLCCDTQMELREWFATFLFVQHDGLVWPSEPSRVSRAVPEVRLGSVSLIPLRGSENEMRRSVAAFTADPLSLLRNV

SEQ ID NO: 13519 - protein, 560 aa, Homo sapiens
MAAVAAEAAATAASPGEGGAGEAEPEMEPIPGSEAGTDPLPVTATEASVPDGETDGQQSAPQADEPPLPPPPPPPGELARSPEAVGPELEAEEKLSVRVAESAAAAPQGGPELPPSPASPPEQPPAPEEREEPPLPQPVAPALVPPAGGDSTVSQLIPGSEVRVTLDHIIEDALVVSFRFGEKLFSGVLMDLSKRFGPHGIPVTVFPKREYKDKPEAMPLQSNTFQEGTEVKCEANGAVPDDPSPVPHPELSLAESLWTSKPPPLFHEGAPYPPPLFIRDTYNQSIPQPPPRKIKRPKRKMYREEPTSIMNAIKLRPRQVLCDKCKNSVVAEKKEIRKGSSATDSSKYEDKKRRNESVTTVNKKLKTDHKVDGKNQNESQKRNAVVKVSNIAHSRGRVVKVSAQANTSKAQLSTKKVLQSKNMDHAKAREVLKIAKEKAQKKQNETSTSKNAHSKVHFTRRYQNPSSGSLPPRVRLKPQRYRNEENDSSLKTGLEKMRSGKMAPKPQSRCTSTRSAGLNKWQLLHQTVTSPAAPLQCLTDHCGFRLGALKLTVKRAAQRH

SEQ ID NO: 13520 - protein, 660 aa, Homo sapiens
MEGDGSDPEPPDAGEDSKSENGENAPIYCICRKPDINCFMIGCDNCNEWFHGDCIRITEKMAKAIREWYCRECREKDPKLEIRYRHKKSRERDGNERDSSEPRDEGGGRKRPVPDPDLQRRAGSGTGVGAMLARGSASPHKSSPQPLVATPSQHHQQQQQQIKRSARMCGECEACRRTEDCGHCDFCRDMKKFGGPNKIRQKCRLRQCQLRARESYKYFPSSLSPVTPSESLPRPRRPLPTQQQPQPSQKLGRIREDEGAVASSTVKEPPEATATPEPLSDEDLPLDPDLYQDFCAGAFDDHGLPWMSDTEESPFLDPALRKRAVKVKHVKRREKKSEKKVMERKEERYKRHRQKQKHKDKWKHPERADAKDPASLPQCLGPGCVRPAQPSSKYCSDDCGMKLAANRIYEILPQRIQQWQQSPCIAEEHGKKLLERIRREQQSARTRLQEMERRFHELEAIILRAKQQAVREDEESNEGDSDDTDLQIFCVSCGHPINPRVALRHMERCYAKYESQTSFGSMYPTRIEGATRLFCDVYNPQSKTYCKRLQVLCPEHSRDPKVPADEVCGCPLVRDVFELTGDFCRLPKRQCNRHYCWEKLRRAEVDLERVRVWYKLDELFEQERNVRTAMTNRAGLLALMLHQTIQHDPLTTDLRSSADR

SEQ ID NO: 13521 - protein, 476 aa, Homo sapiens
MAESAGASSFFPLVVLLLAGSGGSGPRGVQALLCACTSCLQANYTCETDGACMVSIFNLDGMEHHVRTCIPKVELVPAGKPFYCLSSEDLRNTHCCYTDYCNRIDLRVPSGHLKEPEHPSMWGPVELVGIIAGPVFLLFLIIIIVFLVINYHQRVYHNRQRLDMEDPSCEMCLSKDKTLQDLVYDLSTSGSGSGLPLFVQRTVARTIVLQEIIGKGRFGEVWRGRWRGGDVAVKIFSSREERSWFREAEIYQTVMLRHENILGFIAADNKDNGTWTQLWLVSDYHEHGSLFDYLNRYTVTIEGMIKLALSAASGLAHLHMEIVGTQGKPGIAHRDLKSKNILVKKNGMCAIADLGLAVRHDAVTDTIDIAPNQRVGTKRYMAPEVLDETINMKHFDSFKCADIYALGLVYWEIARRCNSGGVHEEYQLPYYDLVPSDPSIEEMRKVVCDQKLRPNIPNWWQSYEVRSWPPAAFPSA

SEQ ID NO: 13522 - protein, 844 aa, Homo sapiens
AGKVELWQRLGAEGQRRREPCPDLPSRMTGEEGKEVITEIEKKLPRLYKVLKTHISSQNSELSSAALQALGFCLYNPKITSELSEANALELLSKLNDTIKNSDKNVRTRALWVISKQTFPSEVVGKMVSSIIDSLEILFNKGETHSAVVDFEALNVIVRLIEQAPIQMGEEAVRWAKLVIPLVVHSAQKVHLRGATALEMGMPLLLQKQQEIASITEQLMTTKLISELQKLFMSKNETYVLKLWPLFVKLLGRTLHRSGSFINSLLQLEELGFRSGAPMIKKIAFIAWKSLIDNFALNPDILCSAKRLKLLMQPLSSIHVRTETLALTKLEVWWYLLMRLGPHLPANFEQVCVPLIQSTISIDSNASPQGNSCHVATSPGLNPMTPVHKGASSPYGAPGTPRMNLSSNLGGMATIPSIQLLGLEMLLHFLLGPEALSFAKQNKLVLSLEPLEHPLISSPSFFSKHANTLITAVHDSFVAVGKDAPDVVVSAIWKELISLVKSVTESGNKKEKPGSEVLTLLLKSLESIVKSEVFPVSKTLVLMEITIKGLPQKVLGSPAYQVANMDILNGTPALFLIQLIFNNFLECGVSDERFFLSLESLVGCVLSGPTSPLAFSDSVLNVINQNAKQLENKEHLWKMWSVIVTPLTELINQTNEVNQGDALEHNFSAIYGALTLPVNHIFSEQRFPVATMKTLLRTWSELYRAFARCAALVATAEENLCCEELSSKIMSSLEDEGFSNLLFVDRIIYIITVMVDCIDFSPYNIKYQPKVKSPQRPSDWSKKKNEPLGKLTSLFKLIVKVIYSFHTLSFKEAHSDTLFTIGNSITGIISSVLGHISLPSMIRK

SEQ ID NO: 13523 - protein, 566 aa, Homo sapiens
MWLRAFILATLSASAAWGHPSSPPVVDTVHGKVLGKFVSLEGFAQPVAIFLGIPFAKPPLGPLRFTPPQPAEPWSFVKNATSYPPMCTQDPKAGQLLSELFTNRKENIPLKLSEDCLYLNIYTPADLTKKNRLPVMVWIHGGGLMVGAASTYDGLALAAHENVVVVTIQYRLGIWGFFSTGDEHSRGNWGHLDQVAALRWVQDNIASFGGNPGSVTIFGESAGGESVSVLVLSPLAKNLFHRAISESGVALTSVLVKKGDVKPLAEQIAITAGCKTTTSAVMVHCLRQKTEEELLETTLKMKFLSLDLQGDPRESQPLLGTVIDGMLLLKTPEELQAERNFHTVPYMVGINKQEFGWLIPMLMSYPLSEGQLDQKTAMSLLWKSYPLVCIAKELIPEATEKYLGGTDDTVKKKDLFLDLIADVMFGVPSVIVARNHRDAGAPTYMYEFQYRPSFSSDMKPKTVIGDHGDELFSVFGAPFLKEGASEEEIRLSKMVMKFWANFARNGNPNGEGLPHWPEYNQKEGYLQIGANTQAAQKLKDKEVAFWTNLFAKKAVEKPPQTEHIEL

SEQ ID NO: 13524 - protein, 491 aa, Homo sapiens
MEQPPAPKSKLKKLSEDSLTKQPEEVFDVLEKLGEGSYGSVFKAIHKESGQVVAIKQVPVESDLQEIIKEISIMQQCDSPYVVKYYGSYFKNTDLWIVMEYCGAGSVSDIIRLRNKTLIEDEIATILKSTLKGLEYLHFMRKIHRDIKAGNILLNTEGHAKLADFGVAGQLTDTMAKRNTVIGTPFWMAPEVIQEIGYNCVADIWSLGITSIEMAEGKPPYADIHPMRAIFMIPTNPPPTFRKPELWSDDFTDFVKKCLVKNPEQRATATQLLQHPFIKNAKPVSILRDLITEAMEIKAKRHEEQQRELEEEEENSDEDELDSHTMVKTSVESVGTMRATSTMSEGAQTMIEHNSTMLESDLGTMVINSEDEEEEDGTMKRNATSPQVQRPSFMDYFDKQDFKNKSHENCNQNMHEPFPMSKNVFPDNWKVPQDGDFDFLKNLSLEELQMRLKALDPMMEREIEELRQRYTAKRQPILDAMDAKKRRQQNF

SEQ ID NO: 13525 - protein, 2104 aa, Homo sapiens
MESQEFIVLYTHQKMKKSKVWQDGILKITHLGNKAILYDDKGACLESLFLKCLEVKPGDDLESDRYLITVEEVKVAGAIGIVKQNVNKEAPELNSRTFISSGRSLGCQPSGLKRKFTGFQGPRQVPKKMVIMESGESAASHEAKKTGPTIFSPFCSMPPLFPTVGKKDVNNILADPENIVTYKNRERNAMDFSSVFSPSFQINPEVLCEENYFCSPVNSGNKLSDSLLTNEPVKRDSLASHYSGVSQNIRSKAQILALLKSESSSSCEELNSEMTEHFPQKQPQGSLKIATKPKYLIQQEECAEMKSTENLYYQHQSENTMRNKSRWAMYLSSQSSPIHSSTVDGNDTERKPKAQEDDVNSNLKDLSLQKIIQFVETYAEERKKYNVDQSVGNNDPSWNQEVKLEIPSFNESSSLQVTCSSAENDGILSESDIQEDNKIPFNQNDKGCIKGSVLIKENAQEVNTCGTLEKEYEQSESSLPELKHLQIESSNNSRISDDITDMISESKMDNESLNSIHESLSNVTQPFLEVTFNLNNFETSDTEEESQESNKISQDSESWVKDILVNDGNSCFQKRSENTNCEEIEGEHLPFLTSVSDKPTVTFPVKETLPSQFCDKTYVGFDMGICKTENTGKEIEEYSDTLSNFESFKWTDAVYGDNKEDANKPIQEVRINYDFALPPNKSKGINMNLHIPHIQNQIAENSNLFSEDAQPQPFILGSDLDKNDEHVLPSTSSSDNSVQLLNTNQNHYECIALDKSNTHISNSLFYPLGKKHLISKDTEAHISEPEDLGKIRSPPPDHVEVETAREGKQYWNPRNSSELSGLVNTISILKSLCEHSTALDSLEILKKKNTVFQQGTQQTYEPDSPPEVRKPFITVVSPKSPHLHKDSQQILKEDEVELSEPLQSVQFSSSGSKEETAFQAVIPKQIERKTCDPKPVEFQGHQVKGSATSGVMVRGHSSQLGCSQFPDSTEYENFMTETPELPSTCMQIDFLQVTSPEENISTLSPVSTFSLNSRDEDFMVEFSETSLKARTLPDDLHFLNLEGMKKSRSLENENLQRLSLLSRTQVPLITLPRTDGPPDLDSHSYMINSNTYESSGSPMLNLCEKSAVLSFSIEPEDQNETFFSEESREVNPGDVSLNNISTQSKWLKYQNTSQCNVATPNRVDKRITDGFFAEAVSGMHFRDTSERQSDAVNESSLDSVHLQMIKGMLYQQRQDFSSQDSVSRKKVLSLNLKQTSKTEEIKNVLGGSTCYNYSVKDLQEISGSELCFPSGQKIKSAYLPQRQIHIPAVFQSPAHYKQTFTSCLIEHLNILLFGLAQNLQKALSKVDISFYTSLKGEKLKNAENNVPSCHHSQPAKLVMVKKEGPNKGRLFYTCDGPKADRCKFFKWLEDVTPGYSTQEGARPGMVLSDIKSIGLYLRSQKIPLYEECQLLVRKGFDFQRKQYGKLKKFTTVNPEFYNEPKTKLYLKLSRKERSSAYSKNDLWVVSKTLDFELDTFIACSAFFGPSSINEIEILPLKGYFPSNWPTNMVVHALLVCNASTELTTLKNIQDYFNPATLPLTQYLLTTSSPTIVSNKRVSKRKFIPPAFTNVSTKFELLSLGATLKLASELIQVHKLNKDQATALIQIAQMMASHESIEEVKELQTHTFPITIIHGVFGAGKSYLLAVVILFFVQLFEKSEAPTIGNARPWKLLISSSTNVAVDRVLLGLLSLGFENFIRVGSVRKIAKPILPYSLHAGSENESEQLKELHALMKEDLTPTERVYVRKSIEQHKLGTNRTLLKQVRVVGVTCAACPFPCMNDLKFPVVVLDECSQITEPASLLPIARFECEKLILVGDPKQLPPTIQGSDAAHENGLEQTLFDRLCLMGHKPILLRTQYRCHPAISAIANDLFYKGALMNGVTEIERSPLLEWLPTLCFYNVKGLEQIERDNSFHNVAEATFTLKLIQSLIASGIAGSMIGVITLYKSQMYKLCHLLSAVDFHHPDIKTVQVSTVDAFQGAEKEIIILSCVRTRQVGFIDSEKRMNVALTRGKRHLLIVGNLACLRKNQLWGRVIQHCEGREDGLQHANQYEPQLNHLLKDYFEKQVEEKQKKKSEKEKSKDKSHS

SEQ ID NO: 13526 - protein, 194 aa, Homo sapiens
MQPQHGPWQTRMRKISNHGSLRVAKVAYPLGLCVGVFIYVAYIKWHRATATQAFFSITRAAPGARWGQQAHSPLGTAADGHEVFYGIMFDAGSTGTRVHVFQFTRPPRETPTLTHETFKALKPGLSAYADDVEKVKKVFKASPFLVGDDCVSIMNGTDEGVSAWITINFLTGSLKTPGGSSVGMLDLGGGSTQI

SEQ ID NO: 13527 - protein, 920 aa, Homo sapiens
MSAPPVLRPPSPLLPVAAAAAAAAAALVPGSGPGPAPFLAPVAAPVGGISFHLQIGLSREPVLLLQDSSGDYSLAHVREMACSIVDQKFPECGFYGMYDKILLFRHDPTSENILQLVKAASDIQEGDLIEVVLSASATFEDFQIRPHALFVHSYRAPAFCDHCGEMLWGLVRQGLKCEGCGLNYHKRCAFKIPNNCSGVRRRRLSNVSLTGVSTIRTSSAELSTSAPDEPLLSPVSPGFEQKSPSESFIGREKRSNSQSYIGRPIHLDKILMSKVKVPHTFVIHSYTRPTVCQYCKKLLKGLFRQGLQCKDCRFNCHKRCAPKVPNNCLGEVTINGDLLSPGAESDVVMEEGSDDNDSERNSGLMDDMEEAMVQDAEMAMAECQNDSGEMQDPDPDHEDANRTISPSTSNNIPLMRVVQSVKHTKRKSSTVMKEGWMVHYTSKDTLRKRHYWRLDSKCITLFQNDTGSRYYKEIPLSEILSLEPVKTSALIPNGANPHCFEITTANVVYYVGENVVNPSSPSPNNSVLTSGVGADVARMWEIAIQHALMPVIPKGSSVGTGTNLHRDISVSISVSNCQIQENVDISTVYQIFPDEVLGSGQFGIVYGGKHRKTGRDVAIKIIDKLRFPTKQESQLRNEVAILQNLHHPGVVNLECMFETPERVFVVMEKLHGDMLEMILSSEKGRLPEHITKFLITQILVALRHLHFKNIVHCDLKPENVLLASADPFPQVKLCDFGFARIIGEKSFRRSVVGTPAYLAPEVLRNKGYNRSLDMWSVGVIIYVSLSGTFPFNEDEDIHDQIQNAAFMYPPNPWKEISHEAIDLINNLLQVKMRKRYSVDKTLSHPWLQDYQTWLDLRELECKIGERYITHESDDLRWEKYAGEQGLQYPTHLINPSASHSDTPETEETEMKALGERVSIL

SEQ ID NO: 13528 - protein, 380 aa, Homo sapiens
VDKSCPRGIIRVEESFRSGAKPPLRARDFMATNPEHLEILKKMGVSLIHLKDGRVQLVQHAIQAASSIDAEDGLRFMQEMIELSSQQQKEQQLPPRAVQIVSHPFFGRVVLTAGPAQFGLDLSKHKETRGFVASSKPSNGCSELTNPEAVMGKIALIQRGQCMFAEKARNIQNAGAIGGIVIDDNEGSSSDTAPLFQMAGDGKDTDDIKIPMLFLFSKEGSIILDAIREYEEVEVLLSDKAKDRDPEMENEEQPSSENDSQNQSGEQISSSSQEVDLVDQESSEENSLNSHPESLSLADMDNAASISPSEQTSNPTENHETTNLNGECTDLDNQLQEQSETEEDSNPNVSWGKKVQPIDSILADWNEDIEAFEMMEKDEL

SEQ ID NO: 13529 - protein, 279 aa, Homo sapiens
MLPPQKKPWESMAKGLVLGALFTSFLLLVYSYAVPPLHAGLASTTPEAAASCSPPALEPEAVIRANGSAGECQPRRNIVFLKTHKTASSTLLNILFRFGQKHRLKFAFPNGRNDFDYPTFFARSLVQDYRPGACFNIICNHMRFHYDEVRGLVPTNAIFITVLRDPARLFESSFHYFGPVVPLTWKLSAGDKLTEFLQDPDRYYDPNGFNAHYLRNLLFFDLGYDNSLDPSSPQVQEHILEVERRFHLVLLQEYFDESLVLLKDLLCWELEDVLYFKLN

SEQ ID NO: 13530 - protein, 99 aa, Homo sapiens
MGETEKRIETHRIRCLSKLKMFLLAITCAFVSKTLSGSYMNSMLTQIERQFNIPTSLVGFINGSFEIGNLLLIIFVSYFGTKLHRPIMIGIGCVVMGLG

SEQ ID NO: 13531 - protein, 592 aa, Homo sapiens
MEQLSDEEIDHGAEEDSDKEDQDLDKMFGAWLGELDKLTQSLDSDKPMEPVKRSPLRQETNMANFSYRFSIYNLNEALNQGETVDLDALMADLCSIEQELSSIGSGNSKRQITETKATQKLPVSRHTLKHGTLKGLSSSSNRIAKPSHASYSLDDVTAQLEQASLSMDEAAQQSVLEDTKPLVTNQHRRTASAGTVSDAEVHSISNSSHSSITSAASSMDSLDIDKVTRPQELDLTHQGQPITEEEQAAKLKAEKIRVALEKIKEAQVKKLVIRVHMSDDSSKTMMVDERQTVRQVLDNLMDKSHCGYSLDWSLVETVSELQMERIFEDHENLVENLLNWTRDSQNKLIFMERIEKYALFKNPQNYLLGKKETAEMADRNKEVLLEECFCGSSVTVPEIEGVLWLKDDGKKSWKKRYFLLRASGIYYVPKGKAKVSRDLVCFLQLDHVNVYYGQDYRNKYKAPTDYCLVLKHPQIQKKSQYIKYLCCDDVRTLHQWVNGIRIAKYGKQLYMNYQEALKRTESAYDWTSLSSSSIKSGSSSSSIPESQSNHSNQSDSGVSDTQPAGHVRSQSIVSSVFSEAWKRGTQLEESSK

SEQ ID NO: 13532 - protein, 567 aa, Homo sapiens
MDGEAVRFCTDNQCVSLHPQEVDSVAMAPAAPKIPRLVQATPAFMAVTLVFSLVTLFVVVQQQTRPVPKPVQAVILGDNITGHLPFEPNNHHHFGREAEMRELIQTFKGHMENSSAWVVEIQMLKCRVDNVNSQLQVLGDHLGNTNADIQMVKGVLKDATTLSLQTQMLRSSLEGTNAEIQRLKEDLEKADALTFQTLNFLKSSLENTSIELHVLSRGLENANSEIQMLNASLETANTQAQLANSSLKNANAEIYVLRGHLDSVNDLRTQNQVLRNSLEGANAEIQGLKENLQNTNALNSQTQAFIKSSFDNTSAEIQFLRGHLERAGDEIHVLKRDLKMVTAQTQKANGRLDQTDTQIQVFKSEMENVNTLNAQIQVLNGHMKNASREIQTLKQGMKNASALTSQTQMLDSNLQKASAEIQRLRGDLENTKALTMEIQQEQSRLKTLHVVITSQEQLQRTQSQLLQMVLQGWKFNGGSLYYFSSVKKSWHEAEQFCVSQGAHLASVASKEEQAFLVEFTSKVYYWIGLTDRGTEGSWRWTDGTPFNAAQNKASHSTRKGCCLHLTV

SEQ ID NO: 13533 - protein, 432 aa, Homo sapiens
MALCSLISSWASGFRSDDDQERRGDSYIVRVKAVVMTRDDSSGGWFPQEGGGISRVGVCKVMHPEGNGRSGFLIHGERQKDKLVVLECYVRKDLVYTKANPTFHHWKVDNRKFGLTFQSPADARAFDRGVRKAIEDLIEGSTTSSSTIHNEAELGDDDVFTTATDSSSNSSQKREQPTRTISSPTSCEHRRIYTLGHLHDSYPTDHYHLDQPMPRPYRQVSFPDDDEEIVRINPREKIWMTGYEDYRHAPVRGKYPDPSEDADSSYVRFAKGEVPKHDYNYPYVDSSDFGLGEDPKGRGGSVIKTQPSRGKSRRRKEDGERSRCVYCRDMFNHEENRRGHCQDAPDSVRTCIRRVSCMWCADSMLYHCMSDPEGDYTDPCSCDTSDEKFCLRWMALIALSFLAPCMCCYLPLRACYHCGVMCRCCGGKHKAA

SEQ ID NO: 13534 - protein, 1956 aa, Homo sapiens
MEFPIGSLETNNFRRFTPESLVEIEKQIAAKQGTKKAREKHREQKDQEEKPRPQLDLKACNQLPKFYGELPAELIGEPLEDLDPFYSTHRTFMVLNKGRTISRFSATRALWLFSPFNLIRRTAIKVSVHSWFSLFITVTILVNCVCMTRTDLPEKIEYVFTVIYTFEALIKILARGFCLNEFTYLRDPWNWLDFSVITLAYVGTAIDLRGISGLRTFRVLRALKTVSVIPGLKVIVGALIHSVKKLADVTILTIFCLSVFALVGLQLFKGNLKNKCVKNDMAVNETTNYSSHRKPDIYINKRGTSDPLLCGNGSDSGHCPDGYICLKTSDNPDFNYTSFDSFAWAFLSLFRLMTQDSWERLYQQTLRTSGKIYMIFFVLVIFLGSFYLVNLILAVVTMAYEEQNQATTDEIEAKEKKFQEALEMLRKEQEVLAALGIDTTSLHSHNGSPLTSKNASERRHRIKPRVSEGSTEDNKSPRSDPYNQRRMSFLGLASGKRRASHGSVFHFRSPGRDISLPEGVTDDGVFPGDHESHRGSLLLGGGAGQQGPLPRSPLPQPSNPDSRHGEDEHQPPPTSELAPGAVDVSAFDAGQKKTFLSAEYLDEPFRAQRAMSVVSIITSVLEELEESEQKCPPCLTSLSQKYLIWDCCPMWVKLKTILFGLVTDPFAELTITLCIVVNTIFMAMEHHGMSPTFEAMLQIGNIVFTIFFTAEMVFKIIAFDPYYYFQKKWNIFDCIIVTVSLLELGVAKKGSLSVLRSFRLLRVFKLAKSWPTLNTLIKIIGNSVGALGNLTIILAIIVFVFALVGKQLLGENYRNNRKNISAPHEDWPRWHMHDFFHSFLIVFRILCGEWIENMWACMEVGQKSICLILFLTVMVLGNLVVLNLFIALLLNSFSADNLTAPEDDGEVNNLQVALARIQVFGHRTKQALCSFFSRSCPFPQPKAEPELVVKLPLSSSKAENHIAANTARGSSGGLQAPRGPRDEHSDFIANPTVWVSVPIAEGESDLDDLEDDGGEDAQSFQQEVIPKGQQEQLQQVERCGDHLTPRSPGTGTSSEDLAPSLGETWKDESVPQVPAEGVDDTSSSEGSTVDCLDPEEILRKIPELADDLEEPDDCFTEGCIRHCPCCKLDTTKSPWDVGWQVRKTCYRIVEHSWFESFIIFMILLSSGSLAFEDYYLDQKPTVKALLEYTDRVFTFIFVFEMLLKWVAYGFKKYFTNAWCWLDFLIVNISLISLTAKILEYSEVAPIKALRTLRALRPLRALSRFEGMRVVVDALVGAIPSIMNVLLVCLIFWLIFSIMGVNLFAGKFWRCINYTDGEFSLVPLSIVNNKSDCKIQNSTGSFFWVNVKVNFDNVAMGYLALLQVATFKGWMDIMYAAVDSREVNMQPKWEDNVYMYLYFVIFIIFGGFFTLNLFVGVIIDNFNQQKKKLGGQDIFMTEEQKKYYNAMKKLGSKKPQKPIPRPLNKFQGFVFDIVTRQAFDITIMVLICLNMITMMVETDDQSEEKTKILGKINQFFVAVFTGECVMKMFALRQYYFTNGWNVFDFIVVVLSIASLIFSAILKSLQSYFSPTLFRVIRLARIGRILRLIRAAKGIRTLLFALMMSLPALFNIGLLLFLVMFIYSIFGMSSFPHVRWEAGIDDMFNFQTFANSMLCLFQITTSAGWDGLLSPILNTGPPYCDPNLPNSNGTRGDCGSPAVGIIFFTTYIIISFLIMVNMYIAVILENFNVATEESTEPLSEDDFDMFYETWEKFDPEATQFITFSALSDFADTLSGPLRIPKPNRNILIQMDLPLVPGDKIHCLDILFAFTKNVLGESGELDSLKANMEEKFMATNLSKSSYEPIATTLRWKQEDISATVIQKAYRSYVLHRSMALSNTPCVPRAEEEAASLPDEGFVAFTANENCVLPDKSETASATSFPPSYESVTRGLSDRVNMRTSSSIQNEDEATSMELIAPGP

SEQ ID NO: 13535 - protein, 482 aa, Homo sapiens
MVDFPGYNLSGAVASFLFILLTMKQSEDFRVIGPAHPILAGVGEDALLTCQLLPKRTTMHVEVRWYRSEPSTPVFVHRDGVEVTEMQMEEYRGWVEWIENGIAKGNVALKIHNIQPSDNGQYWCHFQDGNYCGETSLLLKVAGLGSAPSIHMEGPGESGVQLVCTARGWFPEPQVYWEDIRGEKLLAVSEHRIQDKDGLFYAEATLVVRNASAESVSCLVHNPVLTEEKGSVISLPEKLQTELASLKVNGPSQPILVRVGEDIQLTCYLSPKANAQSMEVRWDRSHRYPAVHVYMDGDHVAGEQMAEYRGRTVLVSDAIDEGRLTLQILSARPSDDGQYRCLFEKDDVYQEASLDLKVVSLGSSPLITVEGQEDGEMQPMCSSDGWFPQPHVPWRDMEGKTIPSSSQALTQGSHGLFHVQTLLRVTNISAVDVTCSISIPFLGEEKIATFSLSESRMTFLWKTLLVWGLLLAVAVGLPRKRS

SEQ ID NO: 13536 - protein, 395 aa, Homo sapiens
MLQLLVLKIEDPGCFWVIIKGCSPFLDHDVDYQKLNSAMNDFYNSTCQDIEIKPLTLEEGQVCVVYCEELKCWCRAIVKSITSSADQYLAECFLVDFAKNIPVKSKNIRVVVESFMQLPYRAKKFSLYCTKPVTLHIDFCRDSTDIVPAKKWDNAAIQYFQNLLKATTQVEARLCAVEEDTFEVYLYVTIKDEKVCVNDDLVAKNYACYMSPTKNKNLDYLEKPRLNIKSAPSFNKLNPALTLWPMFLQGKDVQGMEDSHGVNFPAQSLQHTWCKGIVGDLRPTATAQDKAVKCNMDSLRDSPKDKSEKKHHCISLKDTNKRVESSVYWPAKRGITIYADPDVPEASALSQKSNEKPLRLTEKKEYDEKNSCVKLLQFLNPDPLRADGISDLQQT

SEQ ID NO: 13537 - protein, 216 aa, Homo sapiens
MELMKLTPEKVQNWNSEILAKQKPLIAKPSAKLLFVNRLKGKKYKTNSSTKVLQDASNSIDHRIPNSQRKISADTIGDEGFFDLLSRFQSNRMDDQRCCLQEKNCHTASTTTSSTPPKMMLKTSSVPVVSPNTDEFLDLLASSQSRRLDDQRASFSNLPGLRLTQNSQSVLSHLMTNDNKEADEDFFDILVKCQVCLYIFFVLHTAQIPLKTLVVL

SEQ ID NO: 13538 - protein, 445 aa, Homo sapiens
MNGRSLIGGAGDARHGPVWKDPFGTKAGDAARRGIARLSLALADGSQEQEPEEEIAMEDSPTMVRVDSPTMVRGENQVSPCQGRRCFPKALGYVTGDMKELANQLKDKPVVLQFIDWILRGISQVVFVNNPVSGILILVGLLVQNPWWALTGWLGTVVSTLMALLLSQDRSLIASGLYGYNATLVGVLMAVFSDKGDYFWWLLLPVCAMSMTCPIFSSALNSMLSKWDLPVFTLPFNMALSMYLSATGHYNPFFPAKLVIPITTAPNISWSDLSALELLKSIPVGVGQIYGCDNPWTGGIFLGAILLSSPLMCLHAAIGSLLGIAAGLSLSAPFEDIYFGLWGFNSSLACIAMGGMFMALTWQTHLLALGCALFTAYLGVGMANFMAEVGLPACTWPFCLATLLFLIMTTKNSNIYKMPLSKVTYPEENRIFYLQAKKRMVESPL

SEQ ID NO: 13539 - protein, 700 aa, Homo sapiens
MNKDYQKFWSSPSDPVHFEVDTSHEKVESMSESDTMNVSNLSQGVMLSHSPICMETTGTTCDLPQNEIKNFERENEYESTLCEDAYGTLDNLLNDNNIENYSTNALIQPVDTISISSLRQFETVCKFHWVEAFDDEMTEKPEFQSQVYNYAKDNNIKQDSFKEENPMETSVSANTDQLGNEYFRQPPPRSPPLIHCSGEMLKFTEKSLAKSIAKESALNPSQPPSFLCKTAVPSKEIQNYGEIPEMSVSYEKEVTAEGVERPEIVSTWSSAGISWRSEACRENCEMPDWEQSAESLQPVQEDMALNEVLQKLKHTNRKQEVRIQELQCSNLYLEKRVKELQMKITKQQVFIDVINKLKENVEELIEDKYKIILEKNDTKKTLQNLEEVLANTQKHLQESRNDKEMLQLQFKKIKANYVCLQERYMTEMQQKNKSVSQYLEMDKTLSKKEEEVERLQQLKKELEKATASALDLLKREKEAQEQEFLSLQEEFQKLEKENLEERQKLKSRLEKLLTQVRNLQFMSENERTKNIKLQQQINEVKNENAKLKQQVARSEEQNYVPKFETAQLKDQLEEVLKSDITKDTKTTHSNLLPDCSPCEERLNPADIKRASQLASKMHSLLALMVGLLTCQDIINSDAEHFKESEKVSDIMLQKLKSLHLKKKTLDKELLKHKDRITTFRELIAKEKAFQDHAIKVFQGV

SEQ ID NO: 13540 - protein, 300 aa, Homo sapiens
MKKGIRYETSRKTSYIFQQPQHGPWQTRMRKISNHGSLRVAKVAYPLGLCVGVFIYVAYIKWHRATATQAFFSITRAAPGARWGQQAHSPLGTAADGHEVFYGIMFDAGSTGTRVHVFQFTRPPRETPTLTHETFKALKPGLSAYADDVEKVKKVFKASPFLVGDDCVSIMNGTDEGVSAWITINFLTGSLKTPGGSSVGMLDLGGGSTQIAFLPRVEGTLQASPPGYLTALRMFNRTYKLYSYSYLGLGLMSARLAILGGVEGQPAKDGKELVSPCLSPSFKGEWEHAEVTYRVSGQKA

SEQ ID NO: 13541 - protein, 483 aa, Homo sapiens
MFCSTSAVNSCARCFFHSVCPAGMIVKFPGTAQKNTVCEPASPGVSPACASPENCKEPSSGTIPQAKPTPVSPATSSASTMPVRGGTRLAQEAASKLTRAPDSPSSVGRPSSDPGLSPTQPCPEGSGDCRKQCEPDYYLDEAGRCTACVSCSRDDLVEKTPCAWNSSRTCECRPGMICATSATNSCARCVPYPICAAETVTKPQDMAEKDTTFEAPPLGTQPDCNPTPENGEAPASTSPTQSLLVDSQASKTLPIPTSAPVALSSTGKPVLDAGPVLFWVILVLVVVVGSSAFLLCHRRACRKRIRQKLHLCYPVQTSQPKLELVDSRPRRSSTLRSGASVTEPVAEERGLMSQPLMETCHSVGAAYLESLPLQDASPAGGPSSPRDLPEPRVSTEHTNNKIEKIYIMKADTVIVGTVKAELPEGRGLAGPAEPELEEELEADHTPHYPEQETEPPLGSCSDVMLSVEEEGKEDPLPTAASGK

SEQ ID NO: 13542 - protein, 1367 aa, Homo sapiens
MLDRCALVEQRKRSPSVSRDQNRRYDQREEREEYSQYATSDTAMPRSPSDYADRRSQHEPQFYEDSDHLSYRDSNRRSHRHSKEYIVDDEDVESRDEYERQRREEEYQSRYRSDPNLARYPVKPQPYEEQMRIHAEVSRARHERRHSDVSLANADLEDSRISMLRMDRPSRQRSISERRAAMENQRSYSMERTREAQGPSSYAQRTTNHSPPTPRRSPLPIDRPDLRRTDSLRKQHHLDPSSAVRKTKREKMETMLRNDSLSSDQSESVRPPPPKPHKSKKGGKMRQISLSSSEEELASTPEYTSCDDVEIESESVSEKGDMDYNWLDHTSWHSSEASPMSLHPVTWQPSKDGDRLIGRILLNKRLKDGSVPRDSGAMLGLKVVGGKMTESGRLCAFITKVKKGSLADTVGHLRPGDEVLEWNGRLLQGATFEEVYNIILESKPEPQVELVVSRPIGDIPRIPDSTHAQLESSSSSFESQKMDRPSISVTSPMSPGMLRDVPQFLSGQLSSQSLSRRTTPFVPRVQIKLWFDKVGHQLIVTILGAKDLPSREDGRPRNPYVKIYFLPDRSDKNKRRTKTVKKTLEPKWNQTFIYSPVHRREFRERMLEITLWDQARVREEESEFLGEILIELETALLDDEPHWYKLQTHDVSSLPLPHPSPYMPRRQLHGESPTRRLQRSKRISDSEVSDYDCDDGIGVVSDYRHDGRDLQSSTLSVPEQVMSSNHCSPSGSPHRVDVIGRTRSWSPSVPPPQSRNVEQGLRGTRTMTGHYNTISRMDRHRVMDDHYSPDRDSHFLTLPRSRYSQTIDHHHRDGRSHPRTGSVQTSPSSTPVAGRRGRQLPQLPPKGTLDRNNGVKEIEPYEEELDSTRRRYAGTMDIEERNRQMKINKYKQVAGSDPRLEQDYHSKYRSGWDPHRGADNVSTKSSDSDVSDISAVSRTSSASRFSSTSYMSVQSERPGGNKKIRPKGIEEGGKEGDKHEEIVHEKEEVKEERINENEKGKEIAKTCNKEKNRESGDEEKTQDIHEQGKEKEQWNKEDLQRRFSQDDTSVFTSKMQSRQMGISGKNMTKSTSISGDMCSLEKNDGSQSDTAVGTLGTSGKKRRSSLGAKMVAIVGLSRKSRSASQLSQTEAGGKKLRSTVQRSTETGLAVEMRNWMTRQASRESTDGSMNSYSSEGNLIFPGVRLASDSQFSDFLDGLGPAQLVGRQTLATPAMGDIQVGMMDKKGQLEVEIIRARGLVVKPGSKTLPAPYVKVYLLDNGVCIAKKKTKVARKTLEPLYQQLLSFEESPQGKVLQIIVWGDYGRMDHKSFMGVAQILLDELELSNMVIGWFKLFPPSSLVDPTLAPLTRRASQSSLESSTGPSYSRS

SEQ ID NO: 13543 - protein, 51 aa, Homo sapiens
MGETEKRIETHRIRCLSKLKMFLLAITCAFVSKTLSGSYMNSMLTQIERQF

SEQ ID NO: 13544 - protein, 592 aa, Homo sapiens
MWLFFGITGLLTAALSGHPSPAPPDQLNTSSAESELWEPGERLPVRLTNGSSSCSGTVEVRLEASWEPACGALWDSRAAEAVCRALGCGGAEAASQLAPPTPELPPPPAAGNTSVAANATLAGAPALLCSGAEWRLCEVVEHACRSDGRRARVTCAENRALRLVDGGGACAGRVEMLEHGEWGSVCDDTWDLEDAHVVCRQLGCGWAVQALPGLHFTPGRGPIHRDQVNCSGAEAYLWDCPGLPGQHYCGHKEDAGAVCSEHQSWRLTGGADRCEGQVEVHFRGVWNTVCDSEWYPSEAKVLCQSLGCGTAVERPKGLPHSLSGRMYYSCNGEELTLSNCSWRFNNSNLCSQSLAARVLCSASRSLHNLSTPEVPASVQTVTIESSVTVKIENKESRELMLLIPSIVLGILLLGSLIFIAFILLRIKGKYALPVMVNHQHLPTTIPAGSNSYQPVPITIPKEDSQRHRVTDEEVQQSRFQMPPLEEGLEELHASHIPTANPGHCITDPPSLGPQYHPRSNSESSTSSGEDYCNSPKSKLPPWNPQVFSSERSSFLEQPPNLELAGTQPAFSGSPSPQPDSTDNDDYDDISAA

SEQ ID NO: 13545 - protein, 816 aa, Homo sapiens
MESRVLLRTFCLIFGLGAVWGLGVDPSLQIDVLTELELGESTTGVRQVPGLHNGTKAFLFQDTPRSIKASTATAEQFFQKLRNKHEFTILVTLKQTHLNSGVILSIHHLDHRYLELESSGHRNEVRLHYRSGSHRPHTEVFPYILADDKWHKLSLAISASHLILHIDCNKIYERVVEKPSTDLPLGTTFWLGQRNNAHGYFKGIMQDVQLLVMPQGFIAQCPDLNRTCPTCNDFHGLVQKIMELQDILAKTSAKLSRAEQRMNRLDQCYCERTCTMKGTTYREFESWIDGCKNCTCLNGTIQCETLICPNPDCPLKSALAYVDGKCCKECKSICQFQGRTYFEGERNTVYSSSGVCVLYECKDQTMKLVESSGCPALDCPESHQITLSHSCCKVCKGYDFCSERHNCMENSICRNLNDRAVCSCRDGFRALREDNAYCEDIDECAEGRHYCRENTMCVNTPGSFMCICKTGYIRIDDYSCTEHDECITNQHNCDENALCFNTVGGHNCVCKPGYTGNGTTCKAFCKDGCRNGGACIAANVCACPQGFTGPSCETDIDECSDGFVQCDSRANCINLPGWYHCECRDGYHDNGMFSPSGESCEDIDECGTGRHSCANDTICFNLDGGYDCRCPHGKNCTGDCIHDGKVKHNGQIWVLENDRCSVCSCQNGFVMCRRMVCDCENPTVDLFCCPECDPRLSSQCLHQNGETLYNSGDTWVQNCQQCRCLQGEVDCWPLPCPDVECEFSILPENECCPRCVTDPCQADTIRNDITKTCLDEMNVVRFTGSSWIKHGTECTLCQCKNGHICCSVDPQCLQEL

SEQ ID NO: 13546 - protein, 1134 aa, Homo sapiens
MHQMNAKMHFRFVFALLIVSFNHDVLGKNLKYRIYEEQRVGSVIARLSEDVADVLLKLPNPSTVRFRAMQRGNSPLLVVNEDNGEISIGATIDREQLCQKNLNCSIEFDVITLPTEHLQLFHIEVEVLDINDNSPQFSRSLIPIEISESAAVGTRIPLDSAFDPDVGENSLHTYSLSANDFFNIEVRTRTDGAKYAELIVVRELDRELKSSYELQLTASDMGVPQRSGSSILKISISDSNDNSPAFEQQSYIIQLLENSPVGTLLLDLNATDPDEGANGKIVYSFSSHVSPKIMETFKIDSERGHLTLFKQVDYEITKSYEIDVQAQDLGPNSIPAHCKIIIKVVDVNDNKPEININLMSPGKEEISYIFEGDPIDTFVALVRVQDKDSGLNGEIVCKLHGHGHFKLQKTYENNYLILTNATLDREKRSEYSLTVIAEDRGTPSLSTVKHFTVQINDINDNPPHFQRSRYEFVISENNSPGAYITTVTATDPDLGENGQVTYTILESFILGSSITTYVTIDPSNGAIYALRIFDHEEVSQITFVVEARDGGSPKQLVSNTTVVLTIIDENDNVPVVIGPALRNNTAEITIPKGAESGFHVTRIRAIDRDSGVNAELSCAIVAGNEENIFIIDPRSCDIHTNVSMDSVPYTEWELSVIIQDKGNPQLHTKVLLKCMIFEYAESVTSTAMTSVSQASLDVSMIIIISLGAICAVLLVIMVLFATRCNREKKDTRSYNCRVAESTYQHHPKRPSRQIHKGDITLVPTINGTLPIRSHHRSSPSSSPTLERGQMGSRQSHNSHQSLNSLVTISSNHVPENFSLELTHATPAVEVSQLLSMLHQGQYQPRPSFRGNKYSRSYRYALQDMDKFSLKDSGRGDSEAGDSDYDLGRDSPIDRLLGEGFSDLFLTDGRIPAAMRLCTEECRVLGHSDQCWMPPLPSPSSDYRSNMFIPGEEFPTQPQQQHPHQSLEDDAQPADSGEKKKSFSTFGKDSPNDEDTGDTSTSSLLSEMSSVFQRLLPPSLDTYSECSEVDRSNSLERRKGPLPAKTVGYPQGVAAWAASTHFQNPTTNCGPPLGTHSSVQPSSKWLPAMEEIPENYEEDDFDNVLNHLNDGKHELMDASELVAEINKLLQDVRQS

SEQ ID NO: 13547 - protein, 551 aa, Homo sapiens
MPDSNFAERSEEQVSGAKVIAQALKTQDVEYIFGIVGIPVTEIAIAAQQLGIKYIGMRNEQAACYAASAIGYLTSRPLLVIGGSSERNQETMGAFQEFPQVEACRLYTKFSARPSSIEAIPFVIEKAVRSSIYGRPGACYVDIPADFVNLQVNVNSIKYMERCMSPPISMAETSAVCTAASVIRNAKQPLLIIGKGAAYAHAEESIKKLVEQYKLPFLPTPMGKGVVPDNHPYCVGAARSRALQFADVIVLFGARLNWILHFGLPPRYQPDVKFIQVDICAEELGNNVKPAVTLLGNIHAVTKQLLEELDKTPWQYPPESKWWKTLREKMKSNEAASKELASKKSLPMNYYTVFYHVQEQLPRDCFVVSEGANTMDIGRTVLQNYLPRHRLDAGTFGTMGVGLGFAIAAAVVAKDRSPGQWIICVEGDSAFGFSGMEVETICRYNLPIILLVVNNNGIYQGFDTDTWKEMLKFQDATAVVPPMCLLPNSHYEQVMTAFGGKGYFVQTPEELQKSLRQSLADTTKPSLINIMIEPQATRKAQDFHWLTRSNM

SEQ ID NO: 13548 - protein, 289 aa, Homo sapiens
MPKNSKVVKRELDDDVTESVKDLLSNEDAADDAFKTSELIVDGQEEKDTDVEEGSEVEDERPAWNSKLQYILAQVGFSVGLGNVWRFPYLCQKNGGGAYLLPYLILLMVIGIPLFFLELSVGQRIRRGSIGVWNYISPKLGGIGFASCVVCYFVALYYNVIIGWSLFYFSQSFQQPLPWDQCPLVKNASHTFVEPECEQSSATTYYWYREALNISSSISESGGLNWKMTICLLAAWVMVCLAMIKGIQSSGKVSMLEPFLILLITISGFIPLSNSVTDFCGQITHNTSF

SEQ ID NO: 13549 - protein, 169 aa, Homo sapiens
MTEAEVRGLCIKSREIFLSQPILLELEAPLKICGDIHGQYTDLLRLFEYGGFPPEANYLFLGDYVDRGKQSLETICLLLAYKIKYPENFFLLRGNHECASINRIYGFYDECKRRFNIKLWKTFTDCFNCLPIAAIVDEKIFCCHGGLSPDLQSMEQIRRIMRPTDVPDT

SEQ ID NO: 13550 - protein, 1450 aa, Homo sapiens
MAEARKRRELLPLIYHHLLRAGYVRAAREVKEQSGQKCFLAQPVTLLDIYTHWQQTSELGRKRKAEEDAALQAKKTRVSDPISTSESSEEEEEAEAETAKATPRLASTNSSVLGADLPSSMKEKAKAETEKAGKTGNSMPHPATGKTVANLLSGKSPRKSAEPSANTTLVSETEEEGSVPAFGAAAKPGMVSAGQADSSSEDTSSSSDETDVEGKPSVKPAQVKASSVSTKESPARKAAPAPGKVGDVTPQVKGGALPPAKRAKKPEEESESSEEGSESEEEAPAGTRSQVKASEKILQVRAASAPAKGTPGKGATPAPPGKAGAVASQTKAGKPEEDSESSSEESSDSEEETPAAKALLQAKASGKTSQVGAASAPAKESPRKGAAPAPPGKTGPAVAKAQAGKREEDSQSSSEESDSEEEAPAQAKPSGKAPQVRAASAPAKESPRKGAAPAPPRKTGPAAAQVQVGKQEEDSRSSSEESDSDREALAAMNAAQVKPLGKSPQVKPASTMGMGPLGKGAGPVPPGKVGPATPSAQVGKWEEDSESSSEESSDSSDGEVPTAVAPAQEKSLGNILQAKPTSSPAKGPPQKAGPVAVQVKAEKPMDNSESSEESSDSADSEEAPAAMTAAQAKPALKIPQTKACPKKTNTTASAKVAPVRVGTQAPRKAGTATSPAGSSPAVAGGTQRPAEDSSSSEESDSEEEKTGLAVTVGQAKSVGKGLQVKAASVPVKGSLGQGTAPVLPGKTGPTVTQVKAEKQEDSESSEEESDSEEAAASPAQVKTSVKKTQAKANPAAARAPSAKGTISAPGKVVTAAAQAKQRSPSKVKPPVRNPQNSTVLARGPASVPSVGKAVATAAQAQTGPEEDSGSSEEESDSEEEAETLAQVKPSGKTHQIRAALAPAKESPRKGAAPTPPGKTGPSAAQAGKQDDSGSSSEESDSDGEAPAAVTSAQVIKPPLIFVDPNRSPAGPAATPAQAQAASTPRKARASESTARSSSSESEDEDVIPATQCLTPGIRTNVVTMPTAHPRIAPKASMAGASSSKESSRISDGKKQEGPATQVDSAVGTLPATSPQSTSVQAKGTNKLRKPKLPEVQQATKAPESSDDSEDSSDSSSGSEEDGEGPQGAKSAHTLGPTPSRTETLVEETAAESSEDDVVAPSQSLLSGYMTPGLTPANSQASKATPKLDSSPSVSSTLAAKDDPDGKQEAKPQQAAGMLSPKTGGKEAASGTTPQKSRKPKKGAGNPQASTLALQSNITQCLLGQPWPLNEAQVQASVVKVLTELLEQERKKVVDTTKESSRKGWESRKRKLSGDQPAARTPRSKKKKKLGAGEGGEASVSPEKTSTTSKGKAKRDKASGDVKEKKGKGSLGSQGAKDEPEEELQKGMGTVEGGDQSNPKSKKEKKKSDKRKKDKEKKEKKKKAKKASTKDSESPSQKKKKKKKKTAEQTV

SEQ ID NO: 13551 - protein, 256 aa, Homo sapiens
MSNNLSELDTKIQEKAMKVDMDICRRIDITAKLCDVAQQRNCEDMIQMFQKKLVPSMGGRKRERKAAVEEDTSLSESEGPRQPDGDEEESTALSINEEMQRMLNQLREYDFEDDCDSLTWEETEETLLLWEDFSGYAMAAAEAQGEQQEDSLEKVIKDTESLFKTREKEYQETIDQIELELATAKNDMNRHLHEYMEMCSMKRGLDVQMETCRRLITQSGDRKSPAFTAVPLSDPPPPPSEAEDSDRDVSSDSSMR

SEQ ID NO: 13552 - protein, 171 aa, Homo sapiens
MTLQWAAVATFLYAEIGLILIFCLPFIPPQRWQKIFSFNVWGKIATFWNKAFLTIIILLIVLFLDAVREVRKYSSVHTIEKSSTSRPDAYEHTQMKLFRSQRNLYISGFSLFFWLVLRRLVTLITQLAKELSNKGVLKTQAENTNKAAKKFMEENEKLKRFLLAKVHCRKL

SEQ ID NO: 13553 - protein, 428 aa, Homo sapiens [sequence omitted]

SEQ ID NO: 13554 - protein, 378 aa, Homo sapiens
MIIVAHVLLILLGATEILQADLLPDEKISLLPPVNFTIKVTGLAQVLLQWKPNPDQEQRNVNLEYQVKINAPKEDDYETRITESKCVTILHKGFSASVRTILQNDHSLLASSWASAELHAPPGSPGTSIVNLTCTTNTTEDNYSRLRSYQVSLHCTWLVGTDAPEDTQYFLYYRYGSWTEECQEYSKDTLGRNIACWFPRTFILSKGRDWLAVLVNGSSKHSAIRPFDQLFALHAIDQINPPLNVTAEIEGTRLSIQWEKPVSAFPIHCFDYEVKIHNTRNGYLQIEKLMTNAFISIIDDLSKYDVQVRAAVSSMCREAGLWSEWSQPIYVGNDEHKPLREWFVIVIMATICFILLILSLICKIKLGPVRRKLKSSVI

SEQ ID NO: 13555 - protein, 365 aa, Homo sapiens
MGRKKIQISRILDQRNRQVTFTKRKFGLMKKAYELSVLCDCEIALIIFNSANRLFQYASTDMDRVLLKYTEYSEPHESRTNTDILETLKRRGIGLDGPELEPDEGPEEPGEKFRRLAGEGGDPALPRPRLYPAAPAMPSPDVVYGALPPPGCDPSGLGEALPAQSRPSPFRPAAPKAGPPGLVHPLFSPSHLTSKTPPPLYLPTEGRRSDLPGGLAGPRGGLNTSRSLYSGLQNPCSTATPGPPLGSFPFLPGGPPVGAEAWARRVPQPAAPPRRPPQSASSLSASLRPPGAPATFLRPSPIPCSSPGPWQSLCGLGPPCAGCPWPTAGPGRRSPGGTSPERSPGTARARGDPTSLQASSEKTQQ

SEQ ID NO: 13556 - protein, 235 aa, Homo sapiens
PKQSVYDAYRKYCESLACCRPLSTANFGKIIREIFPDIKARRLGGRGQSKYCYSGIRRKTLVSMPPLPGLDLKGSESPEMGPEVTPAPRDELVEAACALTCDWAERILKRSFSSIVEVARFLLQQHLISARSAHAHVLKAMGLAEEDEHAPRERSSKPKNGLENPEGGAHKKPERLAQPPKDLEARTGAGPLARGERKKSVVESSAPGANNLQEVHSPLYRQLSHPVYLVPGCCL

SEQ ID NO: 13557 - protein, 150 aa, Homo sapiens
MGGPVREPALSVALWLSWGAALGAVACAMALLTQQTELQSLRREVSRLQGTGGPSQNGEGYPWQSLPEQSSDALEAWENGERSRKRRAVLTQKQKNDSDVTEVMWQPALRRGRGLQAQGYGVRIQDAGVYLLYSQVLFQDVTFTMGQVVS

SEQ ID NO: 13558 - protein, 642 aa, Homo sapiens
MAAAAAATAAAAASIRERQTVALKRMLNFNVPHIKNSTGEPVWKVLIYDRFGQDIISPLLSVKELRDMGITLHLLLHSDRDPIPDVPAVYFVMPTEENIDRMCQDLRNQLYESYYLNFISAISRSKLEDIANAALAASAVTQVAKVFDQYLNFITLEDDMFVLCNQNKELVSYRAINRPDITDTEMETVMDTIVDSLFCFFVTLGAVPIIRCSRGTAAEMVAVKLDKKLRENLRDARNSLFTGDTLGAGQFSFQRPLLVLVDRNIDLATPLHHTWTYQALVHDVLDFHLNRVNLEESSGVENSPAGARPKRKNKKSYDLTPVDKFWQKHKGSPFPEVAESVQQELESYRAQEDEVKRLKSIMGLEGEDEGAISMLSDNTAKLTSAVSSLPELLEKKRLIDLHTNVATAVLEHIKARKLDVYFEYEEKIMSKTTLDKSLLDIISDPDAGTPEDKMRLFLIYYISTQQAPSEADLEQYKKALTDAGCNLNPLQYIKQWKAFTKMASAPASYGSTTTKPMGLLSRVMNTGSQFVMEGVKNLVLKQQNLPVTRILDNLMEMKSNPETDDYRYFDPKMLRGNDSSVPRNKNPFQEAIVFVVGGGNYIEYQNLVDYIKGKQGKHILYGCSELFNATQFIKQLSQLGQK

SEQ ID NO: 13559 - protein, 378 aa, Homo sapiens
MQLRLFRRLLLAALLLVIVWTLFGPSGLGEELLSLSLASLLPAPASPGPPLALPRLLIPNQEACSGPGAPPFLLILVCTAPENLNQRNAIRASWGGLREARGLRVQTLFLLGEPNAQHPVWGSQGSDLASESAAQGDILQAAFQDSYRNLTLKTLSGLNWAEKHCPMARYVLKTDDDVYVNVPELVSELVLRGGRWGQWERSTEPQREAEQEGGQVLHSEEVPLLYLGRVHWRVNPSRTPGGRHRVSEEQWPHTWGPFPPYASGTGYVLSASAVQLILKVASRAPLLPLEDVFVGVSARRGGLAPTQCVKLAGATHYPLDRCCYGKFLLTSHRLDPWKMQEAWKLVGGSDGERTAPFCSWFQGVLGILRCRAIAWLQS

SEQ ID NO: 13560 - protein, 873 aa, Homo sapiens
MFFYLSKKISIPNNVKLQCVSWNKEQGFIACGGEDGLLKVLKLETQTDDAKLRGLAAPSNLSMNQTLEGHSGSVQVVTWNEQYQKLTTSDENGLIIVWMLYKGSWIEEMINNRNKSVVRSMSWNADGQKICIVYEDGAVIVGSVDGNRIWGKDLKGIQLSHVTWSADSKVLLFGMANGEIHIYDNQGNFMIKMKLSCLVNVTGAISIAGIHWYHGTEGYVEPDCPCLAVCFDNGRCQIMRHENDQNPVLIDTGMYVVGIQWNHMGSVLAVAGFQKAAMQDKDVNIVQFYTPFGEHLGTLKVPGKEISALSWEGGGLKIALAVDSFIYFANIRPNYKWGYCSNTVVYAYTRPDRPEYCVVFWDTKNNEKYVKYVKGLISITTCGDFCILATKADENHPQEENEMETFGATFVLVLCNSIGTPLDPKYIDIVPLFVAMTKTHVIAASKEAFYTWQYRVAKKLTALEINQITRSRKEGRERIYHVDDTPSGSMDGVLDYSKTIQGTRDPICAITASDKILIVGRESGTIQRYSLPNVGLIQKYSLNCRAYQLSLNCNSSRLAIIDISGVLTFFDLDARVTDSTGQQVVGELLKLERRDVWDMKWAKDNPDLFAMMEKTRMYVFRNLDPEEPIQTSGYICNFEDLEIKSVLLDEILKDPEHPNKDYLINFEIRSLRDSRALIEKVGIKDASQFIEDNPHPRLWRLLAEAALQKLDLYTAEQAFVRCKDYQGIKFVKRLGKLLSESMKQAEVVGYFGRFEEAERTYLEMDRRDLAIGLRLKLGDWFRVLQLLKTGSGDADDSLLEQANNAIGDYFADRQKWLNAVQYYVQGRNQERLAECYYMLEDYEGLENLAISLPENHKLLPVGNSTNVCQSWNV

SEQ ID NO: 13561 - protein, 316 aa, Homo sapiens
MGNRHAKASSPQGFDVDRDAKKLNKACKGMGTNEAAIIEILSGRTSDERQQIKQKYKATYGKELEEVLKSELSGNFEKTALALLDRPSEYAARQLQKAMKGLGTDESVLIEVLCTRTNKEIIAIKEAYQRLFDRSLESDVKGDTSGNLKKILVSLLQANRNEGDDVDKDLAGQDAKDLYDAGEGRWGTDELAFNEVLAKRSYKQLRATFQAYQILIGKDIEEAIEEETSGDLQKAYLTLVRCAQDCEDYFAERLYKSMKGAGTDEETLIRIVVTRAEVDLQGIKAKFQEKYQKSLSDMVRSDTSGDFRKLLVALLH

SEQ ID NO: 13562 - protein, 1016 aa, Homo sapiens
MEVAVEKAVAAAAAASAAASGGPSAAPSGENEAESRQGPDSERGGEAARLNLLDTCAVCHQNIQSRAPKLLPCLHSFCQRCLPAPQRYLMLPAPMLGSAETPPPVPAPGSPVSGSSPFATQVGVIRCPVCSQECAERHIIDNFFVKDTTEVPSSTVEKSNQVCTSCEDNAEANGFCVECVEWLCKTCIRAHQRVKFTKDHTVRQKEEVSPEAVGVTSQRPVFCPFHKKEQLKLYCETCDKLTCRDCQLLEHKEHRYQFIEEAFQNQKVIIDTLITKLMEKTKYIKFTGNQIQNRIIEVNQNQKQVEQDIKVAIFTLMVEINKKGKALLHQLESLAKDHRMKLMQQQQEVAGLSKQLEHVMHFSKWAVSSGSSTALLYSKRLITYRLRHLLRARCDASPVTNNTIQFHCDPSFWAQNIINLGSLVIEDKESQPQMPKQNPVVEQNSQPPSGLSSNQLSKFPTQISLAQLRLQHMQQQQPPPRLINFQNHSPKPNGPVLPPHPQQLRYPPNQNIPRQAIKPNPLQMAFLAQQAIKQWQISSGQGTPSTTNSTSSTPSSPTITSAAGYDGKAFGSPMIDLSSPVGGSYNLPSLPDIDCSSTIMLDNIVRKDTNIDHGQPRPPSNRTVQSPNSSVPSPGLAGPVTMTSVHPPIRSPSASSVGSRGSSGSSSKPAGADSTHKVPVVMLEPIRIKQENSGPPENYDFPVVIVKQESDEESRPQNANYPRSILTSLLLNSSQSSTSEETVLRSDAPDSTGDQPGLHQDNSSNGKSEWLDPSQKSPLHVGETRKEDDPNEDWCAVCQNGGELLCCEKCPKVFHLSCHVPTLTNFPSGEWICTFCRDLSKPEVEYDCDAPSHNSEKKKTEGLVKLTPIDKRKCERLLLFLYCHEMSLAFQDPVPLTVPDYYKIIKNPMDLSTIKKRLQEDYSMYSKPEDFVADFRLIFQNCAEFNEPDSEVANAGIKLENYFEELLKNLYPEKRFPKPEFRNESEDNKFSDDSDDDFVQPRKKRLKSIEERQLLK

SEQ ID NO: 13563 - protein, 208 aa, Homo sapiens
FFLLLFTIGFCWAQYSPNTQQGRTSIVHLFEWRWVDIALECERYLAPKGFGGVQVSPPNENVAIYNPFRPWWERYQPVSYKLCTRSGNEDEFRNMVTRCNNVGVRIYVDAVINHMCGNAVSAGTSSTCGSYFNPGSRDFPAVPYSGWDFNDGKCKTGSGDIENYNDATQVIDLGGEPIKSSDYFGNGRVTEFKYGAKLGTVIRKWNGE

SEQ ID NO: 13564 - protein, 517 aa, Homo sapiens
MLESIRVTEKLHWPEQELAKKSILNAEDSLIIDNKRSISHLSSGVLKDIFTTGTSSYNVLLQSKEEKKYHSQKQSSSTYSKRCRKPSKSPNTSRSKDPRRMKALVPVTSSGTWYCLERRPAVFVTSSVSSPVKFTHDISVTGNGIVLPPKPKSKVKWCHFSTLPKPKPQLSRSFEKGDDFSGKKFCILTAIKPTNLEKEKLRFFKSDYTYNPQFEYANPALPSVLAKHSHASDRFLKQSINIMELTLQKYGSYEKFEQATGGSLLSKTRIWSHVRKYMMKEGCLGEIVVHLTEDLLSRASMTVVNGCPTLTINVSTAREHWLEGMLRHEIGTHYFRGINNLQQPWNSWTGRKKHELKPNNPTEEGLASIHSVLFRKDPFLWRAALLYYTVYQASQMSFCELFKDIGRFVKDPNTRWDYCVRAKRGWTDTSQPGCFSKDQVYLDGILQILRYRDTIDFHLLTALGKVSYEDVDRLKGLAVTENMRVPHFLQDHGRYMEHLEKIMEVNELTDRELKDLI

SEQ ID NO: 13565 - protein, 510 aa, Homo sapiens
ELIDSREIGASRLSRVESLAPEVKQNTTASGCELMHTEMQALRADWKQWEDSVFQTQSCLENLVSQMALSEQEFSGQVAQLEQALEQFSALLKTWAQQLTLLEGKNTDEEIVECWHKGQEILDALQKAEPRTEDLKSQLNELCRFSRDLSTYSGKVSGLIKEYNCLCLQASKGCQNKEQILQQRFRKAFRDFQQWLVNAKITTAKCFDIPQNISEVSTSLQKIQEFLSESENGQHKLNMMLSKGELLSTLLTKEKAKGIQAKVTAAKEDWKNFHSNLHQKESALENLKIQMKDFEVSAEPIQDWLSKTEKMVHESSNRLYDLPAKRREQQKLQSVLEEIHCYEPQLNRLKEKAQQLWEGQAASKSFRHRVSQLSSQYLALSNLTKEKVSRLDRIVAEHNQFSLGIKELQDWMTDAIHMLDSYCHPTSDKSVLDSRTLKLEVCIFTQKYLQPTEFVFLKISRLHPPGVMMSHSLHDKSQMLCECNAVCLGCTCQRIPESSDPGCFPKNKIK

SEQ ID NO: 13566 - protein, 47 aa, Homo sapiens
MAKYGEHEASPDNGQNEFSDIIKSRSDEHNDVQKKTFTKWINARFSK

SEQ ID NO: 13567 - protein, 159 aa, Homo sapiens
MLPKRRRARVGSPSGDAASSTPPSTRFPGVAIYLVEPRMGRSRRAFLTGLARSKGFRVLDACSSEATHVVMEETSAEEAVSWQERRMAAAPPGCTPPALLDISWLTESLGAGQPVPVECRHRLEEALEILAEAAGFEGSEGRLLTFCRAASVLKALPSP

SEQ ID NO: 13568 - protein, 498 aa, Homo sapiens
MAAAALRDPAQQGYVTFEDVAVYFSQEEWRLLDDAQRLLYRNVMLENFTLLASLGLASSKTHEITQLESWEEPFMPAWEVVTSAIPRGCWHGAEAEEAPEQIASVGLLSSNIQQHQKQHCGEKPLKRQEGRVPVLRSCKVHLSEKSLQSREVGKALLISSGVLKHQVTHTGEKSHRSSKSREAFHAGKRHYKCSECGKAFGQKYLLVQHQRLHAGKKTYECSECGKLFRDMSNLFIHQIVHTGERPYGCSNCGKSFSRNAHLIEHQRVHTGEKPFTCSECGKAFRHNSTLVQHHKIHTGVRPYECSECGKLFSFNSSLMKHQRIHTGERPYKCSECGKFYSHKSNLIKHWRVHTGERPYKCSDCGKFFTQCSSLMQHQKVHTGEKPFKCNECGRFFRENSTLVRHQRVHTGAKPYECRECGKFFSQSSTLMQHRKVHIGEKPFKCNECGRLFRENSSLVKHQRVHTGAKPYECRECGKFFRHNSSLFKHRRIHTGEMQ

SEQ ID NO: 13569 - protein, 750 aa, Homo sapiens
METKENRWVPVTVLPGCVGCRTVAALASWTVRDVKERIFAETGFPVSEQRLWRGGRELSDWIKIGDLTSKNCHLFVNLQSKGLKGGGRFGQTTPPLVDFLKDILRRYPEGGQILKELIQNAEDAGATEVKFLYDETQYGTETLWSKDMAPYQGPALYVYNNAVFTPEDWHGIQEIARSRKKDDPLKVGRFGIGFNSVYHITDVPCIFSGDQIGMLDPHQTLFGPHESGQCWNLKDDSKEISELSDQFAPFVGIFGSTKETFINGNFPGTFFRFPLRLQPSQLSSNLYNKQKVLELFESFRADADTVLLFLKSVQDVSLYVREADGTEKLVFRVTSSESKALKHERPNSIKILGTAISNYCKKTPSNNITCVTYHVNIVLEEESTKDAQKTSWLVCNSVGGRGISSKLDSLADELKFVPIIGIAMPLSSRDDEAKGATSDFSGKAFCFLPLPPGEESSTGLPVHISGFFGLTDNRRSIKWRELDQWRDPAALWNEFLVMNVVPKAYATLILDSIKRLEMEKSSDFPLSVDVIYKLWPEASKVKVHWQPVLEPLFSELLQNAVIYSISCDWVRLEQVYFSELDENLEYTKTVLNYLQSSGKQIAKVPGNVDAAVQLTAASGTTPVRKVTPAWVRQVLRKCAHLGCAEEKLHLLEFVLSDQAYSELLGLELLPLQNGNFVPFSSSVSDQDVIYITSAEYPRSLFPSLEGRFILDNLKPHLVAALKEAAQTRGFLFDEDSNGKLKMVAVLITSC

SEQ ID NO: 13570 - protein, 79 aa, Homo sapiens
MSSVAVLTQESFAEHRSGLVPQQIKVATLNSEEESDPPTYKDAFPPLPEKAACLESAQEPAGAWGNKIRPIKASVITQV

SEQ ID NO: 13571 - protein, 124 aa, Homo sapiens
RETACEIPGFNGECLNGPSDVGSTPAPCICPPGKPGLQGPKGYQGIAGTPGVPGSPGIQGARGLPGYKGEPGRDGDKGDRGLPGFPGLHGMPGSKGEMGAKGDKGSPGFYGKKGSIDHTTKYSY

SEQ ID NO: 13572 - protein, 435 aa, Homo sapiens
MRPEGAGMELGGGEERLPEESRREHWQLLGNLKTTVEGLVSTNSPNVWSKYGGLERLCRDMQSILYHGLIRDQACRRQTDYWQFVKDIRWLSPHSALHVEKFISVHENDQSSADGASERAVAELWLQHSLQYHCLSAQLRPLLGDRQYIRKFYTDAAFLLSDAHVTAMLQCLEAVEQNNPRLLAQIDASMFARKHESPLLVTKSQSLTALPSSTYTPPNSYAQHSYFGSFSSLHQSVPNNGSERRSTSFPLSGPPRKPQESRGHVSPAEDQTIQAPPVSVSALARDSPLTPNEMSSSTLTSPIEASWVSSQNDSPGDASEGPEYLAIGNLDPRGRTASCQSHSSNAESSSSNLFSSSSSQKPDSAASSLGDQEGGGESQLSSVLRRSSFSEGQTLTVTSGAKKSHIRSHSDTSIASRGAPGNEEHRLLVSKMTLN

SEQ ID NO: 13573 - protein, 535 aa, Homo sapiens
QSRGKRVWWKEMTPSLSAEENRMYNKMWHQTQEALGALLDKEPQKMIEPQRNQVFIFQTLATFYVKYVQIFRNLENVYDQFVHPQKRILIRKVLDGVMGRILELKNEMVELELTEFHYFDDILQDLKLAPQQLDIPIPKYFLKEKLEVIKGREKILAQILADSGIDTSDMKYPVKSIPFDEAVKLIQIAERARQGRLRALFMKQIYLQEYRAKQSKMLGKKVTDTWAAALRIQKVWRRFHQRKETEKLREEEMIFLGMNPPPLFNEVSATVIQAEKVDRLRNEVQIKHEEDYREALVTIKNDLKLIEGVDIKENLQDQIRHWFIECRNLTGTFPDYPDVEEGGSAIIFSDKTIQQVIEDIIANQEEEEKNKKKKKKKEKQPKKAKKQKKGTKEKNKEEDEKWKMSPSLFLPAMKEGCNAYKEIWMKKDESWNFSQDYDPELIKEEKRKELQSEIRIQVDELMRQELKNLKLAVDRERERPVKAGKKKDKKKGKKGKKKEKKAKKDKDLTADRTIESLYKELVEEGLLIQALKVNL

SEQ ID NO: 13574 - protein, 1109 aa, Homo sapiens
MGTGDFICISMTGGAPWGFRLQGGKEQKQPLQVAKIRNQSKASGSGLCEGDEVVSINGNPCADLTYPEVIKLMESITDSLQMLIKRPSSGISEALISENENKNLEHLTHGGYVESTTLQIRPATKTQCTEFFLAPVKTEVPLAENQRSGPDCAGSLKEETGPSYQRAPQMPDSQRGRVAEELILREKVEAVQPGPVVELQLSLSQERHKGASGPLVALPGAEKSKSPDPDPNLSHDRIVHINSIPTNEKADPFLRSSKIIQISSGRELRVIQESEAGDAGLPRVEVILDCSDRQKTEGCRLQAGKECVDSPVEGGQSEAPPSLVSFAVSSEGTEQGEDPRSEKDHSRPHKHRARHARLRRSESLSEKQVKEAKSKCKSIALLLTDAPNPNSKGVLMFKKRRRRARKYTLVSYGTGELEREADEEEEGDKEDTCEVAFLGASESEVDEELLSDVDDNTQVVNFDWDSGLVDIEKKLNRGDKMEMLPDTTGKGALMFAKRRERMDQITAQKEEDKVGGTPSREQDAAQTDGLRTTTSYQRKEEESVRTQSSVSKSYIEVSHGLGHVPQQNGFSGTSETANIQRMVPMNRTAKPFPGSVNQPATPFSPTRNMTSPIADFPAPPPYSAVTPPPDAFSRGVSSPIAGPAQPPPWPQPAPWSQPAFYDSSERIASRDERISVPAKRTGILQEAKRRSTTKPMFTFKEPKVSPNPELLSLLQNSEGKRGTGAGGDSGPEEDYLSLGAEACNFMQSSSAKQKTPPPVAPKPAVKSSSSQPVTPVSPVWSPGVAPTQPPAFPTSNPSKGTVVSSIKIAQPSYPPARPASTLNVAGPFKGPQAAVASQNYTPKPTVSTPTVNAVQPGAVGPSNELPGMSGRGAQLFAKRQSRMEKYVVDSDTVQAHAARAQSPTPSLPASWKYSSNVRAPPPVAYNPIHSPSYPLAALKSQPSAAQPSKMGKKKGKKPLNALDVMKHQPYQLNASLFTFQPPDAKDGLPQKSSVKVNSALAMKQALPPRPVNAASPTNVQASSVYSVPAYTSPPSFFAEASSPVSASPVPVGIPTSPKQESASSSYFVAPRPKFSAKKSGVTIQVKCKSGIHSQDIIRTYFPAYLSSST

SEQ ID NO: 13575 - protein, 163 aa, Homo sapiens
AKCIDHYTKQCVENADLPEGEKKPIDQRLEGIVNKMFQRCLDDHKYKQAIGIALETRRLDVFEKTILESNDVPGMLAYSLKLCMSLMQNKQFRNKVLRVLVKIYMNLEKPDFINVCQNLRTVGTPIASVPGSTNTGTVPGSEKDSDSMETEEKTSSAFVGKTP

SEQ ID NO: 13576 - protein, 551 aa, Homo sapiens
MSRIEKMSILGVRSFGIEDKDKQIITFFSPLTILVGPNGAGKTTIIECLKYICTGDFPPGTKGNTFVHDPKVAQETDVRAQIRLQFRDVNGELIAVQRSMVCTQKSKKTEFKTLEGVITRTKHGEKVSLSSKCAEIDREMISSLGVSKAVLNNVIFCHQEDSNWPLSEGKALKQKFDEIFSATRYIKALETLRQVRQTQGQKVKEYQMELKYLKQYKEKACEIRDQITSKEAQLTSSKEIVKSYENELDPLKNRLKEIEHNLSKIMKLDNEIKALDSRKKQMEKDNSELEEKMEKVFQGTDEQLNDLYHNHQRTVREKERKLVDCHRELEKLNKESRLLNQEKSELLVEQGRLQLQADRHQEHIRARDSLIQSLATQLELDGFERGPFSERQIKNFHKLVRERQEGEAKTANQLMNDFAEKETLKQKQIDEIRDKKTGLGRIIELKSEILSKKQNELKNVKYELQQLEGSSDRILELDQELIKAERELSKAEKNSNVETLKMEVISLQNEKADLDRTLRKLDQEMEQLNHHTTTRTQMEMLTKDKQGTSFI

SEQ ID NO: 13577 - protein, 972 aa, Homo sapiens
MRGARGAWDFLCVLLLLLRVQTGSSQPSVSPGEPSPPSIHPGKSDLIVRVGDEIRLLCTDPGFVKWTFEILDETNENKQNEWITEKAEATNTGKYTCTNKHGLSNSIYVFVRDPAKLFLVDRSLYGKEDNDTLVRCPLTDPEVTNYSLKGCQGKPLPKDLRFIPDPKAGIMIKSVKRAYHRLCLHCSVDQEGKSVLSEKFILKVRPAFKAVPVVSVSKASYLLREGEEFTVTCTIKDVSSSVYSTWKRENSQTKLQEKYNSWHHGDFNYERQATLTISSARVNDSGVFMCYANNTFGSANVTTTLEVVDKGFINIFPMINTTVFVNDGENVDLIVEYEAFPKPEHQQWIYMNRTFTDKWEDYPKSENESNIRYVSELHLTRLKGTEGGTYTFLVSNSDVNAAIAFNVYVNTKPEILTYDRLVNGMLQCVAAGFPEPTIDWYFCPGTEQRCSASVLPVDVQTLNSSGPPFGKLVVQSSIDSSAFKHNGTVECKAYNDVGKTSAYFNFAFKEQIHPHTLFTPLLIGFVIVAGMMCIIVMILTYKYLQKPMYEVQWKVVEEINGNNYVYIDPTQLPYDHKWEFPRNRLSFGKTLGAGAFGKVVEATAYGLIKSDAAMTVAVKMLKPSAHLTEREALMSELKVLSYLGNHMNIVNLLGACTIGGPTLVITEYCCYGDLLNFLRRKRDSFICSKQEDHAEAALYKNLLHSKESSCSDSTNEYMDMKPGVSYVVPTKADKRRSVRIGSYIERDVTPAIMEDDELALDLEDLLSFSYQVAKGMAFLASKNCIHRDLAARNILLTHGRITKICDFGLARDIKNDSNYVVKGNARLPVKWMAPESIFNCVYTFESDVWSYGIFLWELFSLGSSPYPGMPVDSKFYKMIKEGFRMLSPEHAPAEMYDIMKTCWDADPLKRPTFKQIVQLIEKQISESTNHIYSNLANCSPNRQKPVVDHSVRINSVGSTASSSQPLLVHDDV

SEQ ID NO: 13578 - protein, 286 aa, Homo sapiens
MSPHPTALLGLVLCLAQTIHTQEDLPRPSISAEPGTVIPLGSHVTFVCRGPVGVQTFRLERDSRSTYNDTEDVSQASPSESEARFRIDSVREGNAGLYRCIYYKPPKWSEQSDYLELLVKESSGGPDSPDTEPGSSAGPTQRPSDNSHNEHAPASQGLKAEHLYILIGVSVVFLFCLLLLVLFCLHRQNQIKQGPPRSKDEEQKPQQRPDLAVDVLERTADKATVNGLPEKDRETDTSALAAGSSQEVTYAQLDHWALTQRTARAVSPQSTKPMAESITYAAVARH

SEQ ID NO: 13579 - protein, 679 aa, Homo sapiens
MPVRFKGLSEYQRNFLWKKSYLSESCNSSVGRKYPWAGLRSDQLGITKEPSFISKRRVPYHDPQISKSLEWNGAISESNVVASPEPEAPETPKSQEAEQKDVTQERVHSLEASRVPKRTRSHSADSRAEGASDVENNEGVTNHTPVNENVELEHSTKVLSENVDNGVFHNKSQFVPPFKGNSVIHETEYKRNFKGLSPVKEPKLRNDLRENRNLETVSPERKSNKIDDRLKLEAEMELKDLHQPKRKLTPWKHQRLGKVNSEYRAKFLSPAQYLYKAGAWTHVKGNMPNQGSLNAMWYAEVKELREKAEFYRKRVQGTHFSRDHLNQILSDSNCCWDVSSTTSSEGTVSSNIRALDLAGDPTSHKTLQKCPSTEPEEKGNIVEEQPQKNTTEKLGVSAPTIPVRRRLAWDTENTSEDVQKQPGEKEEEDDNEEEGDRKTGKQAFMGEQEKLDVREKSKADKMKEGSDSSVSSEKGGRLPTPKLRELGGIQRTHHDLTTPAVGGAVLVSPSKMKPPAPEQRKRMTSQDCLETSKNDFTKKESRAVSLLTSPAAGIKTVDPLPLREDSEDNIHKFAEATLPVSKIPKYPTNPPGQLPSPPHVPSYWHPSRRIQGSLRDPEFQHNVGKARMNNLQLPQHEAFNDEDEDRLSEISARSAASSLRAFQTLARAKKRKENFWGKT

SEQ ID NO: 13580 - protein, 640 aa, Homo sapiens
HGHLLIFGFGCSKPYEKIPDQMFFHTDYRPLIRDSNNYVLDEQTQQAPHLMPPPFLVDVDGNPHPTKYQRLVPGRENSADEHLIPQLGYVATSDGEVIEQIISLQTNDNDERSPESSILDGMIRQLQQQQDQRMGADQDTIPRGLSNGEETPRRGFRRLSLDIQSPPNIGLRRSGQVEGVRQMHQNAPRSQIATERDLQAWKRRVVVPEVPLGIFRKLEDFRLEKGEEERNLYIIGRKRKTLQLSHKSDSVVLVSQSRQRTCRRKYPNYGRRNRSWRELSSGNESSSSVRHETSCDQSEGSGSSEEDEWRSDRKSESYSESSSDSSSRYSDWTADAGINLQPPLRTSCRRRITRFCSSSEDEISTENLSPPKRRRKRKKENKPKKENLRRMTPAELANMEHLYEFHPPVWITDTTLRKSPFVPQMGDEVIYFRQGHEAYIEAVRRNNIYELNPNKEPWRKMDLRDQELVKIVGIRYEVGPPTLCCLKLAFIDPATGKLMDKSFSIRYHDMPDVIDFLVLRQFYDEARQRNWQSCDRFRSIIDDAWWFGTVLSQEPYQPQYPDSHFQCYIVRWDNTEIEKLSPWDMEPIPDNVDPPEELGASISVTTDELEKLLYKPQAGEWGQKSRDEECDRIISGGCLR

SEQ ID NO: 13581 - protein, 929 aa, Homo sapiens
MEPRDGSPEARSSDSESASASSSGSERDAGPEPDKAPRRLNKRRFPGLRLFGHRKAITKSGLQHLAPPPPTPGAPCSESERQIRSTVDWSESATYGEHIWFETNVSGDFCYVGEQYCVARMLQKSVSRRKCAACKIVVHTPCIEQLEKINFRCKPSFRESGSRNVREPTFVRHHWVHRRRQDGKCRHCGKGFQQKFTFHSKEIVAISCSWCKQAYHSKVSCFMLQQIEEPCSLGVHAAVVIPPTWILRARRPQNTLKASKKKKRASFKRKSSKKGPEEGRWRPFIIRPTPSPLMKPLLVFVNPKSGGNQGAKIIQSFLWYLNPRQVFDLSQGGPKEALEMYRKVHNLRILACGGDGTVGWILSTLDQLRLKPPPPVAILPLGTGNDLARTLNWGGGYTDEPVSKILSHVEEGNVVQLDRWDLHAEPNPEAGPEDRDEGATDRLPLDVFNNYFSLGFDAHVTLEFHESREANPEKFNSRFRNKMFYAGTAFSDFLMGSSKDLAKHIRVVCDGMDLTPKIQDLKPQCVVFLNIPRYCAGTMPWGHPGEHHDFEPQRHDDGYLEVIGFTMTSLAALQVGGHGERLTQCREVVLTTSKAIPVQVDGEPCKLAASRIRIALRNQATMVQKAKRRSAAPLHSDQQPVPEQLRIQVSRVSMHDYEALHYDKEQLKEASVPLGTVVVPGDSDLELCRAHIERLQQEPDGAGAKSPTCQKLSPKWCFLDATTASRFYRIDRAQEHLNYVTEIAQDEIYILDPELLGASARPDLPTPTSPLPTSPCSPTPRSLQGDAAPPQGEELIEAAKRNDFCKLQELHRAGGDLMHRDEQSRTLLHHAVSTGSKDVVRYLLDHAPPEILDAVEENGETCLHQAAALGQRTICHYIVEAGASLMKTDQQGDTPRQRAEKAQDTELAAYLENRQHYQMIQREDQETAV

SEQ ID NO: 13582 - protein, 831 aa, Homo sapiens
VQGVQLLRAQVAAILARRLRRTLRAGKSTLADLLLPVLFVALAMGLFMVRPLATEYPPLRLTPGHYQRAETYFFRKNSSCWRTDPFSHPEFQDSCGCLKCPNRSASAPYLTNHLGHTLLNLSGFNMEEYLLAPSEKPRLGGWSFGLKIPSEAGGANGNISKPPTLAKVWYNQKGFHSLPSYLNHLNNLILWQHLPPTVDWRQYGITLYSHPYGGALLNEDKILESIRQCGVALCIVLGFSILSASIGSSVVRDRVIGAKRLQHISGLGYRMYWFTNFLYDMLFYLVSVCLCVAVIVAFQLTAFTFRKNLAATALLLSLFGYATLPWMYLMSRIFSSSDVAFISYVSLNFIFGLCTMLITIMPRLLAIISKAKNLQNIYDVLKWVFTIFPQFCLGQGLVELCYNQIKYDLTHNFGIDSYVSPFEMNFLGWIFVQLASQGTVLLLLRVLLHWDLLRWPRGHSTLQGTVKSSKDTDVEKEEKRVFEGRTNGDILVLYNLSKHYRRFFQNIIAVQDISLGIPKGECFGLLGVNGAGKSTTFKMLNGEVSLTSGHAIIRTPMGDAVDLSSAGTAGVLIGYCPQQDALDELLTGWEHLYYYCSLRGIPRQCIPEVAGDLIRRLHLEAHADKPVATYSGGTKRKLSTALALVGKPDILLLDEPSSGMDPCSKRYLWQTIMKEVREGCAAVLTSHSMEECEALCTRLAIMVNGSFKCLGSPQHIKNRFGDGYTVKVWLCKEANQHCTVSDHLKLYFPGIQFKGQHLNLLEYHVPKRWGCLADLFKVIENNKTFLNIKHYSINQTTLEQVFINFASEQQQTLQSTLDPSTDSHHTHHLPI

SEQ ID NO: 13583 - protein, 419 aa, Homo sapiens
MVSESHHEALAAPPVTTVATVLPSNATEPASPGEGKEDAFSKLKEKFMNELHKIPLPPWALIAIAIVAVLLVLTCCFCICKKCLFKKKNKKKGKEKGGKNAINMKDVKDLGKTMKDQDDDAETGLTDGEEKEEPKEEEKLGKLQYSLDYDFQNNQLLVGIIQAAELPALDMGGTSDPYVKVFLLPDKKKKFETKVHRKTLNPVFNEQFTFKVPYSELGGKTLVMAVYDFDRFSKHDIIGEFKVPMNTVDFGHVTEEWRDLQSAEKEEQEKLGDICFSLRYVPTAGKLTVVILEAKNLKKMDVGGLSDPYVKIHLMQNGKRLKKKKTTIKKNTLNPYYNESFSFEVPFEQIQKVQVVVTVLDYDKIGKNDAIGKVFVGYNSTGAELRHWSDMLANPRRPIAQWHTLQVEEEVDAMLAVKK

SEQ ID NO: 13584 - protein, 660 aa, Homo sapiens
MSSGIWQRGKEEEGVYGFLIEDIRKEVNRASKLKCCVCKKNGASIGCVAPRCKRSYHFPCGLQRECIFQFTGNFASFCWDHRPVQIITSNNYRESLPCTICLEFIEPIPSYNILRSPCCKNAWFHRDCLQVQAINAGVFFFRCTICNNSDIFQKEMLRMGIHIPEKDASWELEENAYQELLQHYERCDVRRCRCKEGRDYNAPDSKWEIKRCQCCGSSGTHLACSSLRSWEQNWECLECRGIIYNSGEFQKAKKHVLPNSNNVGITDCLLEESSPKLPRQSPGSQSKDLLRQGSKFRRNVSTLLIELGFQIKKKTKRLYINKANIWNSALDAFRNRNFNPSYAIEVAYVIENDNFGSEHPGSKQEFLSLLMQHLENSSLFEGSLSKNLSLNSQALKENLYYEAGKMLAISLVHGGPSPGFFSKTLFNCLVYGPENTQPILDDVSDFDVAQIIIRINTATTVADLKSIINECYNYLELIGCLRLITTLSDKYMLVKDILGYHVIQRVHTPFESFKQGLKTLGVLEKIQAYPEAFCSILCHKPESLSAKILSELFTVHTLPDVKALGFWNSYLQAVEDGKSTTTMEDILIFATGCSSIPPAGFKPTPSIECLHVDFPVGNKCNNCLAIPITNTYKEFQENMDFTIRNTLRLEKEESSHYIGH

SEQ ID NO: 13585 - protein, 639 aa, Homo sapiens
MGIFVSFLRSETQHRGSAPHSESDLPEQEEEILGSDDDEQEDPNDYCKGGYHLVKIGDLFNGRYHVIRKLGWGHFSTVWLSWDIQGKKFVAMKVVKSAEHYTETALDEIRLLKSVRNSDPNDPNREMVVQLLDDFKISGVNGTHICMVFEVLGHHLLKWIIKSNYQGLPLPCVKKIIQQVLQGLDYLHTKCRIIHTDIKPENILLSVNEQYIRRLAAEATEWQRSGAPPPSGSAVSTAPQPKPADKMSKNKKKKLKKKQKRQAELLEKRMQEIEEMEKESGPGQKRPNKQEESESPVERPLKENPPNKMTQEKLEESSTIGQDQTLMERDTEGGAAEINCNGVIEVINYTQNSNNETLRHKEDLHNANDCDVQNLNQESSFLSSQNGDSSTSQETDSCTPITSEVSDTMVCQSSSTVGQSFSEQHISQLQESIRAEIPCEDEQEQEHNGPLDNKGKSTAGNFLVNPLEPKNAEKLKVKIADLGNACWVHKHFTEDIQTRQYRSLEVLIGSGYNTPADIWSTACMAFELATGDYLFEPHSGEEYTRDEDHIALIIELLGKVPRKLIVAGKYSKEFFTKKGDLKHITKLKPWGLFEVLVEKYEWSQEEAAGFTDFLLPMLELIPEKRATAAECLRHPWLNS

SEQ ID NO: 13586 - protein, 738 aa, Homo sapiens
MLVRVVLSLTPSFPEPSALYTACKMVRWLSAKLGPTVASRHVARNLLRLLTSCYVGPTRQQFTVSSGESPPLSAGNIYQKRPVLGDIVSGPVLSCLLHIARLYGEPVLTYQYLPYISYLVAPGSASGPSRLNSRKEAGLLAAVTLTQKIIVYLSDTTLMDILPRISHEVLLPVLSFLTSLVTGFPSGAQARTILCVKTISLIALICLRIGQEMVQQHLSEPVATFFQVFSQLHELRQQDLKLDPAGRGEGQLPQVVFSDGQQRPVDPALLDELQKVFTLEMAYTIYVPFSCLLGDIIRKIIPNHELVGELAALYLESISPSSRNPASVEPTMPGTGPEWDPHGGGCPQDDGHSGTFGSVLVGNRIQIPNDSRPENPGPLGPISGVGGGGLGSGSDDNALKQELPRSVHGLSGNWLAYWQYEIGVSQQDAHFHFHQIRLQSFPGHSGAVKCVAPLSSEDFFLSGSKDRTVRLWPLYNYGDGTSETAPRLVYTQHRKSVFFVGQLEAPQHVVSCDGAVHVWDPFTGKTLRTVEPLDSRVPLTAVAVMPAPHTSITMASSDSTLRFVDCRKPGLQHEFRLGGGLNPGLVRALAISPSGRSVVAGFSSGFMVLLDTRTGLVLRGWPAHEGDILQIKAVEGSVLVSSSSDHSLTVWKELEQKPTHHYKSASDPIHTFDLYGSEVVTGTVSNKIGVCSLLEPPSQATTKLSSENFRGTLTSLALLPTKRHLLLGSDNGVIRLLA

SEQ ID NO: 13587 - protein, 157 aa, Homo sapiens
MSKKISGGSVVEMQGDEMTRIIWELIKEKLIFPYVELDLHSYDLGIENRDATNDQVTKDAAEAIKKHNVGVKCATITPDEKRVEEFKLKQMWKSPNGTIRNILGGTVFREAIICKNIPRLVSGWVKPIIIGRHAYGDQYRATDFVVPGPGKVEITYT

SEQ ID NO: 13588 - protein, 414 aa, Homo sapiens
MLAKGLPPRSVLVKGCQTFLSAPREGLGRLRVPTGEGAGISTRSPRPFNEIPSPGDNGWLNLYHFWRETGTHKVHLHHVQNFQKYGPIYREKLGNVESVYVIDPEDVALLFKSEGPNPERFLIPPWVAYHQYYQRPIGVLLKKSAAWKKDRVALNQEVMAPEATKNFLPLLDAVSRDFVSVLHRRIKKAGSGNYSGDISDDLFRFAFESITNVIFGERQGMLEEVVNPEAQRFIDAIYQMFHTSVPMLNLPPDLFRLFRTKTWKDHVAAWDVIFSKADIYTQNFYWELRQKGSVHHDYRGILYRLLGDSKMSFEDIKANVTEMLAGGVDTTSMTLQWHLYEMARNLKVQDMLRAEVLAARHQAQGDMATMLQLVPLLKASIKETLRHWCKWPSMLWAESPPSSSTRKILTQPDG

SEQ ID NO: 13589 - protein, 3258 aa, Homo sapiens
MVKRKSSEGQEQDGGRGIPLPIQTFLWRQTSAFLRPKLGKQYEASCVSFERVLVENKLHGLSPALSEAIQSISRWELVQAALPHVLHCTATLLSNRNKLGHQDKLGVAETKLLHTLHWMLLEAPQDCNNERFGGTDRGSSWGGSSSAFIHQVENQGSPGQPCQSSSNDEEENNRRKIFQNSMATVELFVFLFAPLVHRIKESDLTFRLASGLVIWQPMWEHRQPGVSGFTALVKPIRNIITAKRSSPINSQSRTCESPNQDARHLEGLQVVCETFQSDSISPKATISGCHRGNSFDGSLSSQTSQERGPSHSRASLVIPPCQRSRYATYFDVAVLRCLLQPHWSEEGTQWSLMYYLQRLRHMLEEKPEKPPEPDIPLLPRPRSSSMVAAAPSLVNTHKTQDLTMKCNEEEKSLSSEAFSKVSLTNLRRSAVPDLSSDLGMNIFKKFKSRKEDRERKGSIPFHHTGKRRPRRMGVPFLLHEDHLDVSPTRSTFSFGSFSGLGEDRRGIEKGGWQTTILGKLTRRGSSDAATEMESLSARHSHSHHTLVSDLPDPSNSHGENTVKEVRSQISTITVATFNTTLASFNVGYADFFNEHMRKLCNQVPIPEMPHEPLACANLPRSLTDSCINYSYLEDTEHIDGTNNFVHKNGMLDLSVVLKAVYLVLNHDISSRICDVALNIVECLLQLGVVPCVEKNRKKSENKENETLEKRPSEGAFQFKGVSGSSTCGFGGPAVSGAGDGGGEEGGGGDGGGGGGDGGGGGGGGGGPYEKNDKNQEKDESTPVSNHRLALTMLIKIVKSLGCAYGCGEGHRGLSGDRLRHQVFRENAQNCLTKLYKLDKMQFRQTMRDYVNKDSLNNVVDFLHALLGFCMEPVTDNKAGFGNNFTTVDNKSTAQNVEGIIVSAMFKSLITRCASTTHELHSPENLGLYCDIRQLVQFIKEAHGNVFRRVALSALLDSAEKLAPGKKVEENEQESKPAGSKRSEAGSIVDKGQVSSAPEECRSFMSGRPSQTPEHDEQMQGANLGRKDFWRKMFKSQSAASDTSSQSEQDTSECTTAHSGTTSDRRARSRSRRISLRKKLKLPIGKRNWLKRSSLSGLADGVEDLLDISSVDRLSFIRQSSKVKFTSAVKLSEGGPGSGMENGRDEEENFFKRLGCHSFDDHLSPNQDGGKSKNVVNLGAIRQGMKRFQFLLNCCEPGTIPDASILAAALDLEAPVVARAALFLECARFVHRCNRGNWPEWMKGHHVNITKKGLSRGRSPIVGNKRNQKLQWNAAKLFYQWGDAIGVRLNELCHGESESPANLLGLIYDEETKRRLRKEDEEEDFLDDSTVNPSKCGCPFALKMAACQLLLEITTFLRETFSCLPRPRTEPLVDLESCRLRLDPELDRHRYERKISFAGVLDENEDSKDSLHSSSHTLKSDAGVEEKKEGSPWSASEPSIEPEGMSNAGAEENYHRNMSWLHVMILLCNQQSFICTHVDYCHPHCYLHHSRSCARLVRAIKLLYGDSVDSLRESSNISSVALRGKKQKECSDKSCLRTPSLKKRVSDANLEGKKDSGMLKYIRLQVMSLSPAPLSLLIKAAPILTEEMYGDIQPAAWELLLSMDEHMAGAAAAMFLLCAVKVPEAVSDMLMSEFHHPETVQRLNAVLKFHTLWRFRYQVWPRMEEGAQQIFKIPPPSINFTLPSPVLGMPSVPMFDPPWVPQCSGSVQDPINEDQSKSFSARAVSRSHQRAEHILKNLQQEEEKKRLGREASLITAIPITQEACYEPTCTPNSEPEEEVEEVTNLASRRLSVSPSCTSSTSHRNYSFRRGSVWSVRSAVSAEDEEHTTEHTPNHHVPQPPQAVFPACICAAVLPIVHLMEDGEVREDGVAVSAVAQQVLWNCLIEDPSTVLRHFLEKLTISNRQDELMYMLRKLLLNIGDFPAQTSHILFNYLVGLIMYFVRTPCEWGMDAISATLTFLWEVVGYVEGLFFKDLKQTMKKEQCEVKLLVTASMPGTKTLVVHGQNECDIPTQLPVHEDTQFEALLKECLEFFNIPESQSTHYFLMDKRWNLIHYNKTYVRDIYPFRRSVSPQLNLVHMHPEKGQELIQKQVFTRKLEEVGRVLFLISLTQKIPTAHKQSHVSMLQEDLLRLPSFPRSAIDAEFSLFSDPQAGKELFGLDTLQKSLWIQLLEEMFLGMPSEFPWGDEIMLFLNVFNGALILHPEDSALLRQYAATVINTAVHFNHLFSLSGYQWILPTMLQVYSDYESNPQLRQAIEFACHQFYILHRKPFVLQLFASVAPLLEFPDAANNGPSKGVSAQCLFDLLQSLEGETTDILDILELVKAEKPLKSLDFCYGNEDLTFSISEAIKLCVTVVAYAPESFRSLQMLMVLEALVPCYLQKLKRQTSQVETVPAAREEIAATAALATSLQALLYSVEVLTRPMTAPQMSRCDQGHKGTTTANHTMSSGVNTRYQEQGAKLHFIRENLHLLEEGQGIPREELDERIAREEFRRPRESLLNICTEFYKHCGPRLKILQNLAGEPRVIALELLDVKSHMRLAEIAHSLLKLAPYDTQTMESRGLRRYIMEMLPITDWTAEAVRPALILILKRLDRMFNKIHKMPTLRRQVEWEPASNLIEGVCLTLQRQPIISFLPHLRSLINVCVNLVMGVVGPSSVADGLPLLHLSPYLSPPLPFSTAVVRLVALQIQALKEDFPLSHVISPFTNQERREGMLLNLLIPFVLTVGSGSKDSPWLEQPEVQLLLQTVINVLLPPRIISTSRSKNFMLESSPAHCSTPGDAGKDLRREGLAESTSQAAYLALKVILVCFERQLGSQWYWLSLQVKEMALRKVGGLALWDFLDFIVRTRIPIFVLLRPFIQCKLLAQPAENHEELSARQHIADQLERRFIPRPLCKSSLIAEFNSELKILKEAVHSGSAYQGKTSISTVGTSTSAYRLSLATMSRSNTGTGTVWEQDSEPSQQASQDTLSRTDEEDEENDSISMPSVVSEQEAYLLSAIGRRRFSSHVSSMSVPQAEVGMLPSQSEPNVLDDSQGLAAEGSLSRVASIQSEPGQQNLLVQQPLGRKRGLRQLRRPLLSRQKTQTEPRNRQGARLSTTRRSIQPKTKPSADQKRSVTFIEAQPEPAAAPTDALPATGQLQGCSPAPSRKPEAMDEPVLTSSPAIVVADLHSVSPKQSENFPTEEGEKEEDTEAQGATAHSPLSAQLSDPDDFTGLETSSLLQHGDTVLHISEENGMENPLLSSQFTFTPTELGKTDAVLDESHV

SEQ ID NO: 13590 - protein, 1067 aa, Homo sapiens
MMPNEARLRNLTYSAPLYVDITKTVIKEGEEQLQTQHQKTFIGKIPIMLRSTYCLLNGLTDRDLCELNECPLDPGGYFIINGSEKVLIAQEKMATNTVYVFAKKDSKYAYTGECRSCLENSSRPTSTIWVSMLARGGQGAKKSAIGQRIVATLPYIKQEVPIIIVFRALGFVSDRDILEHIIYDFEDPEMMEMVKPSLDEAFVIQEQNVALNFIGSRGAKPGVTKEKRIKYAKEVLQKEMLPHVGVSDFCETKKAYFLGYMVHRLLLAALGRRELDDRDHYGNKRLDLAGPLLAFLFRGMFKNLLKEVRIYAQKFIDRGKDFNLELAIKTRIISDGLKYSLATGNWGDQKKAHQARAGVSQVLNRLTFASTLSHLRRLNSPIGRDGKLAKPRQLHNTLWGMVCPAETPEGHAVGLVKNLALMAYISVGSQPSPILEFLEEWSMENLEEISPAAIADATKIFVNGCWVGIHKDPEQLMNTLRKLRRQMDIIVSEVSMIRDIREREIRIYTDAGRICRPLLIVEKQKLLLKKRHIDQLKEREYNNYSWQDLVASGVVEYIDTLEEETVMLAMTPDDLQEKEVAYCSTYTHCEIHPSMILGVCASIIPFPDHNQSPRNTYQSAMGKQAMGVYITNFHVRMDTLAHVLYYPQKPLVTTRSMEYLRFRELPAGINSIVAIASYTGYNQEDSVIMNRSAVDRGFFRSVFYRSYKEQESKKGFDQEEVFEKPTRETCQGMRHAIYDKLDDDGLIAPGVRVSGDDVIIGKTVTLPENEDELESTNRRYTKRDCSTFLRTSETGIVDQVMVTLNQEGYKFCKIRVRSVRIPQIGDKFASRHGQKGTCGIQYRQEDMPFTCEGITPDIIINPHAIPSRMTIGHLIECLQGKVSANKGEIGDATPFNDAVNVQKISNLLSDYGYHLRGNEVLYNGFTGRKITSQIFIGPTYYQRLKHMVDDKIHSRARGPIQILNRQPMEGRSRDGGLRFGEMERDCQIAHGAAQFLRERLFEASDPYQVHVCNLCGIMAIANTRTHTYECRGCRNKTQISLVRMPYACKLLFQELMSMSIAPRMMSV

SEQ ID NO: 13591 - protein, 912 aa, Homo sapiens
MESLKTDTEMPYPEVIVDVGRVIFGEENRKKMTNSCLKRSENSRIIRAICALLNSGGGVIKAEIDDKTYSYQCHGLGQDLETSFQKLLPSGSQKYLDYMQQGHNLLIFVKSWSPDVFSLPLRICSLRSNLYRRDVTSAINLSASSALELLREKGFRAQRGRPRVKKLHPQQVLNRCIQEEEDMRILASEFFKKDKLMYKEKLNFTESTHVEFKRFTTKKVIPRIKEMLPHYVSAFANTQGGYVLIGVDDKSKEVVGCKWEKVNPDLLKKEIENCIEKLPTFHFCCEKPKVNFTTKILNVYQKDVLDGYVCVIQVEPFCCVVFAEAPDSWIMKDNSVTRLTAEQWVVMMLDTQSAPPSLVTDYNSCLISSASSARKSPGYPIKVHKFKEALQRHLFPVTQEEVQFKPESLCKKLFSDHKELEGLMKTLIHPCSQGIVIFSRSWAGDVGFRKEQNVLCDALLIAVNSPVVLYTILIDPNWPGGLEYARNTAHQLKQKLQTVGGYTGKVCIIPRLIHLSSTQSRPGEIPLRYPRSYRLADEEEMEDLLQALVVVSLSSRSLLSDQMGCEFFNLLIMEQSQLLSESLQKTRELFIYCFPGVRKTALAIKIMEKIKDLFHCKPKEILYVCESDSLKDFVTQQTTCQAVTRKTFMQGEFLKIKHIVMDETENFCSKYGNWYMKAKNITHPKAKGTGSENLHHGILWLFLDPFQIHHADVNGLPPPSAQFPRKTITSGIHCALEIAKVMKEEMKRIKENPPSNMSPDTLALFSETAYEEATCAQALPGVCETKTNLTTEQIANYVARKCHSLFQCGYLPKDIAILCRRGEDRGRYRLALLKAMELIETHRPSEVVFSPATGVWGSHIVLDSIQQFSGLERTVVFGLSPECDQSEEFHKLCFASRAIKHLYLLYEKRAAY

SEQ ID NO: 13592 - protein, 89 aa, Homo sapiens
VHSVLYSSPAILLKEIILVDDASVDEYLHDKLDEYVKQFSIVKIVRQRERKGLITARLLGATVATAETLTFLDAHSFSTGDYSNDSPSR

SEQ ID NO: 13593 - protein, 1150 aa, Homo sapiens
MAKSGGCGAGAGVGGGNGALTWVNNAAKKEESETANKNDSSKKLSVERVYQKKTQLEHILLRPDTYIGSVEPLTQFMWVYDEDVGMNCREVTFVPGLYKIFDEILVNAADNKQRDKNMTCIKVSIDPESNIISIWNNGKGIPVVEHKVEKVYVPALIFGQLLTSSNYDDDEKKVTGGRNGYGAKLCNIFSTKFTVETACKEYKHSFKQTWMNNMMKTSEAKIKHFDGEDYTCITFQPDLSKFKMEKLDKDIVALMTRRAYDLAGSCRGVKVMFNGKKLPVNGFRSYVDLYVKDKLDETGVALKVIHELANERWDVCLTLSEKGFQQISFVNSIATTKGGRHVDYVVDQVVGKLIEVVKKKNKAGVSVKPFQVKNHIWVFINCLIENPTFDSQTKENMTLQPKSFGSKCQLSEKFFKAASNCGIVESILNWVKFKAQTQLNKKCSSVKYSKIKGIPKLDDANDAGGKHSLECTLILTEGDSAKSLAVSGLGVIGRDRYGVFPLRGKILNVREASHKQIMENAEINNIIKIVGLQYKKSYDDAESLKTLRYGKIMIMTDQDQDGSHIKGLLINFIHHNWPSLLKHGFLEEFITPIVKASKNKQELSFYSIPEFDEWKKHIENQKAWKIKYYKGLGTSTAKEAKEYFADMERHRILFRYAGPEDDAAITLAFSKKKIDDRKEWLTNFMEDRRQRRLHGLPEQFLYGTATKHLTYNDFINKELILFSNSDNERSIPSLVDGFKPGQRKVLFTCFKRNDKREVKVAQLAGSVAEMSAYHHGEQALMMTIVNLAQNFVGSNNINLLQPIGQFGTRLHGGKDAASPRYIFTMLSTLARLLFPAVDDNLLKFLYDDNQRVEPEWYIPIIPMVLINGAEGIGTGWACKLPNYDAREIVNNVRRMLDGLDPHPMLPNYKNFKGTIQELGQNQYAVSGEIFVVDRNTVEITELPVRTWTQVYKEQVLEPMLNGTDKTPALISDYKEYHTDTTVKFVVKMTEEKLAQAEAAGLHKVFKLQTTLTCNSMVLFDHMGCLKKYETVQDILKEFFDLRLSYYGLRKEWLVGMLGAESTKLNNQARFILEKIQGKITIENRSKKDLIQMLVQRGYESDPVKAWKEAQEKAAEEDETQNQHDDSSSDSGTPSGPDFNYILNMSLWSLT

SEQ ID NO: 13594 - protein, 197 aa, Homo sapiens
LMIAKITSDEPLTKDDIPVFLRHAELIASTFVDQCKTVLKLASEEPPDDEEALATIRLLDVLCEMTVNTELLGYLQVFPGLLERVIDLLRVIHVAGKETTNIFSNCGCVRAEGDISNVANGFKSHLIRLIGNLCYKNKDNQDKVNELDGIPLILDNCNISDSNPYVCTHHPDGNTEHAHLPRRLLECPVSLTANPQM

SEQ ID NO: 13595 - protein, 259 aa, Homo sapiens
MGFWILAILTILMYSTAAKFSKQSWGLENEALIVRCPRQGKPSYTVDWYYSQTNKSIPTQERNRVFASGQLLKFLPAAVADSGIYTCIVRSPTFNRTGYANVTIYKKQSDCNVPDYLMYSTVSGSEKNSKIYCPTIDLYNWTAPLEWFKNCQALQGSRYRAHKSFLVIDNVMTEDAGDYTCKFIHNENGANYSVTATRSFTVKVWCQSFCKLKKSLIFSNTHWIQSLMRGFVMVYYGVHKCCRVVFNLCLQYFQHHQWP

SEQ ID NO: 13596 - protein, 341 aa, Homo sapiens
MEEPQSDPSVEPPLSQETFSDLWKLLPENNVLSPLPSQAMDDLMLSPDDIEQWFTEDPGPDEAPRMPEAAPPVAPAPAAPTPAAPAPAPSWPLSSSVPSQKTYQGSYGFRLGFLHSGTAKSVTCTYSPALNKMFCQLAKTCPVQLWVDSTPPPGTRVRAMAIYKQSQHMTEVVRRCPHHERCSDSDGLAPPQHLIRVEGNLRVEYLDDRNTFRHSVVVPYEPPEVGSDCTTIHYNYMCNSSCMGGMNRRPILTIITLEDSSGNLLGRNSFEVRVCACPGRDRRTEEENLRKKGEPHHELPPGSTKRALPNNTSSSPQPKKKPLDGEYFTLQDQTSFQKENC

SEQ ID NO: 13597 - protein, 692 aa, Homo sapiens
MAGLTAAAPRPGVLLLLLSILHPSRPGGVPGAIPGGVPGGVFYPGAGLGALGGGALGPGGKPLKPVPGGLAGAGLGAGLGAFPAVTFPGALVPGGVADAAAAYKAAKAGAGLGGVPGVGGLGVSAAPSVPGAVVPQPGAGVKPGKVPGVGLPGVYPGGVLPGARFPGVGVLPGVPTGAGVKPKAPGVGGAFAGIPGVGPFGGPQPGVPLGYPIKAPKLPGGYGLPYTTGKLPYGYGPGGVAGAAGKAGYPTGTGVGPQAAAAAAAKAAAKFGAGAAGVLPGVGGAGVPGVPGAIPGIGGIAGVGTPAAAAAAAAAAKAAKYGAAAGLVPGGPGFGPGVVGVPGAGVPGVGVPGAGIPVVPGAGIPGAAVPGVVSPEAAAKAAAKAAKYGARPGVGVGGIPTYGVGAGGFPGFGVGVGGIPGVAGVPGVGGVPGVGGVPGVGISPEAQAAAAAKAAKYGLVPGVGVAPGVGVAPGVGVAPGVGLAPGVGVAPGVGVAPGVGVAPGIGPGGVAAAAKSAAKVAAKAQLRAAAGLGAGIPGLGVGVGVPGLGVGAGVPGLGVGAGVPGFGAVPGALAAAKAAKYGAAVPGVLGGLGALGGVGIPGGVVGAGPAAAAAAAKAAAKAAQFGLVGAAGLGGLGVGGLGVPGVGGLGGIPPAAAAKAAKYGVAARPGFGLSPIFPGGACLGKACGRKRK

SEQ ID NO: 13598 - protein, 467 aa, Homo sapiens
MLMSWSPEECKGQGEPLDDRHPLCARLVEKPSRGSEEHLKSGPGPIVTRTASGPALAFWQAVLAGDVGCVSRILADSSTGLAPDSVFDTSDPERWRDFRFNIRALRLWSLTYEEELTTPLHVAASRGHTEVLRLLLRRRARPDSAPGGRTALHEACAAGHTACVHVLLVAGADPNIADQDGKRPLHLCRGPGTLECAELLLRFGARVDGRSEEEEETPLHVAARLGHVELADLLLRRGACPDARNAEGWTPLLAACDVRCQSITDAEATTARCLQLCSLLLSAGADADAADQDKQRPLHLACRRGHAAVVELLLSCGVSANTMDYGGHTPLHCALQGPAAALAQSPEHVVRALLNHGAVRVWPGALPKVLERWSTCPRTIEVLMNTYSVVQLPEEAVGLVTPETLQKHQRFYSSLFALVRQPRSLQHLSRCALRSHLEGSLPQALPRLPLPPRLLRYLQLDFEGVLY

SEQ ID NO: 13599 - protein, 697 aa, Homo sapiens
MGKNLKEAVKMLEDSQRRTEEENGKKLISGDIPGPLQGRYENGCAYFHEEEREGLAKICRLAIHSRYEDFVVDGFNVLYNKKPVIYLSAAARPGLGQYLCNQLGLPFPCLCRVPCNTVFGSQHQMDVAFLEKLIKDDIERGRLPLLLVANAGTAAVGHTDKIGRLKELCEQYGIWLHVEGVNLATLALGYVSSSVLAAAKCDSMTMTPGPWLGLPAVPAVTLYKHDDPALTLVAGLTSNKPTDKLRALPLWLSLQYLGLDGFVERIKHACQLSQRLQESLKKVNYIKILVEDELSSPVVVFRFFQELPGSDPVFKAVPVPNMTPSGVGRERHSCDALNRWLGEQLKQLVPASGLTVMDLEAEGTCLRFSPLMTAAVLGTRGEDVDQLVACIESKLPVLCCTLQLREEFKQEVEATAGLLYVDDPNWSGIGVVRYEHANDDKSSLKSDPEGENIHAGLLKKLNELESDLTFKIGPEYKSMKSCLYVGMASDNVDAAELVETIAATAREIEENSRLLENMTEVVRKGIQEAQVELQKASEERLLEEGVLRQIPVVGSVLNWFSPVQALQKGRTFNLTAGSLESTEPIYVYKAQGAGVTLPPTPSGSRTKQRLPGQKPFKRSLRGSDALSETSSVSHIEDLEKVERLSSGPEQITLEASSTEGHPGAPSPQHTDQTEAFQKGVPHPEDDHSQVEGPESLR

SEQ ID NO: 13600 - protein, 720 aa, Homo sapiens
EKENKRLQERCGLYKSELEILKEKLRQLKEENNNGKEKLRIMAVKNSEVMAQLTESRQSILKLESELENKDEILRDKFSLMNENRELKVRVAAQNERLDLCQQEIESSRVELRSLEKIISQLPLKRELFGFKSYLSKYQMSSFSNKEDRCIGCCEANKLVISELRIKLAIKEAEIQKLHANLTANQLSQSLITCNDSQESSKLSSLETEPVKLGGHQVESVKDQNQHTMNKQYEKERQRLVTGIEELRTKLIQIEAENSDLKVNMAHRTSQFQLIQEELLEKASNSSKLESEMTKKCSQLLTLEKQLEEKIVAYSSIAAKNAELEQELMLEAQLEKKDQQFKEQEKTMSMLQQDIICKQHHLESLDRLLTESKGEMKKENMKKDEALKALQNQVSEETIKVRQLDSALEICKEELVLHLNQLEGNKEKFEKQLKKKSEEVYCLQKELKIKNHSLQETSEQNVILQHTLQQQQQMLQQETIRNGELEDTQTKLEKQVSKLEQELQKQRESSAEKLRKMEEKCESAAHEADLKRQKVIELTGTARQVKIEMDQYKEELSKMEKEIMHLKRDGENKAMHLSQLDMILDQTKTELEKKTNAVKELEKLQHSTETELTEALQKREVLETELQNAHGELKSTLRQLQELRDVLQKAQLSLEEKYTTIKDLTAELRECKMEIEDKKQELLEMDQALKERNWELKQRAAQVTHLDMTIREHRGEMEQK

SEQ ID NO: 13601 - protein, 483 aa, Homo sapiens
METLESELTCPICLELFEDPLLLPCAHSLCFNCAHRILVSHCATNESVESITAFQCPTCRHVITLSQRGLDGLKRNVTLQNIIDRFQKASVSGPNSPSETRRERAFDANTMTSAEKVLCQFCDQDPAQDAVKTCVTCEVSYCDECLKATHPNKKPFTGHRLIEPIPDSHIRGLMCLEHEDEKVNMYCVTDDQLICALCKLVGRHRDHQVAALSERYDKLKQNLESNLTNLIKRNTELETLLAKLIQTCQHVEVNASRQEAKLTEECDLLIEIIQQRRQIIGTKIKEGKVMRLRKLAQQIANCKQCIERSASLISQAEHSLKENDHARFLQTAKNITERVSMATASSQVLIPEINLNDTFDTFALDFSREKKLLECLDYLTAPNPPTIREELCTASYDTITVHWTSDDEFSVVSYELQYTIFTGQANVVSLCNSADSWMIVPNIKQNHYTVHGLQSGTKYIFMVKAINQAGSRSSEPGKLKTNS

SEQ ID NO: 13602 - protein, 320 aa, Homo sapiens [sequence omitted]

SEQ ID NO: 13603 - protein, 1906 aa, Homo sapiens
MIEDKGPRVADYFVVAGLTDVSKPLEEEIHFNDACHKVAKPKEPITDVSVIIKSLGEEVPQDYICIDVTPTGLSADLNNGSLVGPQIYLCYRRGRDKPPLTDLGVLYDWKERLKQGCEIIQSTPYGRPANISGSTSSQRIYITYRRASENMTQNTLAVTDICIIIPSKGESPPHTFCKVDKNLNNSMWGSAVYLCYKKSVAKTNTVSYKAGLICRYPQEDYESFSLPESVPLFCLPMGATIECWPSNSKYPLPVFSTFVLTGASAEKVYGAAIQFYEPYSEENLTEKQRLLLGLTSADGKSDSSKTIHTNKCICLLSHWPFFDAFRKFLTFLYRYSISGPHVLPIEKHISHFMHKVPFPSPQRPRILVQLSPHDNLILSQPVSSPLPLSGGKFSTLLQNLGPENAVTLLVFAVTEHKILIHSLRPSVLTSVTEALVSMIFPFHWPCPYVPLCPLALADVLSAPCPFIVGIDSRYFDLYDPPPDVSCVDVDTNTISQIGDKKNVAWKILPKKPCKNLMNTLNNLHQQLAKLQQRPRDDGLMDLAINDYDFNSGKRLHMIDLEIQEAFLFFMASILKGYRSYLRPITQAPSETATDAASLFALQAFLRSRDRSHQKFYNMMTKTQMFIRFIEECSFVSDKDASLAFFDDCVDKVDMDKSGEVRLIELDESFKSEHTVFVTPPEIPHLPNGEEPPLQYSYNGFPVLRNNLFERPEGFLQAKKNKLPSKSSSPNSPLPMFRRTKQEIKSAHKIAKRYSSIPQMWSRCLLRHCYGLWFICLPAYVKVCHSKVRALKTAYDVLKKMQSKKMDPPDEVCYRILMQLCGQYDQPVLAVRVLFEMQKAGIDPNAITYGYYNKAVLESTWPSRSRSGYFLWTKVRNVVLGVTQFKRALKKHAHLSQTTLSDGSDLDAVSHGSMDSGHGTHTVEQAPFNTGLIKVYATDDRSSTGGQSDLGYNSLSKDEVRRGDTSTEDIQEEKDKKGSDCSSLSESESTKGSADCLPKLSYQNSSSIVRLTGTSNNSAGKISGESMESTPELLLISSLEDTNETRNIQSRCFRKRHKSDNETNLQQQVVWGNRNRNLSGGVLMGFMLNRINQEATPGDIVEKLGADAKILSNVISKSTRPNTLDIGKPPLRSKRDSLEKESSDDDTPFDGSNYLADKVDSPVIFDLEDLDSETDVSKAGCVATQNPKRIQRMNSSFSVKPFEKTDVATGFDPLSLLVAETEQQQKEEEEEDEDDSKSISTPSARRDLAEEIVMYMNNMSSPLTSRTPSIDLQRACDDKLNKKSPPLVKACRRSSLPPNSPKPVRLTKSKSYTKSEEKPRDRLWSSPAFSPTCPFREESQDTLTHSSPSFNLDTLLVPKLDVLRNSMFTAGKGVAEKASKWYSRFTMYTTSSKDQSSDRTSLSSVGAQDSESTSLTDEDVCHELEGPISSQETSATSGTKRIDLSRISLESSASLEGSLSKFALPGKSEVTSSFNASNTNIFQNYAMEVLISSCSRCRTCDCLVHDEEIMAGWTADDSNLNTTCPFCGNIFLPFLNIEIRDLRRPGRYFLKSSPSTENMHFPSSISSQTRQSCISTSASGLDTSALSVQGNFDLNSKSKLQENFCTRSIQIPANRSKTAMSKCPIFPMARSISTSGPLDKEDTGRQKLISTGSLPATLQGATDSLGLEWHLPSPDPVTVPYLSPLVVWKELESLLENEGDHAITVADFVDHHPIVFWNLVWYFRRLDLPSNLPGLILSSEHCNKYSKIPRHCMSEDSKYVLIQMLWDNMKLHQDPGQPLYILWNAHTQKYPMVHLLQKSDNSFNQELLKSMVKSIKMNDVYGPMSQILETLNKCPHFKRQRSLYREILFLSLVALGRENIDIDAFDKEYKMAYDRLTPSQVKSTHNCDRPPSTGVMECRKTFGEPYL

SEQ ID NO: 13604 - protein, 356 aa, Homo sapiens
MSHPDYRMNLRPLGTPRGVSAVAGPHDIGASPGDKKSKNRSTRGKKKSIFETYMSKEDVSEGLKRGTLIQGVLRINPKKFHEAFIPSPDGDRDIFIDGVVARNRALNGDLVVVKLLPEEHWKVVKPESNDKETEAAYESDIPEELCGHHLPQQSLKSYNDSPDVIVEAQFDGSDSEDGHGITQNVLVDGVKKLSVCVSEKDNEIEAQRSSWAYPVSHRKSEERMVMHRLQKMRPPAFHKTQELYRRNPCKDQQRWFTSWRKNILEQQPASSNSWLIRTANCLGNTPCFLPQTTECLEFMCLSRTVPRTLWHGLKIMPTHCSSAALWTGRRTAILPWGSWLRVLGRLVKLSLKQKEY

SEQ ID NO: 13605 - protein, 314 aa, Homo sapiens
MARRLLGPQNAAAVFQAQDDSGAQDSQQHNSEHARLQVPTSQVRSRSTSRGDVNDQDAIQEKFYPPRFIQVPENMSIDEGRFCRMDFKVSGLPAPDVSWYLNGRTVQSDDLHKMIVSEKGLHSLIFEVVRASDAGAYACVAKNRAGEATFTVQLDVLAKEHKRAPMFIYKPQSKKVLEGDSVKLECQISAIPPPKLFWKRNNEMVQFNTDRISLYQDNTGRVTLLIKDVNKKDAGWYTVSAVNEAGVTTCNTRLDVTARPNQTLPAPKQLRVRPTFSKYLALNGKGLNVKQAFNPEGEFQRLAAQSGLYESEEL

SEQ ID NO: 13606 - protein, 276 aa, Homo sapiens
QLMVVVGILLAYLAGWVLEWRWLAVLGCVPPSLMLLLMCFMPETPRFLLTQHRRQEAMAALRFLWGSEQGWEDPPIGAEQSFHLALLRQPGIYKPFIIGVSLMAFQQLSGVNAVMFYAETIFEEAKFKDSSLASVVVGVIQVLFTAVAALIMDRAGRRLLLVLSGVVMVFSTSAFGAYFKLTQGGPGNSSHVAISAPVSAQPVDASVGLAWLAVGSMCLFIAGFAVGWGPIPWLLMSEIFPLHVKGVATGICVLTNWLMAFLVTKEFSSLMLLLLL

SEQ ID NO: 13607 - protein, 308 aa, Homo sapiens
MMNSDQKAVKFLANFYINGGKHWTHGHLRQTQPEPTQPKASVLLLGPEPGMAWDETQPPKMKEIPVGLRLQTGTPQESLPTYTQTLRELLLEQRPLITADLEVPSPTRYQVPSPSVRESSPHPHYSIGCKHQGREGGGRRAWQTLWFQSESPFTQKADFDQEQKWPSPAHYQLLSRPAFPAFSFRGCHSASKTPEGHTHLGLPGARGLGLRVQPQSLLQASLQAPGKRCPGPNTYNILPGSRLQSPRSPAFSMSRSPAFTSWLSTSRTPGPAAYHVEDCNSRFPSAPGVVIQGVRRPKRHDTGPFCTL

SEQ ID NO: 13608 - protein, 609 aa, Homo sapiens
MMAQFPTAMNGGPNMWAITSEERTKHDRQFDNLKPSGGYITGDQARNFFLQSGLPAPVLAEIWALSDLNKDGKMDQQEFSIAMKLIKLKLQGQQLPVVLPPIMKQPPMFSPLISARFGMGSMPNLSIPQPLPPAAPITSLSSATSGTNLPPLMMPTPLVPSVSTSSLPNGTASLIQPLPIPYSSSTLPHGSSYSLMMGGFGGASIQKAQSLIDLGSSRSWSSGSSAHSPATHRAPLSSPVPNSSTSSTASLSGNSPKTGTSEWAVPQPTRLKYRQKFNTLDKSMSGYLSGFQARNALLQSNLSQTQLATIWTLADVDGDGQLKAEEFILAMHLTDMAKAGQPLPLTLPPELVPPSFRGGKQIDSINGTLPSYQKMQEEEPQKKLPVTFEDKRKANYERGNMELEKRRQALMEQQQREAERKAQKEKEEWERKQRELQEQEWKKQLELEKRLEKQRELERQREEERRKDIERREAAKQELERQRRLEWERIRRQELLNQKNREQEEIVRLNSKKKNLHLELEALNGKHQQISGRLQDVRLKKQTQKTELEVLDKQCDLEIMEIKQLQQELQEYQNKLIYLVPEKQLLNERIKNMQFSNTPDSGVSLLHKK

SEQ ID NO: 13609 - protein, 224 aa, Homo sapiens
MDSNHQSNYKLSKTEKKFLRKQIKAKHTLLRHEGIETVSYATQSLVVANGGLGNGVSRNQLLPVLEKCGLVDALLMPPNKPYSFARYRTTEESKRAYVTLNGKEVVDDLGQKITLYLNFVEKVQWKELRPQALPPGLMVVEEIISSEEEKMLLESVDWTEDTDNQNSQKSLKHRRVKHFGYEFHYENNNVDKDKPLSGGLPDICESFLEKWLRKAEKNLEVGIH

SEQ ID NO: 13610 - protein, 801 aa, Homo sapiens
MHSFVKHLCSRYVVERQGTMALPALLTRLLPLRRLFVLGIGFFTLCFLMTSLGGQFSARRLGDSPFTIRTEVMGGPESRGVLRKMSDLLELMVKRMDALARLENSSELHRAGGDLHFPADRMPPGAGLMERIQAIAQNVSDIAVKVDQILRHSLLLHSKVSEGRRDQCEAPSDPKFPDCSGKVEWMRARWTSDPCYAFFGVDGTECSFLIYLSEVEWFCPPLPWRNQTAAQRAPKPLPKVQAVFRSNLSHLLDLMGSGKESLIFMKKRTKRLTAQWALAAQRLAQKLGATQRDQKQILVHIGFLTEESGDVFSPRVLKGGPLGEMVQWADILTALYVLGHGLRVTVSLKELQSNLGVPPGRGSCPLTMPLPFDLIYTDYHGLQQMKRHMGLSFKKYRCRIRVIDTFGTEPAYNHEEYATLHGYRTNWGYWNLNPKQFMTMFPHTPDNSFMGFVSEELNETEKRLIKGGKASNMAVVYGKEASIWKGKEKFLGILNKYMEIHGTVYYESQRPPEVPAFVKNHGLLPQPEFQQLLRKAKLFIGFGFPYEGPAPLEAIANGCIFLQSRFSPPHSSLNHEFFRGKPTSREVFSQHPYAENFIGKPHVWTVDYNNSEEFEAAIKAIMRTQVDPYLPYEYTCEGMLERIHAYIQHQDFCRAPDPALPEAHAPQSPFVLAPNATHLEWARNTSLAPGAWPPAHALRAWLAVPGRACTDTCLDHGLICEPSFFPFLNSQDAFLKLQVPCDSTESEMNHLYPAFAQPGQECYLQKEPLLFSCAGSNTKYRRLCPCRDFRKGQVALCQGCL

SEQ ID NO: 13611 - protein, 1003 aa, Homo sapiens
KVAHLVLKAHARTWHHYNSHHRPQQQGHVGIVLNSDWAEPLSPERPEDLRASERFLHFMLGWFAHPVFVDGDYPATLRTQIQQMNRQCSHPVAQLPEFTEAEKQLLKGSADFLGLSHYTSRLISNAPQNTCIPSYDTIGGFSQHVNHVWPQTSSSWIRVVPWGIRRLLQFVSLEYTRGKVPIYLAGNGMPIGESENLFDDSLRVDYFNQYINEVLKAIKEDSVDVRSYIARSLIDGFEGPSGYSQRFGLHHVNFSDSSKSRTPRKSAYFFTSIIEKNGFLTKGAKRLLPPNTVNLPSKVRAFTFPSEVPSKAKVVWEKFSSQPKFERDLFYHGTFRDDFLWGVSSSAYQIEGAWDADGKGPSIWDNFTHTPGSNVKDNATGDIACDSYHQLDADLNMLRALKVKAYRFSISWSRIFPTGRNSSINSHGVDYYNRLINGLVASNIFPMVTLFHWDLPQALQDIGGWENPALIDLFDSYADFCFQTFGDRVKFWMTFNEPMYLAWLGYGSGEFPPGVKDPGWAPYRIAHAVIKAHARVYHTYDEKYRQEQKGVISLSLSTHWAEPKSPGVPRDVEAADRMLQFSLGWFAHPIFRNGDYPDTMKWKVGNRSELQHLATSRLPSFTEEEKRFIRATADVFCLNTYYSRIVQHKTPRLNPPSYEDDQEMAEEEDPSWPSTAMNRAAPWGTRRLLNWIKEEYGDIPIYITENGVGLTNPNTEDTDRIFYHKTYINEALKAYRLDGIDLRGYVAWSLMDNFEWLNGYTVKFGLYHVDFNNTNRPRTARASARYYTEVITNNGMPLAREDEFLYGRFPEGFIWSAASAAYQIEGAWRADGKGLSIWDTFSHTPLRVENDAIGDVACDSYHKIAEDLVTLQNLGVSHYRFSISWSRILPDGTTRYINEAGLNYYVRLIDTLLAASIQPQVTIYHWDLPQTLQDVGGWENETIVQRFKEYADVLFQRLGDKVKFWITLNEPFVIAYQGYGYGTAAPVHGRLVCTSYFQEWRLQ

SEQ ID NO: 13612 - protein, 286 aa, Homo sapiens
MAAPEAPPLDRVFRTTWLSTECDSHPLPPSYRKFLFETQAADLAGGTTVAAGNLLNESEKDCGQDRRAPGVQPCRLVTMTSVVKTVYSLQPPSALSGGQPADTQTRATSKSLLPVRSKEVDVSKQLHSGGPENDVTKITKLRRENGQMKATDTATRRNVRKGYKPLSKQKSEEELKDKNQLLEAVNKQLHQKLTETQGELKDLTQKVELLEKFRDNCLAILESKGLDPALGSETLASRQESTTDHMDSMLLLETLQEELKLFNETAKKQMEELQIAWMNHGILHQM

SEQ ID NO: 13613 - protein, 432 aa, Homo sapiens
MSASKIPLFKMKDLILILCLLEMSFAVPFFPQQSGTPGMASLSLETMRQLGSLQRLNTLSQYSRYGFGKSFNSLWMHGLLPPHSSLPWMRPREHETQQPSLKPQQPGLKPFLQSAAATTNQATALKEALQPPIHLGHLPLQEGELPLVQQQVAPSDKPPKPELPGVDFADPQGPSLPGMDFPDPQGPSLPGLDFADPQGSTIFQIARLISHGPMPQNKQSPLYPGMLYVPFGANQLNAPARLGIMSSEEVAGGREDPMAYGAMFPGFGGMRPGFEGMPHNPAMGGDFTLEFDSPVAATKGPENEEGGAQGSPMPEANPDNLENPAFLTELEPAPHAGLLALPKDDIPGLPRSPSGKMKGLPSVTPAAADPLMTPELADVYRTYDADMTTSVDFQEEATMDTTMAPNSLQTSMPGNKAQEPEMMHDAWHFQEP

SEQ ID NO: 13614 - protein, 723 aa, Homo sapiens
MWVTKLLPALLLQHVLLHLLLLPIAIPYAEGQRKRRNTIHEFKKSAKTTLIKIDPALKIKTKKVNTADQCANRCTRNKGLPFTCKAFVFDKARKQCLWFPFNSMSSGVKKEFGHEFDLYENKDYIRNCIIGKGRSYKGTVSITKSGIKCQPWSSMIPHEHSYRGKDLQENYCRNPRGEEGGPWCFTSNPEVRYEVCDIPQCSEVECMTCNGESYRGLMDHTESGKICQRWDHQTPHRHKFLPERYPDKGFDDNYCRNPDGQPRPWCYTLDPHTRWEYCAIKTCADNTMNDTDVPLETTECIQGQGEGYRGTVNTIWNGIPCQRWDSQYPHEHDMTPENFKCKDLRENYCRNPDGSESPWCFTTDPNIRVGYCSQIPNCDMSHGQDCYRGNGKNYMGNLSQTRSGLTCSMWDKNMEDLHRHIFWEPDASKLNENYCRNPDDDAHGPWCYTGNPLIPWDYCPISRCEGDTTPTIVNLDHPVISCAKTKQLRVVNGIPTRTNIGWMVSLRYRNKHICGGSLIKESWVLTARQCFPSRDLKDYEAWLGIHDVHGRGDEKCKQVLNVSQLVYGPEGSDLVLMKLARPAVLDDFVSTIDLPNYGCTIPEKTSCSVYGWGYTGLINYDGLLRVAHLYIMGNEKCSQHHRGKVTLNESEICAGAEKIGSGPCEGDYGGPLVCEQHKMRMVLGVIVPGRGCAIPNRPGIFVRVAYYAKWIHKIILTYKVPQS

SEQ ID NO: 13615 - protein, 487 aa, Homo sapiens
MEKKECPEKSSSSEEELPRRVYRELPCVSETLCDISHFFQEDDETEAEPLLFRAVPECQLSGGDIPSVSEEQESSEGQDSGDICSEENQIVSSYASKVCFEIEEDYKNRQFLGPEGNVDVELIDKSTNRYSVWFPTAGWYLWSATGLGFLVRDEVTVTIAFGSWSQHLALDLQHHEQWLVGGPLFDVTAEPEEAVAEIHLPHFISLQAGEVDVSWFLVAHFKNEGMVLEHPARVEPFYAVLESPSFSLMGILLRIASGTRLSIPITSNTLIYYHPHPEDIKFHLYLVPSDALLTKAIDDEEDRFHGVRLQTSPPMEPLNFGSSYIVSNSANLKVMPKELKLSYRSPGEIQHFSKFYAGQMKEPIQLEITEKRHGTLVWDTEVKPVDLQLVAASAPPPFSGAAFVKENHRQLQARMGDLKGVLDDLQDNEVLTENEKELVEQEKTRQSKNEALLSMVEKKGDLALDVLFRSISERDPYLVSYLRQQNL

SEQ ID NO: 13616 - protein, 586 aa, Homo sapiens
MKKSYSGGTRTSSGRLRRLGDSSGPALKRSFEVEEVETPNSTPPRRVQTPLLRATVASSTQKFQDLGVKNSEPSARHVDSLSQRSPKASLRRVELSGPKAAEPVSRRTELSIDISSKQVENAGAIGPSRFGLKRAEVLGHKTPEPAPRRTEITIVKPQESAHRRMEPPASKVPEVPTAPATDAAPKRVEIQMPKPAEAPTAPSPAQTLENSEPAPVSQLQSRLEPKPQPPVAEATPRSQEATEAAPSCVGDMADTPRDAGLKQAPASRNEKAPVDFGYVGIDSILEQMRRKAMKQGFEFNIMVVGQSGLGKSTLINTLFKSKISRKSVQPTSEERIPKTIEIKSITHDIEEKGVRMKLTVIDTPGFGDHINNENCWQPIMKFINDQYEKYLQEEVNINRKKRIPDTRVHCCLYFIPATGHSLRPLDIEFMKRLSKVVNIVPVIAKADTLTLEERVHFKQRITADLLSNGIDVYPQKEFDEDSEDRLVNEKFREMIPFAVVGSDHEYQVNGKRILGRKTKWGTIEVENTTHCEFAYLRDLLIRTHMQNIKDITSSIHFEAYRVKRLNEGSSAMANGMEEKEPEAPEM

SEQ ID NO: 13617 - protein, 829 aa, Homo sapiens
LRRGTCAFSILFKLFSEGLFSAKLFLTATLHEPIMQLLVEDEDHLETDPNKLIERFSPSQQEKLFGEKGSDRFRQKVQEMVESNEAKLVALVNKFIGYLKQNTYCFPHSLRWIVSQMYKTLSCVDRLEVGEVRAMCTDLLLACFICPAVVNPEQYGIISDAPINEVARFNLMQVGRLLQQLAMTGSEEGDPRTKSSLGKFDKSCVAAFLDVVIGGRAVETPPLSSVNLLEGLSRTVVYITYSQLITLVNFMKSVMSGDQLREDRMALDNLLANLPPAKPGKSSSLEMTPYNTPQLSPATTPANKKNRLPIGQQLAAITAWDSSATNITSHITVVTPFATRSRSRTNMLMDLHMDHEGSSQETIQEVQPEEVLVISLGTGPQLTPGMMSENEVLNMQLSDGGQGDVPVDENKLHGPSNRSNSVSSLDLEGESVSELGAGPSGSNGVEALQLLEHEQATTQDNLDDKLRKFEIRDMMGLTDDRDISETVSETWSTDVLGSDFDPNIDEDRLQEIAGAAAENMLGSLLCLPGSGSVLLDPCTGSTISETTSEAWSVEVLPSDSEAPDLKQEERLQELESCSGLGSTSDDTDVREVSSRPSTPGLSVVSGISATSEDIPNKIEDLRSECSSDFGGKDSVTSPDMDEITHGAHQLTSPPSQSESLLAMFDPLSSHEGASAVVRPKVHYARPSHPPPDPPILEGAVGGNEARLPNFGSHVLTPAEMEAFKQRHSYPERLVRSRSSDIVSSVRRPMSDPSWNRRPGNEERELPPAAAIGATSLVAAPHSSSSSPSKDSSRGETEERKDSDDEKSDRNRPWWRKRFVSAMPKAPIPF

SEQ ID NO: 13618 - protein, 278 aa, Homo sapiens
MAARPLPVSPARALLLALAGALLAPCEARGVSLWNQGRADEVVSASVGSGDLWIPVKSFDSKNHPEVLNIRLQRESKELIINLERNEGLIASSFTETHYLQDGTDVSLARNYTGHCYYHGHVRGYSDSAVSLSTCSGLRGLIVFENESYVLEPMKSATNRYKLFPAKKLKSVRGSCGSHHNTPNLAAKNVFPPPSQTWARRHKRETLKATKYVELVIVADNREFQRQGKDLEKVKQRLIEIANHVDKFYRPLNIRIVLVGVEVWNDMDKCSVSQDPFT

SEQ ID NO: 13619 - protein, 425 aa, Homo sapiens
METGQRTHASGTYSFLDRTQHSDIKADCNTCVEIEDRKVSRQQMNCEREQLRGNQEAAAAPDTMAQPYASAQFAPPQNGIPAEYTAPHPHPAPEYTGQTTVPEHTLNLYPPAQTHSEQSPADTSAQTVSGTATQTDDAAPTDGQPQTQPSENTENKSQPKRLHVSNIPFRFRDPDLRQMFGQFGKILDVEIIFNERGSKGFGFVTFENSADADRAREKLHGTVVEGRKIEVNNATARVMTNKKTVNPYTNGWKLNPVVGAVYSPEFYAGTVLLCQANQEGSSMYSAPSSLVYTSAMPGFPYPAATAAAAYRGAHLRGRGRTVYNTFRAAAPPPPIPAYGGVVYQDGFYGADIYGGYAAYRYAQPTPATAAAYSDSYGRVYAADPYHHALAPAPTYGVGAMPQGSSPSTDFRGAKLHTSRPLLSGS

SEQ ID NO: 13620 - protein, 109 aa, Homo sapiens
MIIVAHVLLILLGATEILQADLLPDEKISLLPPVNFTIKVTGLAQVLLQWKPNPDQEQRNVNLEYQVKINAPKEDDYETRITESKCVTILHKGFSASVRTILQNDHSLL

SEQ ID NO: 13621 - protein, 117 aa, Homo sapiens
MGHLENTSVVFPRAIFSLCEKETRKLTLCLFSRSSSAEHPGASKPPISSSSMTSRILLRQQLMREQMQEQERREQQQKLQAAQFMQQRVPVSQTPAINVSVPTTLPSATQVPMEVLK

SEQ ID NO: 13622 - protein, 557 aa, Homo sapiens
MDDLDALLADLESTTSHISKRPVFLSEETPYSYPTGNHTYQEIAVPPPVPPPPSSEALNGTILDPLDQWQPSSSRFIHQQPQSSSPVYGSSAKTSSVSNPQDSVGSPCSRVGEEEHVYSFPNKQKSAEPSPTVMSTSLGSNLSELDRLLLELNAVQHNPPGFPADEANSSPPLPGALSPLYGVPETNSPLGGKAGPLTKEKPKRNGGRGLEDVRPSVESLLDELESSVPSPVPAITVNQGEMSSPQRVTSTQQQTRISASSATRELDELMASLSDFKFMAQGKTGSSSPPGGPPKPGSQLDSMLGSLQSDLNKLGVATVAKGVCGACKKPIAGQVVTAMGKTWHPEHFVCTHCQEEIGSRNFFERDGQPYCEKDYHNLFSPRCYYCNGPILDKVVTALDRTWHPEHFFCAQCGAFFGPEGFHEKDGKAYCRKDYFDMFAPKCGGCARAILENYISALNTLWHPECFVCRECFTPFVNGSFFEHDGQPYCEVHYHERRGSLCSGCQKPITGRCITAMAKKFHPEHFVCAFCLKQLNKGTFKEQNDKPYCQNCFLKLFC

SEQ ID NO: 13623 - protein, 96 aa, Homo sapiens
MVVQDPLLCDLPIQVTLEEVNSQIALEYGQAMTVRVCKMDGESATVLDLKKAIQRYVQLKQEREGGIQHISWSYVWRTYHLTSAGEKLTEDRKKLR

SEQ ID NO: 13624 - protein, 1362 aa, Homo sapiens
GAGGAAGAGTGGAGPAGRLLPPPAPGSPAAPAAVSPAAGQPRPPAPASRGPMPARIGYYEIDRTIGKGNFAVVKRATHLVTKAKVAIKIIDKTQLDEENLKKIFREVQIMKMLCHPHIIRLYQVMETERMIYLVTEYASGGEIFDHLVAHGRMAEKEARRKFKQIVTAVYFCHCRNIVHRDLKAENLLLDANLNIKIADFGFSNLFTPGQLLKTWCGSPPYAAPELFEGKEYDGPKVDIWSLGVVLYVLVCGALPFDGSTLQNLRARVLSGKFRIPFFMSTECEHLIRHMLVLDPNKRLSMEQICKHKWMKLGDADPNFDRLIAECQQLKEERQVDPLNEDVLLAMEDMGLDKEQTLQSLRSDAYDHYSAIYSLLCDRHKRHKTLRLGALPSMPRALAFQAPVNIQAEQAGTAMNISVPQVQLINPENQIVEPDGTLNLDSDEGEEPSPEALVRYLSMRRHTVGVADPRTEVMEDLQKLLPGFPGVNPQAPFLQVAPNVNFMHNLLPMQNLQPTGQLEYKEQSLLQPPTLQLLNGMGPLGRRASDGGANIQLHAQQLLKRPRGPSPLVTMTPAVPAVTPVDEESSDGEPDQEAVQRYLANRSKRHTLAMTNPTAEIPPDLQRQLGQQPFRSRVWPPHLVPDQHRSTYKDSNTLHLPTERFSPVRRFSDGAASIQAFKAHLEKMGNNSSIKQLQQECEQLQKMYGGQIDERTLEKTQQQHMLYQQEQHHQILQQQIQDSICPPQPSPPLQAACENQPALLTHQLQRLRIQPSSPPPNHPNNHLFRQPSNSPPPMSSAMIQPHGAASSSQFQGLPSRSAIFQQQPENCSSPPNVALTCLGMQQPAQSQQVTIQVQEPVDMLSNMPGTAAGSSGRGISISPSAGQMQMQHRTNLMATLSYGHRPLSKQLSADSAEAHSLNVNRFSPANYDQAHLHPHLFSDQSRGSPSSYSPSTGVGFSPTQALKVPPLDQFPTFPPSAHQQPPHYTTSALQQALLSPTPPDYTRHQQVPHILQGLLSPRHSLTGHSDIRLPPTEFAQLIKRQQQQRQQQQQQQQQQEYQELFRHMNQGDAGSLAPSLGGQSMTERQALSYQNADSYHHHTSPQHLLQIRAQECVSQASSPTPPHGYAHQPALMHSESMEEDCSCEGAKDGFQDSKSSSTLTKGCHDSPLLLSTGGPGDPESLLGTVSHAQELGIHPYGHQPTAAFSKNKVPSREPVIGNCMDRSSPGQAVELPDHNGLGYPARPSVHEHHRPRALQRHHTIQNSDDAYVQLDNLPGMSLVAGKALSSARMSDAVLSQSSLMGSQQFQDGENEECGASLGGHEHPDLSDGSQHLNSSCYPSTCITDILLSYKHPEVSFSMEQAGV

SEQ ID NO: 13625 - protein, 159 aa, Homo sapiens
MEGAALLRVSVLCIWMSALFLGVGVRAEEAGARVQQNVPSGTDTGDPQSKPLGDWAAGTMDPESSIFIEDAIKYFKEKVSTQNLLLLLTDNEAWNGFVAAAELPRNEADELRKALDNLARQMIMKDKNWHDKGQQYRNWFLKEFPRLKSELEDNIRRLR

SEQ ID NO: 13626 - protein, 283 aa, Homo sapiens
MIMNKMKNFKRRFSLSVPRTETIEESLAEFTEQFNQLHNRRNENLQLGPLGRDPPQECSTFSPTDSGEEPGQLSPGVQFQRRQNQRRFSMEVRASGALPRQVAGCTHKGVHRRAAALQPDFDVSKRLSLPMDIRLPQEFLQKLQMESPDLPKPLSRMSRRASLSDIGFGKLETYVKLDKLGEGTYATVFKGRSKLTENLVALKEIRLEHEEGAPCTAIREVSLLKNLKHANIVTLHDLIHTDRSLTLVFEYLDSDLKQYLDHCGNLMSMHNVKIFMFQLLRGL

SEQ ID NO: 13627 - protein, 714 aa, Homo sapiens
LSWTKAGSPAPPGVIPFQSGFIFTQRARLQAPTGTVIPAALGTELALVLSLCSHRVNHAFLFAVRSQKRKLQLGLQFLPGKTVVHLGSRRSVAFDLDMHDGRWHHLALELRGRTVTLVTACGQRRVPVLLPFHRDPALDPGGSFLFGKMNPHAVQFEGALCQFSIYPVTQVAHNYCTHLRKQCGQADTYQSPLGPLFSQDSGRPFTFQSDLALLGLENLTTATPALGSLPAGRGPRGTVAPATPTKPQRTSPTNPHQHMAVGGPAQTPLLPAKLSASNALDPMLPASVGGSTRTPRPAAAQPSQKITATKIPKSLPTKPSAPSTSIVPIKSPHPTQKTAPSSFTKSALPTQKQVPPTSRPVPARVSRPAEKPIQRNPGMPRPPPPSTRPLPPTTSSSKKPIPTLARTEAKITSHASKPASARTSTHKPPPFTALSSSPAPTPGSTRSTRPPATMVPPTSGTSTPRTAPAVPTPGSAPTGSKKPIGSEASKKAGPKSSPRKPVPLRPGKAARDVPLSDLTTRPSPRQPQPSQQTTPALVLAPAQFLSSSPRPTSSGYSIFHLAGSTPFPLLMGPPGPKGDCGLPGPPGLPGLPGIPGARGPRGPPGPYGNPGLPGPPGAKGDMGLPGLSGNPGPPGRKGLPGPVGDPGPKGSRGYIGLPGLFGLPGSDGERGLPGVPGKRGKMGMPVLLPQSSEARGGNSMPSEGALAGRHGSHL

SEQ ID NO: 13628 - protein, 443 aa, Homo sapiens
MNLSIAIPAMVNNTAPPSQPNASTERPSTDSQGYWNETLKEFKAMAPAYDWSPEIQGIILSSLNYGSFLAPIPSGYVAGIFGAKYVVGAGLFISSFLTLFIPLAANAGVALLIVLRIVQGIAQVMVLTGQYSIWVKWAPPLERSQLTTIAGSGSMLGSFIVLLAGGLLCQTIGWPYVFYIFGGIGCACCPLWFPLIYDDPVNHPFISAGEKRYIVCSLAQQDCSPGWSLPIRAMIKSLPLWAILVSYFCEYWLFYTIMAYTPTYISSVLQANLRDSGILSALPFVVGCICIILGGLLADFLLSRKILRLITIRKLFTAIGVLFPSVILVSLPWVRSSHSMTMTFLVLSSAISSFCESGALVNFLDIAPRYTGFLKGLLQVFAHIAGAISPTAAGFFISQDSEFGWRNVFLLSAAVNISGLVFYLIFGRADVQDWAKEQTFTHL

SEQ ID NO: 13629 - protein, 661 aa, Homo sapiens
MALTQGQLSFSDVAIEFSQEEWKCLDPGQKALYRDVMLENYRNLVSLGICLPDLSVTSMLEQKRDPWTLQSEVKIINNPDGRECIKGVNTEKSSKLGSSAGNKSLKNQHGLTLQLHLTEWQPFQAVRNIYGCKHVEKSISDNSSVSPVQISFFSVKTHIFNNYRNDFLFSTLLPQEQKVHIREKPYGCNEHGKVFRVSSSLTNRQVIHIADKTYKCSDCGEIFSSNSNFAQHQRIHTGEKPYKYNECGKVFNQNSHLAQHQKIHTGQKPYNNKECGKVFSHHAYLAQHRKIHTGEKPYKCSECGKAFSVCSSLTAHLVIHTGEKPYDCKECGKVFRHKSSLTTHQTVHTGERPYKCNECGKGFSRIAFLARHRKVHTGEKPYKCNECGKVFIGNSRLARHRKIHTGGRRYKCNECGKAFRTCSDLTAHLLIHTGEKPYECIDCGKVFRHKSSLTYHCRIHTGEKPYKCNECGKVFSQNSNLQRHRKIHTGEKLYKCNECGKVFRQNSHLAQHRDIHTGEKPYSCNECGKVFRRNSHLVRHRNVHTGEKPYSCNECGKVFSRNSHLARHRNIHTGEKPHSCNECGKVFSRNSHLARHRKIHTGEKLYKCNECSKVFSRNSRLAQHRNIHTGVKPYSCNECGKVFSKNSILVQHCSIHTREKP

SEQ ID NO: 13630 - protein, 215 aa, Homo sapiens
MSQTSSIGSAESLISLERKKEKNINRDITSRKDLPSRTSNVERKASQQQWGRGNFTEGKVPHIRIENGAAIEEIYTFGRILGKGSFGIVIEATDKETETKWAIKKVNKEKAGSSAVKLLEREVNILKSVKHEHIIHLEQVFETPKKMYLVMELCEDGELKEILDRKGHFSENETRWIIQSLASAIAYLHNNDIVHRDLKLENIMVKSSLIDDNNE

SEQ ID NO: 13631 - protein, 996 aa, Homo sapiens
PGLLYLSSHGLWLITIAKCGILCIRDVYTLETFAWCRSHSHQGHGIQSMRISMDGQNILVNGRDDGTLVYLKWKRFGGHLASEILDYYQKLLISLSSAMDKENHYLSTTPKVSVDLGSDSEHTKQKASTDLSQDELVLTDVKKEIPWIQQKSQEAIKKEVNLFSKKRKEIKQGIKSLSKTILNMMEENDKLENIAKLDQQEFGLDLEELERLHDESQEEVAKMIKDVEMHNLAKSYLAELIKEECWNSMAVKGRALKCFHIPCVVENFPMKARTVEELKELERVLQQKKIEAECLKLRKEIVEAQSGVKLIKQRHEEDDEEEEEEDKTVKYSNLPNYLLGSLSTDFGVDTSLLSSQLELHSREEKINQIILLKDIIYKVKTVFNNEFDAAYKQKEFEIARVKERNVRIREIILDLELEEAVWQPEFEDCEKPERTLVVQDEEITAHKHIKPWHKAKELIVNHEKEHWLLIQDASTRLRALMDMMGGVLEVKKEDILRMVIPQPAFMAKPDAVWTEEERKQFKDYEKKVKELNEERDKYRKSLEAELKKLQNSIQESTQAFDEHLKRLFERRVKAEMVTNQEELKISNLAFSLLLDEELSSREKFLNNYLTRKQHEKVMDRSFKKEFSEIPGHQVDILYKLFKRRPRISKQKTHSETTSVVPFGELPGSGKLNKDAFAQLMKAMDELDNISNMPEGLDPLVWNHFCMTRRAKVENEQKVKQKAADLLEMATFLQKRVEEEEKVQQEIERVFHELILLQEEKVRFQLNLTIQILLKQGQVELENFQLVLEYSDAILINKNIIEDLNSVIRTQGQKKVASMMESKDVHKRILQIEWEHKKMEMEREDLNQKAWDIQMLFFSRDRQKYLNEPNYEALISIQIGIMEQTIAVLDKMHKKNVENCKKLLKKLGKFSNQKDIANYALSCNLREELVAVSERKDICNAMGSKLTCEKIVKERYENMMQQQKLTNISKQQAEQISILQTEVERLRMKTFPALVQM

SEQ ID NO: 13632 - protein, 262 aa, Homo sapiens
MRGGPRCLRRRGGPYKTEPATDLGRWRLNCERGRQTWTYLQDERAGREQTGLEAYALGLDTKNYFKDLPKAHTAFEGALNGMTFYVGLQAEDGHWTGDYGGPLFLLPGLLITCHVARIPLPAGYREEIVRYLRSVQLPDGGWGLHIEDKSTVFGTALNYVSLRILGVGPDDPDLVRARNILHKKGGAVAIPSWGKFWLAVLNVYSWEGLNTLFPEMWLFPDWAPAHPSTLWCHCRQVYLPMSYCYAVRLSAAEDPLVQSLRQ

SEQ ID NO: 13633 - protein, 290 aa, Homo sapiens
MRFTFTSRCLALFLLLNHPTPILPAFSNQTYPTIEPKPFLYVVGRKKMMDAQYKCYDRMQQLPAYQGEGPYCNRTWDGWLCWDDTPAGVLSYQFCPDYFPDFDPSEKVTKYCDEKGVWFKHPENNRTWSNYTMCNAFTPEKLKNAYVLYYLAIVGHSLSIFTLVISLGIFVFFRKLTTIFPLNWKYRKALSLGCQRVTLHKNMFLTYILNSMIIIIHLVEVVPNGELVRRDPVSCKILHFFHQYMMACNYFWMLCEGIYLHTLIVVAVFTEKQRLRWYYLLGWAPAFHRD

SEQ ID NO: 13634 - protein, 347 aa, Homo sapiens
MSVAGLKKQFHKASQLFSEKISGAEGTKLDDEFLDMERKIDVTNKVVAEILSKTTEYLQPNPAYRAKLGMLNTVSKIRGQVKTTGYPQTEGLLGDCMLKYGKELGEDSTFGNALIEVGESMKLMAEVKDSLDINVKQTFIDPLQLLQDKDLKEIGHHLKKLEGRRLDYDYKKKRVGKIPDEEVRQAVEKFEESKELAERSMFNFLENDVEQVSQLAVFIEAALDYHRQSTEILQELQSKLQMRISAASSVPRREYKPRPVKRSSSELNGVSTTSVVKTTGSNIPMDQPCCRGLYDFEPENQGELGFKEGDIITLTNQIDENWYEGMIHGESGFFPINYVEVIVPLPQ

SEQ ID NO: 13635 - protein, 548 aa, Homo sapiens
MPVDLGQALGLLPSLAKAEDSQFSESDAALQEELSSPETARQLFRQFRYQVMSGPHETLKQLRKLCFQWLQPEVHTKEQILEILMLEQFLTILPGEIQMWVRKQCPGSGEEAVTLVESLKGDPQRLWQWISIQVLGQDILSEKMESPSCQVGEVEPHLEVVPQELGLENSSSGPGELLSHIVKEESDTEAELALAASQPARLEERLIRDQDLGASLLPAAPQEQWRQLDSTQKEQYWDLMLETYGKMVSGGISHPKSDLTNSIEFGEELAGIYLHVNEKIPRPTCIGDRQENDKENLNLENHRDQELLHASCQASGEVPSQASLRGFFTEDEPGCFGEGENLPEALQNIQDEGTGEQLSPQERISEKQLGQHLPNPHSGEMSTMWLEEKRETSQKGQPRAPMAQKLPTCRECGKTFYRNSQLIFHQRTHTGETYFQCTICKKAFLRSSDFVKHQRTHTGEKPCKCDYCGKGFSDFSGLRHHEKIHTGEKPYKCPICEKSFIQRSNFNRHQRVHTGEKPYKCSHCGKSFSWSSSLDKHQRSHLGKKPFQ

SEQ ID NO: 13636 - protein, 788 aa, Homo sapiens
MVLLRLLVFLFAPVVSDLCSLPCFINVSESQGPGTVLQFLSFNCSSYTPTPTLELLNVQPPTTFFNPPSLARWQGTYVGKLTLSSSAQLDALMVNHYKVQLKFTCGNHVMEGSLSVDVQRDLSHIQCAGQFASPAGEMIQVPETVTPGARLYTLLLPGLELHGAQMSIISAQDLPHFPGPFSINEQGWLQAPSQGLLGQAQKVFQLQISVSFGQRQSCQGMVIVKVLPVPSSQVSFLEQAQNITIPENLAPGSEVVQVQARGVDLRYEILSPVPSPLFSIGRADGVVRTTTPLELARTSGTAVSRLQVKAFEQGQLWASAKLNLTMNVQLVNLWPPRCLPALLVSQIPETAPVGTVLNTLTCEDPDSVGATLDYKLWFRSSSNPASLCLYDRVLEVNATLDCDTPGACFQHAASILVLDGGQPQMTTEVPVLVMVTPINEFSPACAPRTFRVQEDAAPHTLLGSVVGTDMDYPHDNIEYYTSGGPTTFAVDRLSGEVHLLGPLDYEQQRLYRLTVLVIDHGQDQNPNHHLSGSCTITIEVEDVNDHAPECEPPFQELTIYAPLGRSVEVTKMSCQIPQEPQRLIYSYSIVGGNSQNRFILQGAILVHSDLVLGPFWPEQPRTYELLICVADAGPSTPHLSTTATIIVHLVPRRASTVATSTHRTTVPSTMTPMLVTDTEAFWQPQPWFVVVLTATGALLLLALGWLLGRLLQGLAQLLQAPSKPAQALLLNSIQGTEGSIEGFLEAPKMEMSQAPSSVMSLHFDGRAQDSRTGRDYLFNTHTGARRWL

SEQ ID NO: 13637 - protein, 833 aa, Homo sapiens
MNKAPQSTGPPPAPSPGLPQPAFPPGQTAPVVFSTPQATQMNTPSQPRQHFYPSRAQPPSSAASRVQSAAPARPGPAAHVYPAGSQVMMIPSQISYPASQGAYYIPGQGRSTYVVPTQQYPVQPGAPGFYPGASPTEFGTYAGAYYPAQGVQQFPTGVAPTPVLMNQPPQIAPKRERKTIRIRDPNQGGKDITEEIMSGARTASTPTPPQTGGGLEPQANGETPQVAVIVRPDDRSQGAIIADRPGLPGPEHSPSESQPSSPSPTPSPSPVLEPGSEPNLAVLSIPGDTMTTIQMSVEESTPISRETGEPYRLSPEPTPLAEPILEVEVTLSKPVPESEFSSSPLQAPTPLASHTVEIHEPNGMVPSEDLEPEVESSPELAPPPACPSESPVPIAPTAQPEELLNGAPSPPAVDLSPVSEPEEQAKEVTASMAPPTIPSATPATAPSATSPAQEEEMEEEEEEEEGEAGEAGEAESEKGGEELLPPESTPIPANLSQNLEAAAATQVAVSVPKRRRKIKELNKKEAVGDLLDAFKEANPAVPEVENQPPAGSNPGPESEGSGVPPRPEEADETWDSKEDKIHNAENIQPGEQKYEYKSDQWKPLNLEEKKRYDREFLLGFQFIFASMQKPEGLPHISDVVLDKANKTPLRPLDPTRLQGINCGPDFTPSFANLGRTTLSTRGPPRGGPGGELPRGPQAGLGPRRSQQGPRKEPRKIIATVLMTEDIKLNKAEKAWKPSSKRTAADKDRGEEDADGSKTQDLFRRVRSILNKLTPQMFQQLMKQVTQLAIDTEERLKGVIDLIFEKAISEPNFSVAYANMCRCLMALKVPTTEK

SEQ ID NO: 13638 - protein, 929 aa, Homo sapiens
MKKMSRNVLLQMEEEEDDDDGDIVLENLGQTIVPDLGSLESQHDFRTPEFEEFNGKPDSLFFNDGQRRIDFVLVYEDESRKETNKKGTNEKQRRKRQAYESNLICHGLQLEATRSVLDDKLVFVKVHAPWEVLCTYAEIMHIKLPLKPNDLKNRSSAFGTLNWFTKVLSVDESIIKPEQEFFTAPFEKNRMNDFYIVDRDAFFNPATRSRIVYFILSRVKYQVINNVSKFGINRLVNSGIYKAAFPLHDCKFRRQSEDPSCPNERYLLYREWAHPRSIYKKQPLDLIRKYYGEKIGIYFAWLGYYTQMLLLAAVVGVACFLYGYLNQDNCTWSKEVCHPDIGGKIIMCPQCDRLCPFWKLNITCESSKKLCIFDSFGTLVFAVFMGVWVTLFLEFWKRRQAELEYEWDTVELQQEEQARPEYEARCTHVVINEITQEEERIPFTAWGKCIRITLCASAVFFWILLIIASVIGIIVYRLSVFIVFSAKLPKNINGTDPIQKYLTPQTATSITASIISFIIIMILNTIYEKVAIMITNFELPRTQTDYENSLTMKMFLFQFVNYYSSCFYIAFFKGKFVGYPGDPVYWLGKYRNEECDPGGCLLELTTQLTIIMGGKAIWNNIQEVLLPWIMNLIGRFHRVSGSEKITPRWEQDYHLQPMGKLGLFYEYLEMIIQFGFVTLFVASFPLAPLLALVNNILEIRVDAWKLTTQFRRLVPEKAQDIGAWQPIMQGIAILAVVTNAMIIAFTSDMIPRLVYYWSFSVPPYGDHTSYTMEGYINNTLSIFKVADFKNKSKGNPYSDLGNHTTCRYRDFRYPPGHPQEYKHNIYYWHVIAAKLAFIIVMEYLALLPRLGHSGMILAHCNLRLPVDCCMCYRFVDEIRLLEQLTSDFIDSLYYIFSISIISIFFSVTFFFLLLSLGPTPCFSVSNFLS

SEQ ID NO: 13639 - protein, 402 aa, Homo sapiens
MYNTVWSMDRDDADWREVMMPYSTELIFYIEMDPPALPPKPPKPMTSAVPNGMKDSSVSLQDAEWYWGDISREEVNDKLRDMPDGTFLVRDASTKMQGDYTLTLRKGGNNKLIKIYHRDGKYGFSDPLTFNSVVELINHYHHESLAQYNPKLDVKLMYPVSRYQQDQLVKEDNIDAVGKKLQEYHSQYQEKSKEYDRLYEEYTRTSQEIQMKRTAIEAFNETIKIFEEQCHTQEQHSKEYIERFRREGNEKEIERWLNHKGVRQKRLNVWLGIKNEDADENYFINEEDENLPHYDEKTWFVEDINRVQAEDLLYGKPDGAFLIRESSKKGCYACSVVADGEVKHCVIYSTARGYGFAEPYNLYSSLKELVLHYQQTSLVQHNDSLNVRLAYPVHAQMPSLCR

SEQ ID NO: 13640 - protein, 517 aa, Homo sapiens
MAAPEQPLAISRGCTSSSSLSPPRGDRTLLVRHLPAELTAEEKEDLLKYFGAQSVRVLSDKGRLKHTAFATFPNEKAAIKALTRLHQLKLLGHTLVVEFAKEQDRVHSPCPTSGSEKKKRSDDPVEDDKEKKELGYLTVENGIAPNHGLTFPLNSCLKYMYPPPSSTILANIVNALASVPKFYVQVLHLMNKMNLPTPFGPITARPPMYEDYMPLHAPLPPTSPQPPEEPPLPDEDEELSSEESEYESTDDEDRQRMNKLMELANLQPKRPKTIKQRHVRKKRKIKDMLNTPLCPSHSSLHPVLLPSDVFDQPQPVGNKRIEFHISTDMPAAFKKDLEKEQNCEEKNHDLPATEVDASNIGFGKIFPKPNLDITEEIKEDSDEMPSECISRRELEKGRISREEMETLSVFRSYEPGEPNCRIYVKNLAKHVQEKDLKYIFGRYVDFSSETQRIMFDIRLMKEGRMKGQAFIGLPNEKAAAKALKEANGYVLFGKPMVVQFARSARPKQDPKEGKRKC

SEQ ID NO: 13641 - protein, 478 aa, Homo sapiens
MADGVDHIDIYADVGEEFNQEAEYGGHDQIDLYDDVISPSANNGDAPEDRDYMDTLPPTVGDDVGKGAAPNVVYTYTGKRIALYIGNLTWWTTDEDLTEAVHSLGVNDILEIKFFENRANGQSKGFALVGVGSEASSKKLMDLLPKRELHGQNPVVTPCNKQFLSQFEMQSRKTTQSGQMSGEGKAGPPGAGPPNRGDRPPPPVLFPGQPFGQPPLGPLPPGPPPPVPGYGPPPGPPPPQQGPPPPPGPFPPRPPGPLGPPLTLAPPPHLPGPPPGAPPPAPHVNPAFFPPPTNSGMPTSDSRGPPPTDPYGRPPPYDRGDYGPPGREMDTARTPLSEAEFEEIMNRNRAISSSAISRAVSDASAGDYGSAIETLVTAISLIKQSKVSADDRCKVLISSLQDCLHGIESKSYGSGSRRERSRERDHSRSREKSRRHKSRSRDRHDDYYRERSRERERHRDRDRDRDRERDREREYRHR

SEQ ID NO: 13642 - protein, 1435 aa, Homo sapiens
MREKGRRKKGRTWAEAAKTVLEKYPNTPMSHKEILQVIQREGLKEIRSGTSPLACLNAMLHTNSRGEEGIFYKVPGRMGVYTLKKDVPDGVKELSEGSEESSDGQSDSQSSENSSSSSDGGSNKEGKKSRWKRKVSSSSPQSGCPSPTIPAGKVISPSQKHSKKALKQALKQQQQKKQQQQCRPSISISSNQHLSLKTVKAASDSVPAKPATWEGKQSDGQTGSPQNSNSSFSSSVKVENTLLGLGKKSFQRSERLHTRQMKRTKCADIDVETPDSILVNTNLRALINKHTFSVLPGDCQQRLLLLLPEVDRQVGPDGLMKLNGSALNNEFFTSAAQGWKERLSEGEFTPEMQVRIRQEIEKEKKVEPWKEQFFESYYGQSSGLSLEDSKKLTASPSDPKVKKTPAEQPKSMPVSEASLIRIVPVVSQSECKEEALQMSSPGRKEECESQGEVQPNFSTSSEPLLSSALNTHELSSILPIKCPKDEDLLEQKPVTSAEQESEKNHLTTASNYNKSESQESLVTSPSKPKSPGVEKPIVKPTAGAGPQETNMKEPLATLVDQSPESLKRKSSLTQEEAPVSWEKRPRVTENRQHQQPFQVSPQPFLNRGDRIQVRKVPPLKIPVSRISPMPFHPSQVSPRARFPVSITSPNRTGARTLADIKAKAQLVKAQRAAAAAAAAAAAAASVGGTIPGPGPGGGQGPGEGGEGQTARGGSPGSDRVSETGKGPTLELAGTGSRGGTRELLPCGPETQPQSETKTTPSQAQPHSVSGAQLQQTPPVPPTPAVSGACTSVPSPAHIEKLDNEKLNPTRATATVASVSHPQGPSSCRQEKAPSPTGPALISGASPVHCAADGTVELKAGPSKNIPNPSASSKTDASVPVAVTPSPLTSLLTTATLEKLPVPQVSATTAPAGSAPPSSTLPAASSLKTPGTSLNMNGPTLRPTSSIPANNPLVTQLLQGKDVPMEQILPKPLTKVEMKTVPLTAKEERGMGALIATNTTENSTREEVNERQSHPATQQQLGKTLQSKQLPQVPRPLQLFSAKELRDSSIDTHQYHEGLSKATQDQILQTLIQRVRRQNLLSVVPPSQFNFAHSGFQLEDISTSQRFMLGFAGRRTSKPAMAGHYLLNISTYGRGSESFRRTHSVNPEDRFCLSSPTEALKMGYTDCKNATGESSSSKEDDTDEESTGDEQESVTVKEEPQVSQSAGKGDTSSGPHSRETLSTSDCLASKNVKAEIPLNEQTTLSKENYLFTRGQTFDEKTLARDLIQAAQKQMAHAVRGKAIRSSPELFSSTVLPLPADSPTHQPLLLPPLQTPKLYGSPTQIGPSYRGMINVSTSSDMDHNSAVPGSQVSSNVGDVMSFSVTVTTIPASQAMNPSSHGQTIPVQAFSEENSIEGTPSKCYCRLKAMIMCKGCGAFCHDDCIGPSKLCVSCLVVR

SEQ ID NO: 13643 - protein, 1167 aa, Homo sapiens
MEQDRTNHVEGNRLSPFLIPSPPICQTEPLATKLQNGSPLPERAHPEVNGDTKWHSFKSYYGIPCMKGSQNSRVSPDFTQESRGYSKCLQNGGIKRTVSEPSLSGLLQIKKLKQDQKANGERRNFGVSQERNPGESSQPNVSDLSDKKESVSSVAQENAVKDFTSFSTHNCSGPENPELQILNEQEGKSANYHDKNIVLLKNKAVLMPNGATVSASSVEHTHGELLEKTLSQYYPDCVSIAVQKTTSHINAINSQATNELSCEITHPSHTSGQINSAQTSNSELPPKPAAVVSEACDADDADNASKLAAMLNTCSFQKPEQLQQQKSVFEICPSPAENNIQGTTKLASGEEFCSGSSSNLQAPGGSSERYLKQNEMNGAYFKQSSVFTKDSFSATTTPPPPSQLLLSPPPPLPQVPQLPSEGKSTLNGGVLEEHHHYPNQSNTTLLREVKIEGKPEAPPSQSPNPSTHVCSPSPMLSERPQNNCVNRNDIQTAGTMTVPLCSEKTRPMSEHLKHNPPIFGSSGELQDNCQQLMRNKEQEILKGRDKEQTRDLVPPTQHYLKPGWIELKAPRFHQAESHLKRNEASLPSILQYQPNLSNQMTSKQYTGNSNMPGGLPRQAYTQKTTQLEHKSQMYQVEMNQGQSQGTVDQHLQFQKPSHQVHFSKTDHLPKAHVQSLCGTRFHFQQRADSQTEKLMSPVLKQHLNQQASETEPFSNSHLLQHKPHKQAAQTQPSQSSHLPQNQQQQQKLQIKNKEEILQTFPHPQSNNDQQREGSFFGQTKVEECFHGENQYSKSSEFETHNVQMGLEEVQNINRRNSPYSQTMKSSACKIQVSCSNNTHLVSENKEQTTHPELFAGNKTQNLHHMQYFPNNVIPKQDLLHRCFQEQEQKSQQASVLQGYKNRNQDMSGQQAAQLAQQRYLIHNHANVFPVPDQGGSHTQTPPQKDTQKHAALRWHLLQKQEQQQTQQPQTESCHSQMHRPIKVEPGCKPHACMHTAPPENKTWKKVTKQENPPASCDNVQQKSIIETMEQHLKQFHAKSLFDHKALTLKSQKQVKVEMSGPVTVLTRQTTAAELDSHTPALEQQTTSSEKTPTKRTAASVLNNFIESPSKLLDTPIKNLLDTPVKTQYDFPSCRCVEQIIEKDEGPFYTHLGAGPNVAAIREIMEER

SEQ ID NO: 13644 - protein, 1167 aa, Homo sapiens
MQYDEDDDEITPDLWQEACWIVISSYFDEKGLVRQQLDSFDEFIQMSVQRIVEDAPPIDLQAEAQHASGEVEEPPRYLLKFEQIYLSKPTHWERDGAPSPMMPNEARLRNLTYSAPLYVDITKTVIKEGEEQLQTQHQKTFIGKIPIMLRSTYCLLNGLTDRDLCELNECPLDPGGYFIINGSEKVLIAQEKMATNTVYVFAKKDSKYAYTGECRSCLENSSRPTSTIWVSMLARGGQGAKKSAIGQRIVATLPYIKQEVPIIIVFRALGFVSDRDILEHIIYDFEDPEMMEMVKPSLDEAFVIQEQNVALNFIGSRGAKPGVTKEKRIKYAKEVLQKEMLPHVGVSDFCETKKAYFLGYMVHRLLLAALGRRELDDRDHYGNKRLDLAGPLLAFLFRGMFKNLLKEVRIYAQKFIDRGKDFNLELAIKTRIISDGLKYSLATGNWGDQKKAHQARAGVSQVLNRLTFASTLSHLRRLNSPIGRDGKLAKPRQLHNTLWGMVCPAETPEGHAVGLVKNLALMAYISVGSQPSPILEFLEEWSMENLEEISPAAIADATKIFVNGCWVGIHKDPEQLMNTLRKLRRQMDIIVSEVSMIRDIREREIRIYTDAGRICRPLLIVEKQKLLLKKRHIDQLKEREYNNYSWQDLVASGVVEYIDTLEEETVMLAMTPDDLQEKEVAYCSTYTHCEIHPSMILGVCASIIPFPDHNQSPRNTYQSAMGKQAMGVYITNFHVRMDTLAHVLYYPQKPLVTTRSMEYLRFRELPAGINSIVAIASYTGYNQEDSVIMNRSAVDRGFFRSVFYRSYKEQESKKGFDQEEVFEKPTRETCQGMRHAIYDKLDDDGLIAPGVRVSGDDVIIGKTVTLPENEDELESTNRRYTKRDCSTFLRTSETGIVDQVMVTLNQEGYKFCKIRVRSVRIPQIGDKFASRHGQKGTCGIQYRQEDMPFTCEGITPDIIINPHAIPSRMTIGHLIECLQGKVSANKGEIGDATPFNDAVNVQKISNLLSDYGYHLRGNEVLYNGFTGRKITSQIFIGPTYYQRLKHMVDDKIHSRARGPIQILNRQPMEGRSRDGGLRFGEMERDCQIAHGAAQFLRERLFEASDPYQVHVCNLCGIMAIANTRTHTYECRGCRNKTQISLVRMPYACKLLFQELMSMSIAPRMMSV

SEQ ID NO: 13645 - protein, 308 aa, Homo sapiens
MVGGLPGNVSQHLDFGSSLEQPQGHWIIKTKSKRRHFTDTSARHHEAYEVKNGEKFEKLGKNISVSTQLTTNQTNPSGQISYECGQCGRYFIQMADFHRHEKCHTGEKSFECKECGKYFRYNSLLIRHQIIHTGKKPFKCKECGKGLSSDTALIQHQRIHTGEKPYECKECGKAFSSSSVFLQHQRFHTGEKLYECNECWKTFSCSSSFTVHQRMHTGEKPYECKECGKRLSSNTALTQHQRIHTGEKPFECKECGKAFNQKITLIQHQRVHTGEKPYECKVCGKTFSWCGRFILHQKLHTQKTPVQA

SEQ ID NO: 13646 - protein, 960 aa, Homo sapiens
MEVQVSQASLGFELTSVEKSLREWSRLSREVIAWLCPSSPNFILNFPPPPSASSVSMVQLFSSPFGYQSPSGHSEEEREGNMKSAKPQVNHSQHGESQRALSPLQSTLSSAASPSQAYETYIENGLICLKHKIRNIEKKKLKLEDYKDRLKSGEHLNPDQLEAVEKYEEVLHNLEFAKELQKTFSGLSLDLLKAQKKAQRREHMLKLEAEKKKLRTILQVQYVLQNLTQEHVQKDFKGGLNGAVYLPSKELDYLIKFSKLTCPERNESLSVEDQMEQSSLYFWDLLEGSEKAVVGTTYKHLKDLLSKLLNSGYFESIPVPKNAKEKEVPLEEEMLIQSEKKTQLSKTESVKESESLMEFAQPEIQPQEFLNRRYMTEVDYSNKQGEEQPWEADYARKPNLPKRWDMLTEPDGQEKKQESFKSWEASGKHQEVSKPAVSLEQRKQDTSKLRSTLPEEQKKQEISKSKPSPSQWKQDTPKSKAGYVQEEQKKQETPKLWPVQLQKEQDPKKQTPKSWTPSMQSEQNTTKSWTTPMCEEQDSKQPETPKSWENNVESQKHSLTSQSQISPKSWGVATASLIPNDQLLPRKLNTEPKDVPKPVHQPVGSSSTLPKDPVLRKEKLQDLMTQIQGTCNFMQESVLDFDKPSSAIPTSQPPSATPGSPVASKEQNLSSQSDFLQEPLQATSSPVTCSSNACLVTTDQASSGSETEFMTSETPEAAIPPGKQPSSLASPNPPMAKGSEQGFQSPPASSSSVTINTAPFQAMQTVFNVNAPLPPRKEQEIKESPYSPGYNQSFTTASTQTPPQCQLPSIHVEQTVHSQETANYHPDGTIQVSNGSLAFYPAQTNVFPRPTQPFVNSRGSVRGCTRGGRLITNSYRSPGGYKGFDTYRGLPSISNGNYSQLQFQAREYSGAPYSQRDNFQQCYKRGGTSGGPRANSRANCFIMRNSLLLIKQQGGVILLR

SEQ ID NO: 13647 - protein, 631 aa, Homo sapiens
MESYHKPDQQKLQALKDTANRLRISSIQATTAAGSGHPTSCCSAAEIMAVLFFHTMRYKSQDPRNPHNDRFVLSKGHAAPILYAVWAEAGFLAEAELLNLRKISSDLDGHPVPKQAFTDVATGSLGQGLGAACGMAYTGKYFDKASLPSSWDYSYRVYCLLGDGELSEGSVWEAMAFASIYKLDNLVAILDINRLGQSDPAPLQHQMDIYQKRCEAFGWHAIIVDGHSVEELCKAFGQAKHQPTAIIAKTFKGRGITGVEDKESWHGKPLPKNMAEQIIQEIYSQIQSKKKILATPPQEDAPSVDIANIRMPSLPSYKVGDKIATRKAYGQALAKLGHASDRIIALDGDTKNSTFSEIFKKEHPDRFIECYIAEQNMVSIAVGCATRNRTVPFCSTFAAFFTRAFDQIRMAAISESNINLCGSHCGVSIGEDGPSQMALEDLAMFRSVPTSTVFYPSDGVATEKAVELAANTKGICFIRTSRPENAIIYNNNEDFQVGQAKVVLKSKDDQVTVIGAGVTLHEALAAAELLKKEKINIRVLDPFTIKPLDRKLILDSARATKGRILTVEDHYYEGGIGEAVSSAVVGEPGITVTHLAVNRVPRSGKPAELLKMFGIDRDAIAQAVRGLITKA

SEQ ID NO: 13648 - protein, 170 aa, Homo sapiens
MLPPQKKPWESMAKGLVLGALFTSFLLLVYSYAVPPLHAGLASTTPEAAASCSPPALEPEAVIRANGSAGECQPRRNIVFLKTHKTASSTLLNILFRFGQKHRLKFAFPNGRNDFDYPTFFARSLVQDYRPGACFNIICNHMRFHYDEVRGLVPTNAIFITVLRDPARLF

SEQ ID NO: 13649 - protein, 295 aa, Homo sapiens
MSKVSTMFSEDDFQSTERAPYGPQLQWSQDLPRVQVFREQANLEDRSPRRTQRITGGEQVLWGPITQIFPTVRPADLTRVIMPLEQRSQHCKPEEGLQAQEEDLGLVGAQALQAEEQEAAFFSSTLNVGTLEELPAAESPSPPQSPQEESFSPTAMDAIFGSLSDEGSGSQEKEGPSTSPDLIDPESFSQDILHDKIIDLVHLLLRKYRVKGLITKAEMLGSVIKNYEDYFPEIFREASVCMQLLFGIDVKEVDPTSHSYVLVTSLNLSYDGIQCNEQSMPKSGLLIIVLGVIFM

SEQ ID NO: 13650 - protein, 552 aa, Homo sapiens
MDTSSEMLVRFGRRCGRAKESTEIRNSEEDQVLYLPLLPSKVDLQQVTIIPHDEWKRIQDSLDRLTREAACLRAERKAKKEMHLRSQEVVKHWTNTYAGMKEQKLEAKKKRDEEIEAERQILDLEEEIYKQGKRKKAIENAKQYQFYQTERVKNFHSGLLLSRVMKERDAQIEFRKSKIKSDKKWEEQLKLNIEKAFKEEQEKAEKRHRERVALAKDHLKQIKEHEEEEERRKKYEEKDAEEIKRQNALYEIEMRKKLEKKREEMHESRRRFLEHMQDKHIIKAVEQQQQEEEDEKMRKFIKAKKRLIQMGKEKEAETHRLMEKRRERIHNFLSELLKEKLDNEDMIIARDIAEAEAEWEKREREKDEKNKAELKTIAEYRAIVMKNKEEEERQRKIEAKEQLLAVMKADQIFWEHEKEKKCKADKEHQEVQDAHIQQMAKNKFNAKQAKQAELDYCRLTEALVAEKEKEFQDYAREVIELESETTNKYIYPLVKAVQEGPGGGRGPVFVDRGGLRPSYQANDVTGVQLPFYNSQGPKYNFQKSKRRLGFTW

SEQ ID NO: 13651 - protein, 585 aa, Homo sapiens
MDALLGTGPRRARGCLGAAGPTSSGRAARTPAAPWARFSAWLECVCVVTFDLELGQALELVYPNDFRLTDKEKSSICYLSFPDSHSGCLGDTQFSFRMRQCGGQRSPWHADDRHYNSRAPVALQREPAHYFGYVYFRQVKDSSVKRGYFQKSLVLVSRLPFVRLFQALLSLIAPEYFDKLAPCLEAVCSEIDQWPAPAPGQTLNLPVMGVVVQVRIPSRVDKSESSPPKQFDQENLLPAPVVLASVHELDLFRCFRPVLTHMQTLWELMLLGEPLLVLAPSPDVSSEMVLALTSCLQPLRFCCDFRPYFTIHDSEFKEFTTRTQAPPNVVLGVTNPFFIKTLQHWPHILRVGEPKMSGDLPKQVKLKKPSRLKTLDTKPGLYTAYTAHLHRDKALLKRLLKGVQKKRPSDVQSALLRRHLLELTQSFIIPLEHYMASLMPLQKSITPWKTPPQIQPFSQDDFLRSLEHAGPQLTCILKGDWLGLYRRFFKSPHFDGWYRQRHKEMALKLEALHLEAICEANIETWMKDKSEVEVVDLVLKLREKLVRAQGHQLPVKEATLQRAQLYIETVIGSLPKDLQAVLCPP

SEQ ID NO: 13652 - protein, 405 aa, Homo sapiens
MMGKLPLGVVSPYVKMSSGGYTDPLKFYATSYCTAYGREDFKPRVGSHVGTGYKSNFQPVVSCQASLEALDNPARGEQAQDHFQSVASQSYRPLEVPDGKHPLPWSMRQTSSGYGREKPSAGPPTKEVRKVHFDTQEHGPQAITGLEPREVPLLHQQQGQDPLERENFRHGPRFMTSEYNSKYLRDPLDQPDFLQKKSIGAKEGSGFTKQSHQSPIVFQPPSQALPGDPGDEFLPVLARGSKRETAFSRGNERILNPRVPPPCPEPSSVSHQQFQPLHRMQQTNVALLGRETVGKKEPTGFSLNNPMYVRSPCDPDRDQRYLTTYNQGYFENIPKGLDQEGWTRGGIQPQMPGGYALSQPVSCMEATPNPMESLRHLHPHVGRTLTSADPFYQNTPHSSRCVAHS

SEQ ID NO: 13653 - protein, 331 aa, Homo sapiens
GLLGALHLVMTLVVAAARAEKEAFVQSESIIEVLRFDDGGLLQTETTLGLSSYQQKSISLYRGNCRPIRFEPPMLDFHEQPVGMPKMEKVYLHNPSSEETITLVSISATTSHFHASFFQNRKILPGGNTSFDVVFLARVVGNVENTLFINTSNHGVFTYQVFGVGVPNPYRLRPFLGARVPVNSSFSPIINIHNPHSEPLQVVEMYSSGGDLHLELPTGQQGGTRKLWEIPPYETKGVMRASFSSREADNHTAFIRIKTNASDSTEFIILPVEVEVTTAPGIYSSTEMLDFGTLRTQDLPKVLNLHLLNSGTKDVPITHRRQKSHLSFLGK

SEQ ID NO: 13654 - protein, 200 aa, Homo sapiens
MAQALLVPPGPESFRLFTRESLAAIEKRAAEEKAKKPKKEQDNDDENKPKPNSDLEAGKNLPFIYGDIPPEMVSEPLEDLDPYYINKKTFIVMNKGKAIFRFSATSALYILTPLNPVRKIAIKILVHSLFSMLIMCTILTNCVFMTLSNPPDWTKNVEYTFTGIYTFESLIKILARGFCLEDFTFLRDPWNWLDFSVIVM

SEQ ID NO: 13655 - protein, 265 aa, Homo sapiens
MDLIDILWRQDIDLGVSREVFDFSQRRKEYELEKQKKLEKERQEQLQKEQEKAFFAQLQLDEETAEFNDSDSGISLNTSPSVASPEHSVESSSYGDTLLGLSDSEVEELDSAPGSVKQNGPKTPVHSSGDMVQPLSPSQGQSTHVHDAQCENTPEKELPVSPGHRKTPFTKDKHSSRLEAHLTRDELRAKALHIPFPVEKIINLPVVDFNEMMSKEQFNEAQLALIRDIRRRGKNKVAAQNCRKRKLENIVELEQDLDHLKDEKE

SEQ ID NO: 13656 - protein, 604 aa, Homo sapiens
MLGMNMLLITLFLLLPLSMLKGEPWEGCLHCTHTTWSGNIMTKTLLYHTYYECAGTCLGTCTHNQTTYSVCDPGRGQPYVCYDPKSSPGTWFEIHVGSKEGDLLNQTKVFPSGKDVVSLYFDVCQIVSMGSLFPVIFSSMEYYSSCHKNRYAHPACSTDSPVTTCWDCTTWSTNQQSLGPIMLTKIPLEPDCKTSTCNSVNLTILEPDQPIWTTGLKAPLGARVSGEEIGPGAYVYLYIIKKTRTRSTQQFRVFESFYEHVNQKLPEPPPLASNLFAQLAENIASSLHVASCYVCGGMNMGDQWPWEARELMPQDNFTLTASSLEPAPSSQSIWFLKTSIIGKFCIARWGKAFTDPVGELTCLGQQYYNETLGKTLWRGKSNNSESPHPSPFSRFPSLNHSWYQLEAPNTWQAPSGLYWICGPQAYRQLPAKWSGACVLGTIRPSFFLMPLKQGEALGYPIYDETKRKSKRGITIGDWKDNEWPPERIIQYYGPATWAEDGMWGYRTPVYMLNRIIRLQAVLEIITNETAGALNLLAQQATKMRNVIYQNRLALDYLLAQEEGVCGKFNLTNCCLELDDEGKVIKEITAKIQKLAHIPVQTWKG

SEQ ID NO: 13657 - protein, 594 aa, Homo sapiens
MRGEQGAAGARVLQFTNCRILRGGKLLREDLWVRGGRILDPEKLFFEERRVADERRDCGGRILAPGFIDVQINGGFGVDFSQATEDVGSGVALVARRILSHGVTSFCPTLVTSPPEVYHKVVPQIPVKSGGPHGAGVLGLHLEGPFISREKRGAHPEAHLRSFEADAFQDLLATYGPLDNVRIVTLAPELGRSHEVIRALTARGICVSLGHSVADLRAAEDAVWSGATFITHLFNAMLPFHHRDPGIVGLLTSDRLPAGRCIFYGMIADGTHTNPAALRIAHRAHPQGLVLVTDAIPALGLGNGRHTLGQQEVEVDGLTAYVAGERPDPLGPRSQPACQVAHDPPRACPLCSQGTKTLSGSIAPMDVCVRHFLQATGCSMESALEAASLHPAQLLGLEKSKGTLDFGADADFVVLDDSLHVQATYISGPVLAGCGDPAWCWRAVWEAPVCPAHPISVILPSSVSPWPWHTPMWQTRAVRLPEQLRGGWASGALLALRTATVGSDVRDWCSPTSGVIVLTFSPFEFWGGWLPSPLLTGAVLGTGGTRLALPLFSSLCCKAQLRKCLQVQRDRMVWAPPVGREQPGKNHLPGQGLA

SEQ ID NO: 13658 - protein, 660 aa, Homo sapiens
MLLCRAHRVLGLRGARELAVTMAMRELVEAECGGANPLMKLAGHFTQDKALRQEGLRPGPWPPGAPASEAASKPLGVASEDELVAEFLQDQNAPLVSRAPQTFKMDDLLAEMQQIEQSNFRQAPQRAPGVADLALSENWAQEFLAAGDAVDVTQDYNETDWSQEFISEVTDPLSVSPARWAEEYLEQSEEKLWLGEPEGTATDRWYDEYHPEEDLQHTASDFVAKVDDPKLANSEFLKFVRQIGEGQVSLESGAGSGRAQAEQWAAEFIQQQGTSDAWVDQFTRPVNTSALDMEFERAKSAIESDVDFWDKLQAELEEMAKRDAEAHPWLSDYDDLTSATYDKGYQFEEENPLRDHPQPFEEGLRRLQEGDLPNAVLLFEAAVQQDPKHMEAWQYLGTTQAENEQELLAISALRRCLELKPDNQTALMALAVSFTNESLQRQACETLRDWLRYTPAYAHLVTPAEEGAGGAGLGPSKRILGSLLSDSLFLEVKELFLAAVRLDPTSIDPDVQCGLGVLFNLSGEYDKAVDCFTAALSVRPNDYLLWNKLGATLANGNQSEEAVAAYRRALELQPGYIRSRYNLGISCINLGAHREAVEHFLEALNMQRKSRGPRGEGGAMSENIWSTLRLALSMLGQSDAYGAADARDLSTLLTMFGLPQ

SEQ ID NO: 13659 - protein, 1108 aa, Homo sapiens
MKVTNYNTVVETNSDSDDEDKLHIVEEESVTDAADCEGVPEDDLPTDQTVLPGRSSEREGNAKNCWEDDTGKEGQEILGPEAQADEAGCTVKDDECESDAENEQNHDPNVEEFLQQQDTAVIFPEAPEEDQRQGTPEASGHDENGTPDAFSQLLTCPYCDRGYKRFTSLKEHIKYRHEKNEDNFSCSLCSYTFAYRTQLERHMTSHKSGRDQRHVTQSGCNRKFKCTECGKAFKYKHHLKEHLRIHSGEKPYECPNCKKRFSHSGSYSSHISSKKCISLIPVNGRPRTGLKTSQCSSPSLSASPGSPTRPQIRQKIENKPLQEQLSVNQIKTEPVDYEFKPIVVASGINCSTPLQNGVFTGGGPLQATSSPQGMVQAVVLPTVGLVSPISINLSDIQNVLKVAVDGNVIRQVLENNQANLASKEQETINASPIQQGGHSVISAISLPLVDQDGTTKIIINYSLEQPSQLQVVPQNLKKENPVATNSCKSEKLPEDLTVKSEKDKSFEGGVNDSTCLLCDDCPGDINALPELKHYDLKQPTQPPPLPAAEAEKPESSVSSATGDGNLSPSQPPLKNLLSLLKAYYALNAQPSAEELSKIADSVNLPLDVVKKWFEKMQAGQISVQSSEPSSPEPGKVNIPAKNNDQPQSANANEPQDSTVNLQSPLKMTNSPVLPVGSTTNGSRSSTPSPSPLNLSSSRNTQGYLYTAEGAQEEPQVEPLDLSLPKQQGELLERSTITSVYQNSVYSVQEEPLNLSCAKKEPQKDSCVTDSEPVVNVIPPSANPINIAIPTVTAQLPTIVAIADQNSVPCLRALAANKQTILIPQVAYTYSTTVSPAVQEPPLKVIQPNGNQDERQDTSSEGVSNVEDQNDSDSTPPKKKMRKTENGMYACDLCDKIFQKSSSLLRHKYEHTGKRPHECGICKKAFKHKHHLIEHMRLHSGEKPYQCDKCGKRFSHSGSYSQHMNHRYSYCKREAEERDSTEQEEAGPEILSNEHVGARASPSQGDSDERESLTREEDEDSEKEEEEEDKEMEELQEEKECEKPQGDEEEEEEEEEVEEEEVEEAENEGEEAKTEGLMKDDRAESQASSLGQKVGESSEQVSEEKTNEA

SEQ ID NO: 13660 - protein, 692 aa, Homo sapiens
MLDSCKLKSACNLPFICNKKIINTAGTSNAEVPLADPGMYQLDITLRRGQSLAARDRGGTSDPYVKFKIGGKEVFRSKIIHKNLNPVWEEKACILVDHLREPLYIKVFDYDFGLQDDFMGSAFLDLTQLELNRPTDVTLTLKDPHYPDHDLGIILLSVILTPKEGESRDVTMLMRKSWKRSSKFQTQSLRLSDLHRKSHLWRGIVSITLIEGRDLKAMDSNGLSDPYVKFRLGHQKYKSKIMPKTLNPQWREQFDFHLYEERGGVIDITAWDKDAGKRDDFIGRCQVDLSALSREQTHKLELQLEEGEGHLVLLVTLTASATVSISDLSVNSLEDQKEREEILKRYSPLRIFHNLKDVGFLQVKVIRAEGLMAADVTGKSDPFCVVELNNDRLLTHTVYKNLNPEWNKVFTFNIKDIHSVLEVTVYDEDRDRSADFLGKVAIPLLSIQNGEQKAYVLKNKQLTGPTKGVIYLEIDVIFNAVKASLRTLIPKEQKYIEEENRLSKQLLLRNFIRMKRCVMVLVNAAYYVNSCFDWDSPPRSLAAFVVVEDMLEDEEEEDDKDDKDSEKKGFINKIYAIQEVCVSVQNILDEVASFGERIKNTFNWTVPFLSWLAIVALCVFTAILYCIPLRYIVLVWGINKFTKKLRSPYAIDNNELLDFLSRVPSDVQVVQYQELKPDPSHSPYKRKKNNLG

SEQ ID NO: 13661 - protein, 833 aa, Homo sapiens
MVHGSVTFRDVAIDFSQEEWECLQPDQRTLYRDVMLENYSHLISLGSSISKPDVITLLEQEKEPWIVVSKETSRWYPDLESKYGPEKISPENDIFEINLPKHVIKQISKTLGLEAFYFRNDSEYRSRFEGRQGHQEGYINQKIISYEEMPAYTHASPIHNTHKPYECKECGKYFSCGSNLIQHQSIHTGEKPYKCKECGKAFQLHIQLTRHQKFHTGEKTFECKECGKAFNLPTQLNRHKNIHTVKKLFECKECGKSFNRSSNLTQHQSIHAGVKPYQCKECGKAFNRGSNLIQHQKIHSNEKPFVCRECEMAFRYHYQLIEHCRIHTGEKPFECKECRKAFTLLTKLVRHQKIHMGEKPFECRECGKAFSLLNQLNRHKNIHTGEKPFECKECGKSFNRSSNLIQHQSIHADVKPYECKECGKGFNRGANLIQHQKIHSNEKPFVCRECEMAFRYHYQLIQHCQIHTGGKPFECKECGKAFSLLTQLARHKNIHTGEKPFECKDCGKAFNRGSNLVQHQSIHTGEKPYECKECGKAFRLHLQLSQHEKTHTGEKPFECKECGKFFRRGSNLNQHRSIHTGKKPFECKECGKAFRLHMHLIRHQKFHTGEKPFECKECGKAFSLHTQLNHHKNIHTGEKPFKCKECGKSFNRVSNLVQHQSIHAGVKPYECKECGKGFSRVSNLIQHQKTHSSAKPFVCKECRKTFRYHYQLTEHYRIHTGEKPFECKECGKAFGLLTQLAQHQIIHTGEKPFKCKECGKAFNRGSNLVQPQSIHTGEKPYECKECGKAFRLHLQLSLHQKLVQVRNPLNVRNVGQPSDISSNLLNIRKFILG

SEQ ID NO: 13662 - protein, 526 aa, Homo sapiens
MPPKKKPQLPPKPAHLTQSHPPQRLPKPLPLSPSFSSEVGQREHQRGERDTAIPQPAKVPTTVDQGHIPLARCPSGHSQPSLQHGLSTTAPRPTKNQATGSNAQSSEPPKLNALNHDPTSPQWGPGPSGEQPMEGSHQGAPESPDSLQRNQKELQGLLNQVQALEKEAASSVDVQALRRLFEAVPQLGGAAPQAPAAHQKPEASVEQAFGELTRVSTEVAQLKEQTLARLLDIEEAVHKALSSMSSLQPEASARGHFQGPPKDHSAHKISVTVSSSARPSGSGQEVGGQTAVKNQAKVECHTEAQSQVKIRNHTEARGHTASTAPSTRRQETSREYLCPPRVLPSSRDSPSSPTFISIQSATRKPLETPSFKGNPDVSVKSTQLAQDIGQALLHQKGVQDKTGKKDITQCSVQPEPAPPSASPLPRGWQKSVLELQTGPGSSQHYGAMRTVTEQYEEVDQFGNTVLMSSTTVTEQAEPPRNPGSHLGLHASPLLRQFLHSPAGFSSDLTEAETVQVSCSYSQPAAQ

SEQ ID NO: 13663 - protein, 257 aa, Homo sapiens
SLETGVGDQCRKEFTDLMTEMTDLSSDLEGSGIPFLDYRTYAERAFFPGHGGCPLQPKPEGPGEDGHCATVRQGLTQLSNLLNSKLFLLTLIHTLEEQPSFSQRDRCHVASLLSLALHGKLEYLTDIMRTLLGDLAAHYVHRNPKLMLRRTETMVEKLLTNWLSICLYAFLREVAGEPLYMLFRAIQYQVDKGPVDAVTEWRSGLAGHLTLSDEDLTSVTQNHWKRLNTLQHYKVPDGATVGLVPQLHRGSTISQSL

SEQ ID NO: 13664 - protein, 187 aa, Homo sapiens
HLVSSHHELAVLFRTDHGISSGGFSATYLAFNATESRCPWANPCGPSELSCQAGGCKGVQWMCDMWRDCTDGSDDNCSGPLFPPPELACEPVQVEMCLGLSYNTTAFPNIWVGMITQEEVVEVLSGYKSLTSLPCYQHFRRLLCGLLVPRCTPLGSVLPPCRSVCQEAEHQCQSGLALLGTPWPFNC

SEQ ID NO: 13665 - protein, 709 aa, Homo sapiens
MWWGGRGQSFNIAPQKEEPEMGSVQENRMPEPRSRQPSSCLASRCLPGEQILAWAPGVRKGLEPELSGTLICTNFRVTFQPCGWQWNQDTPLNSEYDFALVNIGRLEAVSGLSRVQLLRPGSLHKFIPEEILIHGRDFRLLRVGFEAGGLEPQAFQVTMAIVQARAQSNQAQQYSGITLSKAGQGSGSRKPPIPLMETAEDWETERKKQAARGWRVSTVNERFDVATSLPRYFWVPNRILDSEVRRAFGHFHQGRGPRLSWHHPGGSDLLRCGGFYTASDPNKEDIRAVELMLQAGHSDVVLVDTMDELPSLADVQLAHLRLRALCLPDSSVAEDKWLSALEGTRWLDYVRACLRKASDISVLVTSRVRSVILQERGDRDLNGLLSSLVQLLSAPEARTLFGFQSLVQREWVAAGHPFLTRLGGTGASEEAPVFLLFLDCVWQLLQQFPADFEFSEFFLLALHDSVRVPDTLTFLRNTPWERGKQSGQLNSYTQVYTPGYSQPPAGNSFNLQLSVWDWDLRYSNAQILQFQNPGYDPEHCPDSWLPRPQPSFMVPGPPSSVWLFSRGALTPLNQLCPWRDSPSLLAVSSRWLPRPAISSESLADQEWGLPSHWGACPLPPGLLLPGYLGPQIRLWRRCYLRGRPEVQMGLSAPTISGLQDELSHLQELLRKWTPRISPEDHSKKRDPHTILNPTEIAGILKGRAEGDLG

SEQ ID NO: 13666 - protein, 916 aa, Homo sapiens
MPAKPFLSSVLLSWKVLDFSGPGPQGTGQPCSCGHWAEGQGGPPEPAGGPNVLAKALYDNVAESPDELSFRKGDIMTVLEQDTQGLDGWWLCSLHGRQGIVPGNRLKILVGMYDKKPAGPGPGPPATPAQPQPGLHAPAPPASQYTPMLPNTYQPQPDSVYLVPTPSKAQQGLYQVPGPSPQFQSPPAKQTSTFSKQTPHHPFPSPATDLYQVPPGPGGPAQDIYQVPPSAGMGHDIYQVPPSMDTRSWEGTKPPAKVVVPTRVGQGYVYEAAQPEQDEYDIPRHLLAPGPQDIYDVPPVRGLLPSQYGQEVYDTPPMAVKGPNGRDPLLEVYDVPPSVEKGLPPSNHHAVYDVPPSVSKDVPDGPLLREETYDVPPAFAKAKPFDPARTPLVLAAPPPDSPPAEDVYDVPPPAPDLYDVPPGLRRPGPGTLYDVPRERVLPPEVADGGVVDSGVYAVPPPAEREAPAEGKRLSASSTGSTRSSQSASSLEVAGPGREPLELEVAVEALARLQQGVSATVAHLLDLAGSAGATGSWRSPSEPQEPLVQDLQAAVAAVQSAVHELLEFARSAVGNAAHTSDRALHAKLSRQLQKMEDVHQTLVAHGQALDAGRGGSGATLEDLDRLVACSRAVPEDAKQLASFLHGNASLLFRRTKATAPGPEGGGTLHPNPTDKTSSIQSRPLPSPPKFTSQDSPDGQYENSEGGWMEDYDYVHLQGKEEFEKTQKELLEKGSITRQGKSQLELQQLKQFERLEQEVSRPIDHDLANWTPAQPLAPGRTGGLGPSDRQLLLFYLEQCEANLTTLTNAVDAFFTAVATNQPPKIFVAHSKFVILSAHKLVFIGDTLSRQAKAADVRSQVTHYSNLLCDLLRGIVATTKAAALQYPSPSAAQDMVERVKELGHSTQQFRRVLGQLAAA

SEQ ID NO: 13667 - protein, 1124 aa, Homo sapiens
MAPPSEETPLIPQRSCSLLSTEAGALHVLLPARGPGPPQRLSFSFGDHLAEDLCVQAAKASGILPVYHSLFALATEDLSCWFPPSHIFSVEDASTQVLLYRIRFYFPNWFGLEKCHRFGLRKDLASAILDLPVLEHLFAQHRSDLVSGRLPVGLSLKEQGECLSLAVLDLARMAREQAQRPGELLKTVSYKACLPPSLRDLIQGLSFVTRRRIRRTVRRALRRVAACQADRHSLMAKYIMDLERLDPAGAAETFHVGLPGALGGHDGLGLLRVAGDGGIAWTQGEQEVLQPFCDFPEIVDISIKQAPRVGPAGEHRLVTVTRTDNQILEAEFPGLPEALSFVALVDGYFRLTTDSQHFFCKEVAPPRLLEEVAEQCHGPITLDFAINKLKTGGSRPGSYVLRRSPQDFDSFLLTVCVQNPLGPDYKGCLIRRSPTGTFLLVGLSRPHSSLRELLATCWDGGLHVDGVAVTLTSCCIPRPKEKSNLIVVQRGHSPPTSSLVQPQSQYQLSQMTFHKIPADSLEWHENLGHGSFTKIYRGCRHEVVDGEARKTEVLLKVMDAKHKNCMESFLEAASLMSQVSYRHLVLLHGVCMAGDSTMVQEFVHLGAIDMYLRKRGHLVPASWKLQVVKQLAYALNYLEDKGLPHGNVSARKVLLAREGADGSPPFIKLSDPGVSPAVLSLEMLTDRIPWVAPECLREAQTLSLEADKWGFGATVWEVFSGVTMPISALDPAKKLQFYEDRQQLPAPKWTELALLIQQCMAYEPVQRPSFRAVIRDLNSLISSDYELLSDPTPGALAPRDGLWNGAQLYACQDPTIFEERHLKYISQLGKGNFGSVELCRYDPLGDNTGALVAVKQLQHSGPDQQRDFQREIQILKALHSDFIVKYRGVSYGPGRQSLRLVMEYLPSGCLRDFLQRHRARLDASRLLLYSSQICKGMEYLGSRRCVHRDLAARNILVESEAHVKIADFGLAKLLPLDKDYYVVREPGQSPIFWYAPESLSDNIFSRQSDVWSFGVVLYELFTYCDKSCSPSAEFLRMMGCERDVPALCRLLELLEEGQRLPAPPACPAEVHELMKLCWAPSPQDRPSFSALGPQLDMLWSGSRGCETHAFTAHPEGKHHSLSFS

SEQ ID NO: 13668 - protein, 853 aa, Homo sapiens [sequence omitted]

SEQ ID NO: 13669 - protein, 789 aa, Homo sapiens
ANCQIAILYQRFQRVVFGISQLLCFSALISELTNQKEVAAWTYHYSTKAYSWNISRKYCQNRYTDLVAIQNKNEIDYLNKVLPYYSSYYWIGIRKNNKTWTWVGTKKALTNEAENWADNEPNNKRNNEDCVEIYIKSPSAPGKWNDEHCLKKKHALCYTASCQDMSCSKQGECLETIGNYTCSCYPGFYGPECEYVRECGELELPQHVLMNCSHPLGNFSFNSQCSFHCTDGYQVNGPSKLECLASGIWTNKPPQCLAAQCPPLKIPERGNMTCLHSAKAFQHQSSCSFSCEEGFALVGPEVVQCTASGVWTAPAPVCKAVQCQHLEAPSEGTMDCVHPLTAFAYGSSCKFECQPGYRVRGLDMLRCIDSGHWSAPLPTCEAISCEPLESPVHGSMDCSPSLRAFQYDTNCSFRCAEGFMLRGADIVRCDNLGQWTAPAPVCQALQCQDLPVPNEARVNCSHPFGAFRYQSVCSFTCNEGLLLVGASVLQCLATGNWNSVPPECQAIPCTPLLSPQNGTMTCVQPLGSSSYKSTCQFICDEGYSLSGPERLDCTRSGRWTDSPPMCEAIKCPELFAPEQGSLDCSDTRGEFNVGSTCHFSCDNGFKLEGPNNVECTTSGRWSATPPTCKGIASLPTPGVQCPALTTPGQGTMYCRHHPGTFGFNTTCYFGCNAGFTLIGDSTLSCRPSGQWTAVTPACRAVKCSELHVNKPIAMNCSNLWGNFSYGSICSFHCLEGQLLNGSAQTACQENGHWSTTVPTCQDDGKCPLNPHSHLGTYGVFTNAAFDPSP

SEQ ID NO: 13670 - protein, 218 aa, Homo sapiens
MAVNVYSTSVTSENLSRHDMLAWVNDSLHLNYTKIEQLCSGAAYCQFMDMLFPGCVHLRKVKFQAKLEHEYIHNFKVLQAAFKKMGVDKIIPVEKLVKGKFQDNFEFIQWFKKFFDANYDGKDYNPLLARQGQDVAPPPNPGDQIFNKSKKLIGTAVPQRTSPTGPKNMQTSGRLSNVAPPCILRKNPPSARNGGHETDAQILELNQQLVDLKLTVDG

SEQ ID NO: 13671 - protein, 239 aa, Homo sapiens
MMGSPEQNHYLAQLFGLYGENGTLTAGGLARLLHSLGLGRVQGLRLGQHGPLTGRAASPAADNSTHRPQNPELSVDVWAGMPLGPSGWGDLEESKAPHLPRGPAPSGLDLLHRLLLLDHSLADHLNEDCLNGSQLLVNFGLSPAAPLTPRQFALLCPALLYQIDSRVCIGAPAPAPPGDLLSALLQSALAVLLLSLPSPLSLLLLRLLGPRLLRPLLGFLGALAVGTLCGDALLHLLPH

SEQ ID NO: 13672 - protein, 872 aa, Homo sapiens
LTYAANAGPCPENLLPPKKIKTPKGTLPRLVDHVWHHPVRRNKFKYLIDHPVSLTGAGRDISFLYDVTYAKGQTREKAVCPPHLARSLQSHDGVIVPHKPKTLTDTLIPEEFHIVSSTGVSGLECYDDKYTTLLTDSENRLLLFPSMKPNKRVEVAQLNDVMDTMLERAGVENQEYTGPTKMHKLLHILKKEQTIYNMIFHELIRQVSVDCADRGELLSKVRERYVQMLDQIARQMIDFYKDLVTQRVMDQRILEELYNFKHVIEELTRELCLVRAHDVKLTKETEKAHKDLAQALLNAEKNAKIVEEYHDLYTLQRERMENDMKKLVAERDIWSSATYELALKVIERNRVILARRLYLNEKGWNKYTKHFIILLSNKDTEDLALLQKLTQKWRNLVNKLKQEVEQMEESTSETLKIVKDGLIKWQEFFNEKDILSPNKGNIFNSVLLDFKQWQKILNEKKEEFTGDVLLSKYDTLKIIKHLQENWADIGLGIFNRHKSLEGEMPSERQYMEEIIKNIQKLYKEYEIRINGDNGYSKILPSLISSLDFCSFKLENLEFPDTPLEEWQEIDEKINEMKSHLDILLNLTGIVPQHIDVDSVSVLQAYIFNMIQQWLLKIGNEINNGNIELQHHMDELHISMIQWMVNLLILMIPNFTDQDCLLKLEEESAEKHDIGVARLELDAIELTRKLYQYSSYLSSCCKGMVTAMALSKSTNSHKNATEDLYEVDKLKQPSTSTEKEKLIRFIGEDENVHSKPLFETDVLSSWRESAKQGTLAQKYLEAMAVIEHMQEKLLEVENRARQAEEKFEDAYEKLHHTLIKNKDLEELVMTSRKESKEEKENQDEREVKEEEEQQEEEEVRSAENSSKSPKKGH

SEQ ID NO: 13673 - protein, 253 aa, Homo sapiens
KKDEKDQSKEKEKKVKKTIPSWATLSASQLARAQKQTPMASSPRPKMDAILTEAIKACFQKSGASVVAIRKYIIHKYPSLELERRGYLLKQALKRELNRGVIKQNRSSAVDPEPQVKLEDVLPLAFTRLCEPKEASYSLIRKYVSQYYPKLRVDIRPQLLKNALQRAVERGQLEQITGKGASGTFQLKKSGEKPLLGGSLMEYAILSAIAAMNEPKTCSTTALKKYVLENHPGTNSNYQMHLLKKTLQKCEKN

SEQ ID NO: 13674 - protein, 1188 aa, Homo sapiens
MSVACVLKRKAVLWQDSFSPHLKHHPQEPANPNMPVVLTSGTGSQAQPQPAANQALAAGTHSSPVPGSIGVAGRSQDDAMVDYFFQRQHGEQLGGGGSGGGGYNNSKHRWPTGDNIHAEHQVRSMDELNHDFQALALEGRAMGEQLLPGKKFWETDESSKDGPKGIFLGDQWRDSAWGTSDHSVSQPIMVQRRPGQSFHVNSEVNSVLSPRSESGGLGVSMVEYVLSSSPGDSCLRKGGFGPRDADSDENDKGEKKNKGTFDGDKLGDLKEEGDVMDKTNGLPVQNGIDADVKDFSRTPGNCQNSANEVDLLGPNQNGSEGLAQLTSTNGAKPVEDFSNMESQSVPLDPMEHVGMEPLQFDYSGTQVPVDSAAATVGLFDYNSQQQLFQRPNALAVQQLTAAQQQQYALAAAHQPHIGLAPAAFVPNPYIISAAPPGTDPYTAGLAAAATLGPAVVPHQYYGVTPWGVYPASLFQQQAAAAAAATNSANQQTTPQAQQGQQQVLRGGASQRPLTPNQNQQGQQTDPLVAAAAVNSALAFGQGLAAGMPGYPVLAPAAYYDQTGALVVNAGARNGLGAPVRLVAPAPVIISSSAAQAAVAAAAASANGAAGGLAGTTNGPFRPLGTQQPQPQPQQQPNNNLASSSFYGNNSLNSNSQSSSLFSQGSAQPANTSLGFGSSSSLGATLGSALGGFGTAVANSNTGSGSRRDSLTGSSDLYKRTSSSLTPIGHSFYNGLSFSSSPGPVGMPLPSQGPGHSQTPPPSLSSHGSSSSLNLGGLTNGSGRYISAAPGAEAKYRSASSASSLFSPSSTLFSSSRLRYGMSDVMPSGRSRLLEDFRNNRYPNLQLREIAGHIMEFSQDQHGSRFIQLKLERATPAERQLVFNEILQAAYQLMVDVFGNYVIQKFFEFGSLEQKLALAERIRGHVLSLALQMYGCRVIQKALEFIPSDQQVINEMVRELDGHVLKCVKDQNGNHVVQKCIECVQPQSLQFIIDAFKGQVFALSTHPYGCRVIQRILEHCLPDQTLPILEELHQHTEQLVQDQYGNYVIQHVLEHGRPEDKSKIVAEIRGNVLVLSQHKFASNVVEKCVTHASRTERAVLIDEVCTMNDGPHSALYTMMKDQYANYVVQKMIDVAEPGQRKIVMHKIRPHIATLRKYTYGKHILAKLEKYYMKNGVDLGPICGPPNGII

SEQ ID NO: 13675 - protein, 904 aa, Homo sapiens
MPVRKQDTQRALHLLEEYRSKLSQTEDRQLRSSIERVINIFQSNLFQALIDIQEFYEVTLLDNPKCIDRSKPSEPIQPVNTWEISSLPSSTVTSETLPSSLSPSVEKYRYQDEDTPPQEHISPQITNEVIGPELVHVSEKNLSEIENVHGFVSHSHISPIKPTEAVLPSPPTVPVIPVLPVPAENTVILPTIPQANPPPVLVNTDSLETPTYVNGTDADYEYEEITLERGNSGLGFSIAGGTDNPHIGDDSSIFITKIITGGAAAQDGRLRVNDCILRVNEVDVRDVTHSKAVEALKEAGSIVRLYVKRRKPVSEKIMEIKLIKGPKGLGFSIAGGVGNQHIPGDNSIYVTKIIEGGAAHKDGKLQIGDKLLAVNNVCLEEVTHEEAVTALKNTSDFVYLKVAKPTSMYMNDGYAPPDITNSSSQPVDNHVSPSSFLGQTPASPARYSPVSKAVLGDDEITREPRKVVLHRGSTGLGFNIVGGEDGEGIFISFILAGGPADLSGELRKGDRIISVNSVDLRAASHEQAAAALKNAGQAVTIVAQYRPEEYSRFEAKIHDLREQMMNSSISSGSGSLRTSQKRSLYVRALFDYDKTKDSGLPSQGLNFKFGDILHVINASDDEWWQARQVTPDGESDEVGVIPSKRRVEKKERARLKTVKFNSKTRDKGEIPDDMGSKGLKHVTSNASDSESSYRGQEEYVLSYEPVNQQEVNYTRPVIILGPMKDRINDDLISEFPDKFGSCVPHTTRPKRDYEVDGRDYHFVTSREQMEKDIQEHKFIEAGQYNNHLYGTSVQSVREVAEKGKHCILDVSGNAIKRLQIAQLYPISIFIKPKSMENIMEMNKRLTEEQARKTFERAMKLEQEFTEHFTAIVQGDTLEDIYNQVKQIIEEQSGSYIWVPAKEKL

SEQ ID NO: 13676 - protein, 409 aa, Homo sapiens
MATSVGHRCLGLLHGVAPWRSSLHPCEITALSQSLQPLRKLPFRAFRTDARKIHTAPARTMFLLRPLPILLVTGGGYAGYRQYEKYRERELEKLGLEIPPKLAGHWEVALYKSVPTRLLSRAWGRLNQVELPHWLRRPVYSLYIWTFGVNMKEAAVEDLHHYRNLSEFFRRKLKPQARPVCGLHSVISPSDGRILNFGQVKNCEVEQVKGVTYSLESFLGPRMCTEDLPFPPAASCDSFKNQLVTREGNELYHCVIYLAPGDYHCFHSPTDWTVSHRRHFPGSLMSVNPGMARWIKELFCHNERVVLTGDWKHGFFSLTAVGATNVGSIRIYFDRDLHTNSPRHSKGSYNDFSFVTHTNREGVPMRKGEHLGEFNLGSTIVLIFEAPKDFNFQLKTGQKIRFGEALGSL

SEQ ID NO: 13677 - protein, 227 aa, Homo sapiens
MGRPLLLPLLLLLQPPAFLQPGGSTGSGPSYLYGVTQPKHLSASMGGSVEIPFSFYYPWELAIVPNVRISWRRGHFHGQSFYSTRPPSIHKDYVNRLFLNWTEGQESGFLRISNLRKEDQSVYFCRVELDTRRSGRQQLQSIKGTKLTITQAVTTTTTWRPSSTTTIAGLRVTESKGHSESWHLSLDTAIRVALAVAVLKTVILGLLCLLLLWWRRRKGSRAPSSDF

SEQ ID NO: 13678 - protein, 412 aa, Homo sapiens
MILYRLKERFQLSLRQDKEKNQEIHLSPITLQPALSEAKTVHSMVQPEQAPKVLNVVVDPQGRGAPEIKATTATSVCPSPFKMKPIGLQERRGSNVSLTLDMSSLGNIEPFVSIPTPREKVAMEYLQSASRILTRSQLRDVVASSHLLQSEFMEIPMNFVDPKEIDIPRHGTKNRYKTILPNPLSRVCLRPKNVTDSLSTYINANYIRGYSGKEKAFIATQGPMINTVDDFWQMVWQEDSPVIVMITKLKEKNEKCVLYWPEKRGIYGKVEVLVISVNECDNYTIRNLVLKQGSHTQHVKHYWYTSWPDHKTPDSAQPLLQLMLDVEEDRLASQGRGPVVVHCSAGIGRTGCFIATSIGCQQLKEEGVVDALSIVCQLRMDRGGMVQTSEQYEFVHHALCLYESRLSAETVQ

SEQ ID NO: 13679 - protein, 304 aa, Homo sapiens
MAAGGPGAGSAAPVSSTSSLPLAALNMRVRRRLSLFLNVRTQVAADWTALAEEMDFEYLEIRQLETQADPTGRLLDAWQGRPGASVGRLLELLTKLGRDDVLLELGPSIEEDCQKYILKQQQEEAEKPLQVAAVDSSVPRTAELAGITTLDDPLGHMPERFDAFICYCPSDIQFVQEMIRQLEQTNYRLKLCVSDRDVLPGTCVWSIASELIEKRLARRPRGGCRRMVVVVSDDYLQSKECDFQTKFALSLSPGAHQKRLIPIKYKAMKKEFPSILRFITVCDYTNPCTKSWFWTRLAKALSLP

SEQ ID NO: 13680 - protein, 353 aa, Homo sapiens
MNGDQNSDVYAQEKQDFVQHFSQIVRVLTEDEMGHPEIGDAIARLKEVLEYNAIGGKYNRGLTVVVAFRELVEPRKQDADSLQRAWTVGWCVELLQAFFLVADDIMDSSLTRRGQICWYQKPGVGLDAINDANLLEACIYRLLKLYCREQPYYLNLIELFLQSSYQTEIGQTLDLLTAPQGNVDLVRFTEKRYKSIVKYKTAFYSFYLPIAAAMYMAGIDGEKEHANAKKILLEMGEFFQIQDDYLDLFGDPSVTGKIGTDIQDNKCSWLVVQCLQRATPEQYQILKENYGQKEAEKVARVKALYEELDLPAVFLQYEEDSYSHIMALIEQYAAPLPPAVFLGLARKIYKRRK

SEQ ID NO: 13681 - protein, 634 aa, Homo sapiens
MDNAVDGLDKASIANSDGPTAGSQTPPFKRKGKLSTIGKIFKPWKWRKKKTSDKFRETSAVLERKISTRQSREELIRRGVLKELPDQDGDVTVNFENSNGHMIPIGEESTREENVVKSEEGNGSVSEKTPPLEEQAEDKKENTENHSETPAAPALPPSAPPKPRPKPKPKKSPVPPKGATAGASHKGDEVPPIKKNTKAPGKQAPVPPPKPASRNTTREAAGSSHSKKTTGSKASASPSTSSTSSRPKASKETVSSKAGTVGTTKGKRKTDKQPITSHLSSDTTTSGTSDLKGEPAETRVESFKLEQTVPGAEEQNTGKFKSMVPPPPVAPAPSPLAPPLPLEDQCITASDTPVVLVSVGADLPVSALDPSQLLWAEEPTNRTTLYSGTGLSVNRENAKCFTTKEELGKTVPQLLTPGLMGESSESFSASEDEGHREYQANDSDSDGPILYTDDEDEDEDEDGSGESALASKIRRRDTLAIKLGNRPSKKELEDKNILQRTSEEERQEIRQQIGTKLVRRLSQRPTTEELEQRNILKQKNEEEEQEAKMELKRRLSRKLSLRPTVAELQARRILRFNEYVEVTDSPDYDRRADKPWARLTPADKAAIRKELNEFKSTEMEVHEESRQFTRFHRP

SEQ ID NO: 13682 - protein, 1290 aa, Homo sapiens
SVTLTWDSGNSEPVTYYGIQYRAAGTEGPFQEVDGVATTRYSIGGLSPFSEYAFRVLAVNSIGRGPPSEAVRARTGEQAPSSPPRRVQARMLSASTMLVQWEPPEEPNGLVRGYRVYYTPDSRRPPNAWHKHNTDAGLLTTVGSLLPGITYSLRVLAFTAVGDGPPSPTIQVKTQQGVPAQPADFQAEVESDTRIQLSWLLPPQERIIMYELVYWAAEDEDQQHKVTFDPTSSYTLEDLKPDTLYRFQLAARSDMGVGVFTPTIEARTAQSMPSGPPRKVEVEPLNSTAVHVYWKLPVPSKQHGQIRGYQVTYVRLENGEPRGLPIIQDVMLAEAQWRPEESEDYETTISGLTPETTYSVTVAAYTTKGDGARSKPKIVTTTGAVFAKNFRVAAAMKTSVLLSWEVPDSYKSAVPFKILYNGQSVEVDGHSMRKLIADLQPNTEYSFVLMNRGSSAGGLQHLVSIRTAPDLLPHKPLPASAYIEDGRFDLSMPHVQDPSLVRWFYIVVVPIDRVGGSMLTPRWSTPEELELDELLEAIEQGGEEQRRRRRQAERLKPYVAAQLDVLPETFTLGDKKNYRGFYNRPLSPDLSYQCFVLASLKEPMDQKRYASSPYSDEIVVQVTPAQQQEEPEMLWVTGPVLAVILIILIVIAILLFKRKRTHSPSSKDEQSIGLKDSLLAHSSDPVEMRRLNYQTPGSSVPSCPNTSSMRDHPPIPITDLADNIERLKANDGLKFSQEYESIDPGQQFTWENSNLEVNKPKNRYANVIAYDHSRVILTSIDGVPGSDYINANYIDGYRKQNAYIATQGPLPETMGDFWRMVWEQRTATVVMMTRLEEKSRVKCDQYWPARGTETCGLIQVTLLDTVELATYTVRTFALHKSGSSEKRELRQFQFMAWPDHGVPEYPTPILAFLRRVKACNPLDAGPMVVHCSAGVGRTGCFIVIDAMLERMKHEKTVDIYGHVTCMRSQRNYMVQTEDQYVFIHEALLEAATCGHTEVPARNLYAHIQKLGQVPPGESVTAMELEFKLLASSKAHTSRFISANLPCNKFKNRLVNIMPYELTRVCLQPIRGVEGSDYINASFLDGYRQQKAYIATQGPLAESTEDFWRMLWEHNSTIIVMLTKLREMGREKCHQYWPAERSARYQYFVVDPMAEYNMPQYILREFKVTDARDGQSRTIRQFQFTDWPEQGVPKTGEGFIDFIGQVHKTKEQFGQDGPITVHCSAGVGRTGVFITLSIVLERMRYEGVVDMFQTVKTLRTQRPAMVQTEDQYQLCYRAALEYLGSFDHYAT

SEQ ID NO: 13683 - protein, 551 aa, Homo sapiens
MADGVDHIDIYADVGEEFNQEAEYGGHDQIDLYDDVISPSANNGDAPEDRDYMDTLPPTVGDDVGKGAAPNVVYTYTGKRIALYIGNLTWWTTDEDLTEAVHSLGVNDILEIKFFENRANGQSKGFALVGVGSEASSKKLMDLLPKRELHGQNPVVTPCNKQFLSQFEMQSRKTTQSGQMSGEGKAGPPGGSSRAAFPQGGRGRGRFPGAVPGGDRFPGPAGPGGPPPPFPAGQTPPRPPLGPPGPPGPPGPPPPGQVLPPPLAGPPNRGDRPPPPVLFPGQPFGQPPLGPLPPGPPPPVPGYGPPPGPPPPQQGPPPPPGPFPPRPPGPLGPPLTLAPPPHLPGPPPGAPPPAPHVNPAFFPPPTNSGMPTSDSRGPPPTDPYGRPPPYDRGDYGPPGREMDTARTPLSEAEFEEIMNRNRAISSSAISRAVSDASAGDYGSAIETLVTAISLIKQSKVSADDRCKVLISSLQDCLHGIESKSYGSGSRRERSRERDHSRSREKSRRHKSRSRDRHDDYYRERSRERERHRDRDRDRDRERDREREYRHR

SEQ ID NO: 13684 - protein, 408 aa, Homo sapiens
MAEGLWEQGFLRTPEQCRTKFKSLQLSYRKVRRGRVPEPCIFYEEMNALSGSWASAPPMASDAVPGQEGSDIEAGELNHQNGEPTEVEDGTVDGADRDEKDFRNPGQEVRKLDLPVLFPNRLGFEFKNEIKKENLKWDDSEEVEINKALQRKSRGVYWHSELQKGLESEPTSRRQCRNSPGESEEKTPSQEKMSHQSFCARDKACTHILCGKNCSQSVHSPHKPALKLEKVSQCPECGKTFSRSSYLVRHQRIHTGEKPHKCSECGKGFSERSNLTAHLRTHTGERPYQCGQCGKSFNQSSSLIVHQRTHTGEKPYQCIVCGKRFNNSSQFSAHRRIHTGESPYKCAVCGKIFNNSSHFSAHRKTHTGEKPYRCSHCERGFTKNSALTRHQTVHMKAVLSSQEGRDAL

SEQ ID NO: 13685 - protein, 526 aa, Homo sapiens
MQSESGIVPDFEVGEEFHEEPKTYYELKSQPLKSSSSAEHPGASKPPISSSSMTSRILLRQQLMREQMQEQERREQQQKLQAAQFMQQRVPVSQTPAINVSVPTTLPSATQVPMEVLKVQTHLENPTKYHIQQAQRQQVKQYLSTTLANKHANQVLSLPCPNQPGDHVMPPVPGSSAPNSPMAMLTLNSNCEKEGFYKFEEQNRAESECPGMNTHSRASCMQMDDVIDDIISLESSYNEEILGLMDPALQMANTLPVSGNLIDLYGNQGLPPPGLTISNSCPANLPNIKRELTACIFPTESEARALAKERQKKDNHNLIERRRRFNINDRIKELGTLIPKSNDPDMRWNKGTILKASVDYIRKLQREQQRAKELENRQKKLEHANRHLLLRIQELEMQARAHGLSLIPSTGLCSPDLVNRIIKQEPVLENCSQDLLQHHADLTCTTTLDLTDGTITFNNNLGTGTEANQAYSVPTKMGSKLEDILMDDTLSPVGVTDPLLSSVSPGASKTSSRRSSMSMEETEHTC

SEQ ID NO: 13686 - protein, 843 aa, Homo sapiens
MRLPDLRPWTSLLLVDAALLWLLQGPLGTLLPQGLPGLWLEGTLRLGGLWGLLKLRGLLGFVGTLLLPLCLATPLTVSLRALVAGASRAPPARVASAPWSWLLVGYGAAGLSWSLWAVLSPPGAQEKEQDQVNNKVLMWRLLKLSRPDLPLLVAAFFFLVLAVLGETLIPHYSGRVIDILGGDFDPHAFASAIFFMCLFSFGSSLSAGCRGGCFTYTMSRINLRIREQLFSSLLRQDLGFFQETKTGELNSRLSSDTTLMSNWLPLNANVLLRSLVKVVGLYGFMLSISPRLTLLSLLHMPFTIAAEKVYNTRHQEVLREIQDAVARAGQVVREAVGGLQTVRSFGAEEHEVCRYKEALEQCRQLYWRRDLERALYLLVRRVLHLGVQMLMLSCGLQQMQDGELTQGSLLSFMIYQESVGSYVQTLVYIYGDMLSNVGAAEKVFSYMDRQPNLPSPGTLAPTTLQGVVKFQDVSFAYPNRPDRPVLKGLTFTLRPGEVTALVGPNGSGKSTVAALLQNLYQPTGGQVLLDEKPISQYEHCYLHSQVVSVGQEPVLFSGSVRNNIAYGLQSCEDDKVMAAAQAAHADDFIQEMEHGIYTDVGEKGSQLAAGQKQRLAIARALVRDPRVLILDEATSALDVQCEQANGFWVGPLGGGSASESDPTGFLHDSRHRLSSDVGMFVALTKLGQPDAEQWNSRLDLLERSRQAVDGVCRHNYRLGAPFTVGRKVQPEVTVYPERTPLLHQHNLLHCSVTGFYPGDIKIKWFLNGQEERAGVMSTGPIRNGDWTFQTVVMLEMTPELGHVYTCLVDHSSLLSPVSVEWRAQSEYSWRKMLSGIAAFLLGL

SEQ ID NO: 13687 - protein, 681 aa, Homo sapiens
MSKRLRSSEVCADCSGPDPSWASVNRGTFLCDECCSVHRSLGRHISQVRHLKHTPWPPTLLQMVETLYNNGANSIWEHSLLDPASIMSGRRKANPQDKVHPNKAEFIRAKYQMLAFVHRLPCRDDDSVTAKDLSKQLHSSVRTGNLETCLRLLSLGAQANFFHPEKGNTPLHVASKAGQILQAELLAVYGADPGTQDSSGKTPVDYARQGGHHELAERLVEIQYELTDRLAFYLCGRKPDHKNGQHFIIPQMADRRLSLDLSELAKAAKKKLQSLSNHLFEELAMDVYDEVDRRETDAVWLATQNHSALVTETTVVPFLPVNPEYSSTRNQGRQKLARFNAHEFATLVIDILSDAKRRQQGSSLSGSKDNVELILKTINNQHSVESQDNDQPDYDSVASDEDTDLETTASKTNRQKLQTLQSENSNLRKQATTNVYQVQTGSEYTDTSNHSSLKRRPSARGSRPMSMYETGSGQKPYLPMGEASRPEESRMRLQPFPAHASRLEKQNSTPESDYDNTPNDMEPDGMGSSRKGRQRSMVWPGDGLVPDTAEPHVAPSPTLPSTEDVIRKTEQITKNIQELLRAAQENKHDSYIPCSERIHVAVTEMAALFPKKPKSDMVRTSLRLLTSSAYRLQSECKKTLPGDPGSPTDVQLVTQQVIQCAYDIAKAAKQLVTITTKENNN

SEQ ID NO: 13688 - protein, 976 aa, Homo sapiens
MEERKHETMNPAHVLFDRFVQATTCKGTLKAFQELCDHLELKPKDYRSFYHKLKSKLNYWKAKALWAKLDKRGSHKDYKKGKACTNTKCLIIGAGPCGLRTAIDLSLLGAKVVVIEKRDAFSRNNVLHLWPFTIHDLRGLGAKKFYGKFCAGAIDHISIRQLQLILLKVALILGIEIHVNVEFQGLIQPPEDQENERIGWRALVHPKTHPVSEYEFEVIIGGDGRRNTLEGFRRKEFRGKLAIAITANFINRNTTAEAKVEEISGVAFIFNQKFFQELREATGIDLENIVYYKDDTHYFVMTAKKQSLLDKGVILHDYADTELLLSRENVDQEALLSYAREAADFSTQQQLPSLDFAINHYGQPDVAMFDFTCMYASENAALVREQNGHQLLVALVGDSLLEPFWPMGTGIARGFLAAMDSAWMVRSWSLGTSPLEVLAERESIYRLLPQTTPENVSKNFSQYSIDPVTRYPNINVNFLRPSQVRHLYDTGETKDIHLEMESLVNSRTTPKLTRNESVARSSKLLGWCQRQTDGYAGVNVTDLTMSWKSGLALCAIIHRYRPDLIDFDSLDEQNVEKNNQLAFDIAEKELGISPIMTGKEMASVGEPDKLSMVMYLTQFYEMFKDSLPSSDTLDLNAEEKAVLIASTRSPISFLSKLGQTISRKRSPKDKKEKDLDGAGKRRKTSQSEEEEAPRGHRGERPTLVSTLTDRRMDVAVGNQNKVKYMATQLLAKFEENAPAQSIGIRRQLTQERGASQPSCCLPGQVRPAPTPRWKQGSMKKEFPQNLGGSDTCYFCQKRVYVMERLSAEGKFFHRSCFKCEYCATTLRLSAYAYDIEDGKFYCKPHYCYRLSGYAQRKRPAVAPLSGKEAKGPLQDGATTDANGRANAVASSTERTPGSGVNGLEEPSIAKRLRGTPERIELENYRLSLRQAEALQEVPEETQAEHNLSSVLDTGAEEDVASRSARRAAGRPPATRP

SEQ ID NO: 13689 - protein, 143 aa, Homo sapiens
MSSGFAAGVFNFCPSVFSLPQTCPLLLRVFTTNNGRHHRMDEFSRGNVPSSELQIYTWMDATLKELTSLVKEVYPEARKKGTHFNFAIVFTDVKRPGYRVKEIGSTMSGRKGTDDSMTLQSQKFQIGDYLDIAITPPNRAPPP

SEQ ID NO: 13690 - protein, 84 aa, Homo sapiens
MENFILYEEIGRGSKTVVYKGRRKGTINFVAILCTDKCKRPEITNWVRLTREIKHKNIVTFHEWYETSNHLWLVVELCTGQDYG

SEQ ID NO: 13691 - protein, 169 aa, Homo sapiens
MINKSEKPESCDNVKVVVRCRPLNEREKSMCYKQAVSVDEMRGTITVHKTDSSNEPPKTFTFDTVFGPESKQLDVYNLTARPIIDSVLEGYNGTIFAYGQTGTGKTFTMEGVRAIPELRGIIPNSFAHIFGHIAKAEGDTRFLVRVSYLEIYNEEVRDLLGKDQTQRLE

SEQ ID NO: 13692 - protein, 539 aa, Homo sapiens
MATSAPLRSLEEEVTCSICLDYLRDPVTIDCGHVFCRSCTTDVRPISGSRPVCPLCKKPFKKENIRPVWQLASLVENIERLKVDKGRQPGEVTREQQDAKLCERHREKLHYYCEDDGKLLCVMCRESREHRPHTAVLMEKAAQPHREKILNHLSTLRRDRDKIQGFQAKGEADILAALKKLQDQRQYIVAEFEQGHQFLREREEHLLEQLAKLEQELTEGREKFKSRGVGELARLALVISELEGKAQQPAAELMQDTRDFLNRYPRKKFWVGKPIARVVKKKTGEFSDKLLSLQRGLREFQGKLLRDLEYKTVSVTLDPQSASGYLQLSEDWKCVTYTSLYKSAYLHPQQFDCEPGVLGSKGFTWGKVYWEVEVEREGWSEDEEEGDEEEEGEEEEEEEEAGYGDGYDDWETDEDEESLGDEEEEEEEEEEEVLESCMVGVARDSVKRKGDLSLRPEDGVWALRLSSSGIWANTSPEAELFPALRPRRVGIALDYEGGTVTFTNAESQELIYTFTATFTRRLVPFLWLKWPGTRLLLRP

SEQ ID NO: 13693 - protein, 332 aa, Homo sapiens
MEKTHRGPGLAPGQIYTYPARCWRKKRRLNILEDPRLRPCEYKIDCEAPLKKEGGLPEGPVLEALLCAETGEKKIELKEEETIMDCQKQQLLEFPHDLEVEDLEDDIPRRKNRAKGKAYGIGGLRKRQDTASLEDRDKPYVCDICGKRYKNRPGLSYHYTHTHLAEEEGEENAERHALPFHRKNNHKQFYKELAWVPEAQRKHTAKKAPDGTVIPNGYCDFCLGGSKKTGCPEDLISCADCGRSGHPSCLQFTVNMTAAVRTYRWQCIECKSCSLCGTSENDDQLLFCDDCDRGYHMYCLSPPMAEPPEGSWSCHLCLRHLKEKASAYITLT

SEQ ID NO: 13694 - protein, 429 aa, Homo sapiens
MAAATGPSFWLGNETLKVPLALFALNRQRLCERLRKNPAVQAGSIVVLQGGEETQRYCTDTGVLFRQIASVLTSQKPSVLLTLRGVNTDSGSVCREASFDGISKFEVNNTILHPEIVECRVFKTDMELEVLRYTNKISSEAHREVMKAVKVGMKEYELESLFEHYCYSRGGMRHSSYTCICGSGENSAVLHYGHAGAPNDRTIQNGDMCLFDMGGEYYCFASDITCSFPANGKFTADQKAVYEAVLRSSRAVMGAMKPGVWWPDMHRLADRIHLEELAHMGILSGSVDAMVQAHLGAVFMPHGLGHFLGIDVHDVGGYPEGVERIDEPGLRSLRTARHLQPGMVLTVEPGIYFIDHLLDEALADPARASFLNREVLQRFRGFGGVRIEEDVVVTDSGIELLTCVPRTVEEIEACMAGCDKAFTPFSGPK

SEQ ID NO: 13695 - protein, 1165 aa, Homo sapiens
MDNFAEGDFTVADYALLEDCPHVDDCVFAAEFMSNDYVRVTQLYCDGVGVQYKDYIQSERNLEFDICSIWCSKPISVLQDYCDAIKINIFWPLLFQHQNSSVISRLHPCVDANNSRASEINLKKLQHLELMEDIVDLAKKVAKILAMEEALNWIKYAGDVTILTKLGSIDNCWPMLSIFFTEYKYHITKIVMEDCNLLEELKTQSCMDCIEEGELMKMKGNEEFSKERFDIAIIYYTRAIEYRPENYLLYGNRALCFLRTGQFRNALGDGKRATILKNTWPKGHYRYCDALSMLGEYDWALQANIKAQKLCKNDPEGIKDLIQQHVKLQKQIEDLQGRTANKDPIKAFYENRAYTPRSLSAPIFTTSLNFVEKERDFRKINHEMANGGNQNLKVADEALKVDDCDCHPEFSPPSSQPPKHKGKQKSRNNESEKFSSSSPLTLPADLKNILEKQFSKSSRAAHQDFANIMKMLRSLIQDGYMALLEQRCRSAAQAFTELLNGLDPQKIKQLNLAMINYVLVVYGLAISLLGIGQPEELSEAENQFKRIIEHYPSEGLDCLAYCGIGKVYLKKNRFLEALNHFEKARTLIYRLPGVLTWPTSNVIIEESQPQKIKMLLEKFVEECKFPPVPDAICCYQKCHGYSKIQIYITDPDFKGFIRISCCQYCKIEFHMNCWKKLKTTTFNDKIDKDFLQGICLTPDCEGVISKIIIFSSGGEVKCEFEHKVIKEKVPPRPILKQKCSSLEKLRLKEDKKLKRKIQKKEAKKLAQERMEEDLRESNPPKNEEQKETVDNVQRCQFLDDRILQCIKQYADKIKSGIQNTAMLLKELLSWKVLSTEDYTTCFSSRNFLNEAVDYVIRHLIQENNRVKTRIFLHVLSELKEVEPKLAAWIQKLNSFGLDATGTFFSRYGASLKLLDFSIMTFLWNEKYGHKLDSIEGKQLDYFSEPASLKEARCLIWLLEEHRDKFPALHSALDEFFDIMDSRCTVLRKQDSGEAPFSSTKVKNKSKKKKPKDSKPMLVGSGTTSVTSNNEIITSSEDHSNRNSDSAGPFAVPDHLRQDVEEFEALYDQHSNEYVVRNKKLWDMNPKQKCSTLYDYFSQFLEEHGPLDMSNKMFSAEYEFFPEETRQILEKAGGLKPFLLGCPRFVVIDNCIALKKVASRLKKKRK

SEQ ID NO: 13696 - protein, 395 aa, Homo sapiens
MAAADGDDSLYPIAVLIDELRNEDVQVRRLRGTWGRRGGVPGGTGGPRGEDSAFAGSGGRGRRPISLRLNSIKKLSTIALALGVERTRSELLPFLTDTIYDEDEVLLALAEQLGTFTTLVGGPEYVHCLLPPLESLATVEETVVRDKAVESLRAISHEHSPSDLEAHFVPLVKRLAGGDWFTSRTSACGLFSVCYPRVSSAVKAELRQYFRNLCSDDTPMVRRAAASKLGEFAKVLELDNVKSEIIPMFSNLASDEQDSVRLLAVEACVNIAQLLPQEDLEALVMPTLRQAAEDKSWRVRYMVADKFTELQKAVGPEITKTDLVPAFQNLMKDCEAEVRAAASHKVKEFCENLSADCRENVIMSQILPCIKELVSDANQHVKSALASVIMGLSPI

SEQ ID NO: 13697 - protein, 590 aa, Homo sapiens
MKEKEELLKLIAVLEKETAQLREQVGRMERELNHEKERCDQLQAEQKGLTEVTQSLKMENEEFKKRFSDATSKAHQLEEDIVSVTHKAIEKETELDSLKDKLKKAQHEREQLECQLKTEKDEKELYKVHLKNTEIENTKLMSEVQTLKNLDGNKESVITHFKEEIGRLQLCLAEKENLQRTFLLTTSSKEDTCFLKEQLRKAEEQVQATRQEVVFLAKELSDAVNVRDRTMADLHTARLENEKVKKQLADAVAELKLNAMKKDQDKTDTLEHELRREVEDLKLRLQMAADHYKEKFKECQRLQKQINKLSDQSANNNNVFTKKTGNQQKVNDASVNTDPATSASTVDVKPSPSAAEADFDIVTKGQVCEMTKEIADKTEKYNKCKQLLQDEKAKCNKYADELAKMELKWKEQVKIAENVKLELAEVQDNYKELKRSLENPAERKMEDGADGAFYPDEIQRPPVRVPSWGLEDNVVCSQPARNFSRPDGLEDSEDSKEDENVPTAPDPPSQHLRGHGTGFCFDSSFDVHKKCPLCELMFPPNYDQSKFEEHVESHWKVCPMCSEQFPPDYDQQVFERHVQTHFDQNVLNFD

SEQ ID NO: 13698 - protein, 869 aa, Homo sapiens
MAAAAAEEGMEPRALQYEQTLMYGRYTQDLGAFAKEEAARIRLGGPEPWKGPPSSRAAPELLEYGRSRCARCRVCSVRCHKFLVSRVGEDWIFLVLLGLLMALVSWVMDYAIAACLQAQQWMSRGLNTSILLQYLAWVTYPVVLITFSAGFTQILAPQAVGSGIPEMKTILRGVVLKEYLTLKTFIAKVIGLTCALGSGMPLGKEGPFVHIASMCAALLSKFLSLFGGIYENESRNTEMLAAACAVGVGCCFAAPIGGVLFSIEVTSTFFAVRNYWRGFFAATFSAFIFRVLAVWNRDEETITALFKTRFRLDFPFDLQELPAFAVIGIASGFGGALFVYLNRKIVQVMRKQKTINRFLMRKRLLFPALVTLLISTLTFPPGFGQFMAGQLSQKETLVTLFDNRTWVRQGLVEELEPPSTSQAWNPPRANVFLTLVIFILMKFWMSALATTIPVPCGAFMPVFVIGAAFGRLVGESMAAWFPDGIHTDSSTYRIVPGGYAVVGAAALAGAVTHTVSTAVIVFELTGQIAHILPVMIAVILANAVAQSLQPSLYDSIIRIKKLPYLPELGWGRHQQYRVRVEDIMVRDVPHVALSCTFRDLRLALHRTKGRMLALVESPESMILLGSIERSQVVALLGAQLSPARRRQHMQERRATQTSPLSDQEGPPTPEASVCFQVNTEDSAFPAARGETHKPLKPALKRGPSVTRNLGESPTGSAESAGIALRSLFCGSPPPEAASEKLESCEKRKLKRVRISLASDADLEGEMSPEEILEWEEQQLDEPVNFSDCKIDPAPFQLVERTSLHKLRKAIEGSVTAQGVKVRPPLASFRDSATSSSDTETTEVHALWGPHSRHGLPREGSPSDSDDKCQ

SEQ ID NO: 13699 - protein, 169 aa, Homo sapiens
METPLDVLSRAASLVHADDEKREAALRGEPRIQTLPVASALSSHRTGPPPISPSKRKFSMEPGDEDLDCDNDHVSKMSRIFNPHLNKTANGDCRRDPRERSRSPIERAVAPTMSLHGSHLYTSLPSLGLEQPLALTKNSLDASRPAGLSPTLTPGERQQVGLCLGGWRG

SEQ ID NO: 13700 - protein, 1559 aa, Homo sapiens
MNTPSQPRQHFYPSRAQPPSSAASRVQSAAPARPGPAAHVYPAGSQVMMIPSQISYPASQGAYYIPGQGRSTYVVPTQQYPVQPGAPGFYPGASPTEFGTYAGAYYPAQGVQQFPTGVAPTPVLMNQPPQIAPKRERKTIRIRDPNQGGKDITEEIMSGARTASTPTPPQTGGGLEPQANGETPQVAVIVRPDDRSQGAIIADRPGLPGPEHSPSESQPSSPSPTPSPSPVLEPGSEPNLAVLSIPGDTMTTIQMSVEESTPISRETGEPYRLSPEPTPLAEPILEVEVTLSKPVPESEFSSSPLQAPTPLASHTVEIHEPNGMVPSEDLEPEVESSPELAPPPACPSESPVPIAPTAQPEELLNGAPSPPAVDLSPVSEPEEQAKEVTASMAPPTIPSATPATAPSATSPAQEEEMEEEEEEEEGEAGEAGEAESEKGGEELLPPESTPIPANLSQNLEAAAATQVAVSVPKRRRKIKELNKKEAVGDLLDAFKEANPAVPEVENQPPAGSNPGPESEGSGVPPRPEEADETWDSKEDKIHNAENIQPGEQKYEYKSDQWKPLNLEEKKRYDREFLLGFQFIFASMQKPEGLPHISDVVLDKANKTPLRPLDPTRLQGINCGPDFTPSFANLGRTTLSTRGPPRGGPGGELPRGPAGLGPRRSQQGPRKEPRKIIATVLMTEDIKLNKAEKAWKPSSKRTAADKDRGEEDADGSKTQDLFRRVRSILNKLTPQMFQQLMKQVTQLAIDTEERLKGVIDLIFEKAISEPNFSVAYANMCRCLMALKVPTTEKPTVTVNFRKLLLNRCQKEFEKDKDDDEVFEKKQKEMDEAATAEERGRLKEELEEARDIARRRSLGNIKFIGELFKLKMLTEAIMHDCVVKLLKNHDEESLECLCRLLTTIGKDLDFEKAKPRMDQYFNQMEKIIKEKKTSSRIRFMLQDVLDLRGSNWVPRRGDQGPKTIDQIHKEAEMEEHREHIKVQQLMAKGSDKRRGGPPGPPISRGLPLVDDGGWNTVPISKGSRPIDTSRLTKITKPGSIDSNNQLFAPGGRLSWGKGSSGGSGAKPSDAASEAARPATSTLNRFSALQQAVPTESTDNRRVVQRSSLSRERGEKAGDRGDRLERSERGGDRGDRLDRARTPATKRSFSKEVEERSRERPSQPEGLRKAASLTEDRDRGRDAVKREAALPPVSPLKAALSEEELEKKSKAIIEEYLHLNDMKEAVQCVQELASPSLLFIFVRHGVESTLERSAIAREHMGQLLHQLLCAGHLSTAQYYQGLYEILELAEDMEIDIPHVWLYLAELVTPILQEGGVPMGELFREITKPLRPLGKAASLLLEILGLLCKSMGPKKVGTLWREAGLSWKEFLPEGQDIGAFVAEQKVEYTLGEESEAPGQRALPSEELNRQLEKLLKEGSSNQRVFDWIEANLSEQQIVSNTLVRALMTAVCYSAIIFETPLRVDVAVLKARAKLLQKYLCDEQKELQALYALQALVVTLEQPPNLLRMFFDALYDEDVVKEDAFYSWESSKDPAEQQGKGVALKSVTAFFKWLREAEEESDHN

SEQ ID NO: 13701 - protein, 1915 aa, Homo sapiens
MEDGKRERWPTLMERLCSDGFAFPQYPIKPYHLKRIHRAVLHGNLEKLKYLLLTYYDANKRDRKERTALHLACATGQPEMVHLLVSRRCELNLCDREDRTPLIKAVQLRQEACATLLLQNGANPNITDFFGRTALHYAVYNEDTSMIEKLLSHGTNIEECSKCEYQPLLFAVSRRKVKMVEFLLKKKANVNAIDYLGRSALIHAVTLGEKDIVILLLQHNIDVLSRDAFRKIAGDYAIEAKNRVIFDLIYEYERKRYEDLPINSNPVSSQKQPALKATSGKEDSISNIATEIKDGQKSGTVSSQKQPALKDTSDKDDSVSNTATEIKDEQKSGTVLPAVEQCLNRSLYRPDAVAQPVTENEFSLESEIISKLYIPKRKIISPRSIKDVLPPVEEAVDRCLYLLDRFAQPVTKDKFALESENISEPYFTNRRTISQQSAENLDAACGIDKTENGNMFEDQNVDKEGKALPATGQKANVSPEQPPLFTHTVKDRDHISTRFLGGMDSLTSSEESSERPPLSTLTLKEADPSSKAAMRRKDSPPPGKVSSQKQPAEKATSDDKDSVSNIATEIKEGPISGTVSSQKQPAEKATSDEKDSVSNIATEIKKGQQSGTVSPQKQSAWKVIFKKKVSLLNIATRIMGGGKSGTVSSQKQPASKATSDKTDSALNIATEIKDGLQCGTVSSQKQPALKATTDEEDSVSNIATEIKDGEKSGTVSSQKQPALKATTDEEDSVSNIATEIKDGEKSGTVSSQKQPALKATTDEKDSVSNIATEIKDGEKSGTVSSQKPPALTATSDEEGSVLSIARENKDGEKSRTVSSRKKPALKATSDEKDSFSNITRGKKDGEISRKVSSQKPPTLKGTSDEEDSVLGIARENKDGEKSRTVSSEKPPGLKASSAEKDSVLNIARGKKDGEKTKRVSSRKKPSLEATSDEKDSFSNITREKKDGEISRKVSSQKPPALKGTSDEEDSVLGIARENKDGEKSRTVSSEKPPGLKATSDEKDSVLNIARGKKDGEKTRTVSSQKPPTLKATSDEEDSVLSIARENKDGEKSRTVSSEKPSGLKATSAEKDSVLNIARGKKYGEKTKRVSSRKKPALKATSDEKDSVLYIAREKKDGEKSRTVSSPKQPALKAICDKEDSVPNMATEKKDEQISGTVSCQKQPALKATSDKKDSVSNIPTEIKDGQQSGTVSSQKQPAWKATSVKKDSVSNIATEIKDGQIRGTVSPQKQSAQKVIFKKKVSLLNIATRITGGWKSGTEYPENLPTLKATIENKNSVLNTATKMKDVQTSTPAEQDLEMASEGEQKRLEEYENNQPQVKNQIHSRDDLDDIIQSSQTVSEDGDSLCCNCKNVILLIDQHEMKCKDCVHLLKIKNTFCLWKRLIKLKDNHCEQLRVKIRKLKNKASVLQKRISEKEEIKSQLKHEILELEKELCSLRFAIQQEKKKRRNVEEVHQKVREKLRITEEQYRIEADVTKPIKPALKSAEVELKTGGNNSNQVSETDEKEDLLHENRLMQDEIARLRLEKDTIKNQNLEKKYLKDFEIVKRKHEDLQKALKRNGETLAKTIACYSGQLAALTDENTTLRSKLEKQRESRQRLETEMQSYHCRLNAARCDHDQSHSSKRDQELAFQGTVDKCRHLQENLNSHVLILSLQLSKAESKSRVLKTELHYTGEALKEKALVFEHVQSELKQKQSQMKDIEKMYKSGYNTMEKCIEKQERFCQLKKQNMLLQQQLDDARNKADNQEKAILNIQARCDARVQNLQAECRKHRLLLEEDNKMLVNELNHSKEKECQYEKEKAEREVAVRQLQQKRDDVLNKGSATKALLDASSRHCTYLENGMQDSRKKLDQMRSQFQEIQDQLTATIRCTKEMEGDTQKLEVEHVMMRKIIKKQDDQIERLEKILQHSSLMLQVFES

SEQ ID NO: 13702 - protein, 1300 aa, Homo sapiens
MEFYESAYFIVLIPSIVITVIFLFFWLFMKETLYDEVLAKQKREQKLIPTKTDKKKAEKKKNKKKEIQNGNLHESDSESVPRDFKLSDALAVEDDQVAPVPLNVVETSSSVRERKKKEKKQKPVLEEQVIKESDASKIPGKKVEPVPVTKQPTPPSEAAASKKKPGQKKSKNGSDDQDKKVETLMVPSKRQEALPLHQETKQESGSGKKKASSKKQKTENVFVDEPLIHATTYIPLMDNADSSPVVDKREVIDLLKPDQVEGIQKSGTKKLKTETDKENAEVKFKDFLLSLKTMMFSEDEALCVVDLLKEKSGVIQDALKKSSKGELTTLIHQLQEKDKLLAAVKEDAAATKDRCKQLTQEMMTEKERSNVVITRMKDRIGTLEKEHNVFQNKIHVSYQETQQMQMKFQQVREQMEAEIAHLKQENGILRDAVSNTTNQLESKQSAELNKLRQDYARLVNELTEKTGKLQQEEVQKKNAEQAATQLKVQLQEAERRWEEVQSYIRKRTAEHEAAQQDLQSKFVAKENEVQSLHSKLTDTLVSKQQLEQRLMQLMESEQKRVNKEESLQMQVQDILEQNEALKAQIQQFHSQIAAQTSASVLAEELHKVIAEKDKQIKQTEDSLASERDRLTSKEEELKDIQNMNFLLKAEVQKLQALANEQAAAAHELEKMQQSVYVKDDKIRLLEEQLQHEISNKMEEFKILNDQNKALKSEVQKLQTLVSEQPNKDVVEQMEKCIQEKDEKLKTVEELLETGLIQVATKEEELNAIRTENSSLTKEVQDLKAKQNDQVSFASLVEELKKVIHEKDGKIKSVEELLEAELLKVANKEKTVQDLKQEIKALKEEIGNVQLEKAQQLSITSKVQELQNLLKGKEEQMNTMKAVLEEKEKDLANTGKWLQDLQEENESLKAHVQEVAQHNLKEASSASQFEELEIVLKEKENELKRLEAMLKERESDLSSKTQLLQDVQDENKLFKSQIEQLKQQNYQQASSFPPHEELLKVISEREKEISGLWNELDSLKDAVEHQRKKNNERQQQVEAVELEAKEVLKKLFPKVSVPSNLSYGEWLHGFEKKAKECMAGTSGSEEVKVLEHKLKEADEMHTLLQLECEKYKSVLAETEGILQKLQRSVEQEENKWKVKVDESHKTIKQMQSSFTSSEQELERLRSENKDIENLRREREHLEMELEKAEMERSTYVTEVRELKAQLNETLTKLRTEQNERQKVAGDLHKAQQSLELIQSKIVKAAGDTTVIENSDVSPETESSEKETMSVSLNQTVTQLQQLLQAVNQQLTKEKEHYQVLE

SEQ ID NO: 13703 - protein, 967 aa, Homo sapiens
MSGVSEPLSRVKLGTLRRPEGPAEPMVVVPVDVEKEDVRILKVCFYSNSFNPGKNFKLVKCTVQTEIREIITSILLSGRIGPNIRLAECYGLRLKHMKSDEIHWLHPQMTVGEVQDKYECLHVEAEWRYDLQIRYLPEDFMESLKEDRTTLLYFYQQLRNDYMQRYASKVSEGMALQLGCLELRRFFKDMPHNALDKKSNFELLEKEVGLDLFFPKQMQENLKPKQFRKMIQQTFQQYASLREEECVMKFFNTLAGFANIDQETYRCELIQGWNITVDLVIGPKGIRQLTSQDAKPTCLAEFKQIRSIRCLPLEEGQAVLQLGIEGAPQALSIKTSSLAEAENMADLIDGYCRLQGEHQGSLIIHPRKDGEKRNSLPQIPMLNLEARRSHLSESCSIESDIYAEIPDETLRRPGGPQYGIAREDVVLNRILGEGFFGEVYEGVYTNHKGEKINVAVKTCKKDCTLDNKEKFMSEAVIMKNLDHPHIVKLIGIIEEEPTWIIMELYPYGELGHYLERNKNSLKVLTLVLYSLQICKAMAYLESINCVHRDIAVRNILVASPECVKLGDFGLSRYIEDEDYYKASVTRLPIKWMSPESINFRRFTTASDVWMFAVCMWEILSFGKQPFFWLENKDVIGVLEKGDRLPKPDLCPPVLYTLMTRCWDYDPSDRPRFTELVCSLSDVYQMEKDIAMEQERNARYRTPKILEPTAFQEPPPKPSRPKYRPPPQTNLLAPKLQFQEEDFIQPSSREEAQQLWEAEKVKMRQILDKQQKQMVEDYQWLRQEEKSLDPMVYMNDKSPLTPEKEVGYLEFTGPPQKPPRLGAQSIQPTANLDRTDDLVYLNVMELVRAVLELKNELCQLPPEGYVVVVKNVGLTLRKLIGSVDDLLPSLPSSSRTEIEGTQKLLNKDLAELINKMRLAQQNAVTSLSEECKRQMLTASHTLAVDAKNLLDAVDQAKVLANLAHPPAE

SEQ ID NO: 13704 - protein, 149 aa, Homo sapiens
MLPPQKKPWESMAKGLVLGALFTSFLLLVYSYAVPPLHAGLASTTPEAAASCSPPALEPEAVIRANGSAGECQPRRNIVFLKTHKTASSTLLNILFRFGQKHRLKFAFPNGRNDFDYPTFFARSLVQDYRPGACFNIICNHMRFHYDEV

SEQ ID NO: 13705 - protein, 316 aa, Homo sapiens
MGLGVSAEQPAGGAEGFHLHGVQENSPAQQAGLEPYFDFIITIGHSRLNKENDTLKALLKANVEKPVKLEVFNMKTMRVREVEVVPSNMWGGQGLLGASVRFCSFRRASEQVWHVLDVEPSSPAALAGLRPYTDYVVGSDQILQESEDFFTLIESHEGKPLKLMVYNSKSDSCREVTVTPNAAWGGEGSPPATTRSHLAPHHLLLYHLVPHHLMLYHLDPPPRTLLPWRQVPGRVTTWRPCCRHLAPPWRIPFLGLGVPATVLQTLMDFPISWRLLFSPHLQCSELWTQASWTCREFLSWTTAMPVCGPACPLPQN

SEQ ID NO: 13706 - protein, 666 aa, Homo sapiens
MDLVAFEDVAVNFTQEEWSLLDPSQKNLYREVMQETLRNLASIGEKWKDQNIEDQYKNPRNNLRSLLGERVDENTEENHCGETSSQIPDDTLNKKTSPGVKSCESSVCGEVFVGHSSLNRHIRADTAHKPSEYQEYGQEPYKCQQRKKAFRCHPSFQMQEKAHTGEKLYDCKECGKTFISHSSIQRHMIMHNGDGTYKCKFCGKACPCLSIYLIHERVHTGEKPYKCKQCGKAFSYSTSLQIHERTHTGEKPYECKECGKAFGSPNSLYEHRRTHTGEKPYECKQCGKAFRWFHSFQIHERTHSEEKAYECTKCGKAFKCPSYLCRHEVTHSGKKPCECKQCGKALSYLNFQRHMKMHTRMRPYKCKTVEKPLILPVRFEDMKELTLERNLMNASTVVKPSIVPVPFTIMKGLTLERNPMNVSSVVKPSFLPLPFDIMKGLTLERNRMSVSNVGKPSDLPHTFKCMEGLTLKRNPMNVSSVVKPSFFPLPFDIMKGLTLERNPMSVSNVGKPSHLPHTFKCMKGLTLESNCMNLNNVKKPLDLSETFKFMKRHTLERNPIRNMEKHSTISLPFKYMQQCTEDRMPMNVKSVTKHSYLPRSFEYMQEHTLERNPMNVRNAEKRSIIFLLCVYTKGCTLERNHINVRIVGKHSVCLVPFVDIKGLTLE

SEQ ID NO: 13707 - protein, 2997 aa, Homo sapiens
MADPGMMSLFGEDGNIFSEGLEGLGECGYPENPVNPMGQQMPIDQGFASLQPSLHHPSTNQNQTKLTHFDHYNQYEQQKMHLMDQPNRMMSNTPGNGLASPHSQYHTPPVPQVPHGGSGGGQMGVYPGMQNERHGQSFVDSSSMWGPRAVQVPDQIRAPYQQQQPQPQPPQPAPSGPPAQGHPQHMQQMGSYMARGDFSMQQHGQPQQRMSQFSQGQEGLNQGNPFIATSGPGHLSHVPQQSPSMAPSLRHSVQQFHHHPSTALHGESVAHSPRFSPNPPQQGAVRPQTLNFSSRSQTVPSPTINNSGQYSRYPYSNLNQGLVNNTGMNQNLGLTNNTPMNQSVPRYPNAVGFPSNSGQGLMHQQPIHPSGSLNQMNTQTMHPSQPQGTYASPPPMSPMKAMSNPAGTPPPQVRPGSAGIPMEVGSYPNMPHPQPSHQPPGAMGIGQRNMGPRNMQQSRPFIGMSSAPRELTGHMRPNGCPGVGLGDPQAIQERLIPGQQHPGQQPSFQQLPTCPPLQPHPGLHHQSSPPHPHHQPWAQLHPSPQNTPQKVPVHQHSPSEPFLEKPVPDMTQVSGPNAQLVKSDDYLPSIEQQPQQKKKKKKNNHIVAEDPSKGFGKDDFPGGVDNQELNRNSLDGSQEEKKKKKRSKAKKDPKEPKEPKEKKEPKEPKTPKAPKIPKEPKEKKAKTATPKPKSSKKSSNKKPDSEASALKKKVNKGKTEGSENSDLDKTPPPSPPPEEDEDPGVQKRRSSRQVKRKRYTEDLEFKISDEEADDADAAGRDSPSNTSQSEQQESVDAEGPVVEKIMSSRSVKKQKESGEEVEIEEFYVKYKNFSYLHCQWASIEDLEKDKRIQQKIKRFKAKQGQNKFLSEIEDELFNPDYVEVDRIMDFARSTDDRGEPVTHYLVKWCSLPYEDSTWERRQDIDQAKIEEFEKLMSREPETERVERPPADDWKKSESSREYKNNNKLREYQLEGVNWLLFNWYNMRNCILADEMGLGKTIQSITFLYEIYLKGIHGPFLVIAPLSTIPNWEREFRTWTELNVVVYHGSQASRRTIQLYEMYFKDPQGRVIKGSYKFHAIITTFEMILTDCPELRNIPWRCVVIDEAHRLKNRNCKLLEGLKMMDLEHKVLLTGTPLQNTVEELFSLLHFLEPSRFPSETTFMQEFGDLKTEEQVQKLQAILKPMMLRRLKEDVEKNLAPKEETIIEVELTNIQKKYYRAILEKNFTFLSKGGGQANVPNLLNTMMELRKCCNHPYLINGAEEKILEEFKETHNAESPDFQLQAMIQAAGKLVLIDKLLPKLKAGGHRVLIFSQMVRCLDILEDYLIQRRYPYERIDGRVRGNLRQAAIDRFSKPDSDRFVFLLCTRAGGLGINLTAADTCIIFDSDWNPQNDLQAQARCHRIGQSKSVKIYRLITRNSYEREMFDKASLKLGLDKAVLQSMSGRENATNGVQQLSKKEIEDLLRKGAYGALMDEEDEGSKFCEEDIDQILLRRTHTITIESEGKGSTFAKASFVASGNRTDISLDDPNFWQKWAKKAELDIDALNGRNNLVIDTPRVRKQTRLYSAVKEDELMEFSDLESDSEEKPCAKPRRPQDKSQGYARSECFRVEKNLLVYGWGRWTDILSHGRYKRQLTEQDVETICRTILVYCLNHYKGDENIKSFIWDLITPTADGQTRALVNHSGLSAPVPRGRKGKKVKAQSTQPVVQDADWLASCNPDALFQEDSYKKHLKHHCNKVLLRVRMLYYLRQEVIGDQADKILEGADSSEADVWIPEPFHAEVPADWWDKEADKSLLIGVFKHGYEKYNSMRADPALCFLERVGMPDAKAIAAEQRGTDMLADGGDGGEFDREDEDPEYKPTRTPFKDEIDEFANSPSEDKEESMEIHATGKHSESNAELGQLYWPNTSTLTTRLRRLITAYQRSYKRQQMRQEALMKTDRRRRRPREEVRALEAEREAIISEKRQKWTRREEADFYRVVSTFGVIFDPVKQQFDWNQFRAFARLDKKSDESLEKYFSCFVAMCRRVCRMPVKPDDEPPDLSSIIEPITEERASRTLYRIELLRKIREQVLHHPQLGERLKLCQPSLDLPEWWECGRHDRDLLVGAAKHGVSRTDYHILNDPELSFLDAHKNFAQNRGAGNTSSLNPLAVGFVQTPPVISSAHIQDERVLEQAEGKVEEPENPAAKEKCEGKEEEEETDGSGKESKQECEAEASSVKNELKGVEVGADTGSKSISEKGSEEDEEEKLEDDDKSEESSQPEAGAVSRGKNFDEESNASMSTARDETRDGFYMEDGDPSVAQLLHERTFAFSFWPKDRVMINRLDNICEAVLKGKWPVNRRQMFDFQGLIPGYTPTTVDSPLQKRSFAELSMVGQASISGSEDITTSPQLSKEDALNLSVPRQRRRRRRKIEIEAERAAKRRNLMEMVAQLRESQVVSENGQEKVVDLSKASREATSSTSNFSSLSSKFILPNVSTPVSDAFKTQMELLQAGLSRTPTRHLLNGSLVDGEPPMKRRRGRRKNVEGLDLLFMSHKRTSLSAEDAEVTKAFEEDIETPPTRNIPSPGQLDPDTRIPVINLEDGTRLVGEDAPKNKDLVEWLKLHPTYTVDMPSYVPKNADVLFSSFQKPKQKRHRCRNPNKLDINTLTGEERVPVVNKRNGKKMGGAMAPPMKDLPRWLEENPEFAVAPDWTDIVKQSGFVPESMFDRLLTGPVVRGEGASRRGRRPKSEIARAAAAAAAVASTSGINPLLVNSLFAGMDLTSLQNLQNLQSLQLAGLMGFPPGLATAATAGGDAKNPAAVLPLMLPGMAGLPNVFGLGGLLNNPLSAATGNTTTASSQGEPEDSTSKGEEKGNENEDENKDSEKSTDAVSAADSANGSVGAATAPAGLPSNPLAFNPFLLSTMAPGLFYPSMFLPPGLGGLTLPGFPALAGLQNAVGSSEEKAADKAEGGPFKDGETLEGSDAEESLDKTAESSLLEDEIAQGEELDSLDGGDEIENNENDE

SEQ ID NO: 13708 - protein, 460 aa, Homo sapiens
MSGDERSDEIVLTVSNSNVEEQEDQPTAGQADAEKAKSTKNQRKTKGAKGTFHCDVCMFTSSRMSSFNRHMKTHTSEKPHLCHLCLKTFRTVTLLRNHVNTHTGTRPYKCNDCNMAFVTSGELVRHRRYKHTHEKPFKCSMCKYASVEASKLKRHVRSHTGERPFQCCQCSYASRDTYKLKRHMRTHSGEKPYECHICHTRFTQSGTMKIHILQKHGENVPKYQCPHCATIIARKSDLRVHMRNLHAYSAAELKCRYCSAVFHERYALIQHQKTHKNEKRFKCKHCSYACKQERHMTAHIRTHTGEKPFTCLSCNKCFRQKQLLNAHFRKYHDANFIPTVYKCSKCGKGFSRWINLHRHSEKCGSGEAKSAASGKGRRTRKRKQTILKEATKGQKEAAKGWKEAANGDGVISAHRNLCLLGSSDSHASVSGAGITDARHHAWLIVLLFLVEMGFYHVSHS

SEQ ID NO: 13709 - protein, 683 aa, Homo sapiens
PRSSTHVPLVLPLLVLLLLAPARQAAAQRCPQACICDNSRRHVACRYQNLTEVPDAIPELTQRLDLQGNLLKVIPAAAFQGVPHLTHLDLRHCEVELVAEGAFRGLGRLLLLNLASNHLRELPQEALDGLGSLRRLELEGNALEELRPGTFGALGALATLNLAHNALVYLPAMAFQGLLRVRWLRLSHNALSVLAPEALAGLPALRRLSLHHNELQALPGPVLSQARGLARLELGHNPLTYAGEEDGLALPGLRELLLDGGALQALGPRAFAHCPRLHTLDLRGNQLDTLPPLQGPGQLRRLRLQGNPLWCGCQARPLLEWLARARVRSDGACQGPRRLRGEALDALRPWDLRCPGDAAQEEEELEERAVAGPRAPPRGPPRGPGEERAVAPCPRACVCVPESRHSSCEGCGLQAVPRGFPSDTQLLDLRRNHFPSVPRAAFPGLGHLVSLHLQHCGIAELEAGALAGLGRLIYLYLSDNQLAGLSAAALEGAPRLGYLYLERNRFLQVPGAALRALPSLFSLHLQDNAVDRLAPGDLGRTRALRWVYLSGNRITEVSLGALGPARELEKLHLDRNQLREVPTGALEGLPALLELQLSGNPLRALRDGAFQPVGRSLQHLFLNSSGLEQICPGAFSGLGPGLQSLHLQKNQLRALPALPSARRTPIKGRQCGADKVGKEKGRL

SEQ ID NO: 13710 - protein, 333 aa, Homo sapiens
MIIVAHVLLILLGATEILQADLLPDEKISLLPPVNFTIKVTGLAQVLLQWKPNPDQEQRNVNLEYQVKINAPKEDDYETRITESKCVTILHKGFSASVRTILQNDHSLLASSWASAELHAPPGSPGTSIVNLTCTTNTTEDNYSRLRSYQVSLHCTWLVGTDAPEDTQYFLYYRYGSWTEECQEYSKDTLGRNIACWFPRTFILSKGRDWLAVLVNGSSKHSAIRPFDQLFALHAIDQINPPLNVTAEIEGTRLSIQWEKPVSAFPIHCFDYEVKIHNTRNGYLQIEKLMTNAFISIIDDLSKYDVQVRAAVSSMCREAGLWSEWSQPIYVGK

SEQ ID NO: 13711 - protein, 4515 aa, Homo sapiens
METFIPIDLTTENQEMDKEETKTKPRLLRYEEKKYEDVKPLETQPAEIAEKETLEYKTVRTFSESLKSEKTEDYLRESIIQQHMVSPEPASLKEKGKSRRKKDQTHACPNVRKARPVSYDRTEPKDDDVIRNIIRLREKLGWQTILPQHSLKYGSSKIAIQKITLKKPLEDDGEFVYCLPRKSPKSLYNPYDLQVVSAHTAKHCKEFWVITASFISKVINIVGSVKEVELIPTLEWLSERRHYYLLRQFKIFSDFRMNKAFVTWKLNVKRIKTEKSRSFLYHHLFLADDLFQTCLVYIRGLCEDAINLKNYNDHENNLSAICLVKLDSSRTYSLDEFCEEQLQQATQALKQLEDIRNKAISEMKSTFLKVAEKNEIKEYFESKLSEDDTTHFKLPKYRRLLETFFKFVMLVDYIFQELIRQLMNTAVTLLLELFNGSAGMPFSVEKKNENLIRTFKDNSFPTGKTTNDCEELVDNSKLHAISVQKSEVKTDTDINEILNSVEVGKDLRKTYAPIFEVNLCLRIPAESDSSENSKENFHESDQCPEECVMFEDEMSENKDNCVKKHSSEELLPKAKKSKEISYNLEDIISDTEIETEFENKYMYYEFPEFPTNLFIDPNRLEFSVKIQNMLTNMEKCITTITPLCQDPQLSIFIDLVSIMDLPNKTGSIIHYKEQTRWPDCHILFETDPAYQNIIVNLLTIIGNSMGLVNAYSHKFIKYCTMTEKAKIMSMKISSMGELTSKEFEAILNRFRNYFRHIVNMAIEKRIGIFNVVSLDYQSECLLYIDNVIHMSHTLIQSVIEKKNKNLLEVVESSLQQLECDPTEIEEFLEHFIFLNAISSKISKLEKEFLTMSQLYSVAKHHQIHISEEQIAIFQVLLLKFSQLKSSMKLSKINKDTAITKFRDNLEACISGLHVDVGNLKAKIRTPLLLCAGTQVSTAMEMIQTLSGEAASLTNKAKAYSHYQDCFSDSQSHMHSVNVEEITQIVLSEISDIEGDLTLRKKLWEAQEEWKRASWEWRNSSLQSIDVESVQRNVSKLMHIISVLEKGLPKSDMVTHLKQVVTEFKQELPIIIALGNPCLKPRHWEALQEIIGKSVPLDKNCKVENLLALKMFQYENEINDMSTSATNEAALEKMLFKIIDFWNTTPLPLILHHTEIYSIFIIPSIDDISAQLEESQVILATIKGSPHIGPIKDLVNEWDQNLTLFSYTLEEWMNCQRNWLYLEPVFHSSEIRRQLPAETELFSQVISMWKKIMSKIQNKQNALQITTSAGVLEILQNCNIHLEHIKKSLEDYLEVKRLIFPRFYFLSNAELLDILADSRNPESVQPHLVKCFENIKQLLIWKQDIGPPAVKMLISAEGEGLVLPKKIRVRSAVEQWLVNVEKSMFDVLKKERYIYNIILLFQSQIMFYNDCVKSFVSSYSREKLEKVHAGLMCHLEEVADLVVLDTSNSRTKAILGALLILYVHCRDIVINLLLKNIFNAEDFEWTRHLQYKWNEKQKLCYVSQGNASFTYGYEYLGCTSRLVITPLTDRCWLTLMEALHLNLGGCPAGPAGTGKTETVKDLAKSLGKHCVVFNCFEDLDYKIVRKFFFGLVQSGAWSCFDEFNLIDLEVLSVIASQILTIKAAKDNYSARFVLEGKEIRINMSCAVFITMNPRYGGGVELPDNLKSLFRPVAMMVPHYQMIAEIILFSFGFKSANSLSGKLTNLYELARKQLSQQDHYNFGLRSLKIVLIMAGTKKREFKCLSEADETLIVIEAIREASLPKCPPEDVPLFENIIGDIFPEVTVLKVNQLALEKVIYTATQQLGLQNWSSQKEKIIQFYNQLQVCVGVMLVGPTGGGKTTVRRILEKALTLLPIADFLSVAERKSASKISERKGKVDICVLNPKCVTLSELYGQLDPNTMEWTDGLLSATIRSYVYFNTPKNTKKDIDLRLKSRISDLSNVFKLDSSDTTETDDNIFEEIEKVVKIPENHNFDWQWIILDGPVDTFWVENLNSVLDDTRTLCLANSERIALTNKIRVIFEVDNLSQASPATVSRCAMVYMDPVDLGWEPYVKSWLLKTSKIISQSGVDCLEFMIKNSVTDGLQFIRNRQKFQPYPMEDITVVITLCRILDAFFDFMGKNGGFEQSDDLNDTSSKEANSQRESVTFKDIEKRDENTWYPEKNPDKLTKIIQKLFVFAFTWAFGGALNREDEHRENIPFCPSLEPDSLAKVTYDFDKLVHELFGNSSQVGWKHWGQSQGRRRKGNCINLPTGECSIFGYFVDIEQCEFIPWSDLVPNDQTLIQRGTSLLTNLQRSGGNFLKITECGECINYTATRDTTCLSFLMSLLLKNSCPVLLTGESGVGKTAAINQMLEKLEGPGAFDIKHGSILGDTLLYSEIKKSSSLKQNITILIPETHKTATGSSDNPTKKPEVRTNKKLLKNNDHKGVVVSTINFSTNVTAAKTKEMILKKLIRRTKDTLGAPKNNRILIFIDDMNMPVSDMYGAQPPLELIRQLLDLGGVYDTEKNTWKNIQDLSIVAACVPVVNDISPRLLKHFSMLVLPHPSQDILCTIFQAHLGIYFSINNFTPEVQKSKDQIISCSLAIYHQVRQNMLPTPTKCHYMFNLRDMFKLLLGLLQADRTVVNSKEMAALLFVHEATRVFHDRLIDFTDKSLFYRLLSRELENCFQIGIDGCGKKTCATLACYLTDNKLYRVPISHKCAYIEFKEVFKKVFIHAGLKGKPTVLMVPNLNIEQDSFLEDLNYIISSGRIPDLFENVELDSIAMKIRYLTEQSGHMDNRQSLLSFFQKRIYKNLHIFVIMSPEGPSFRQNCRVYPSMISSCTIDWYERWPEEALLIVANSFLKEKVNFENRENLKEKLAPTCVQIHKSMKDLNRKYFEETGRFYYTTPNSYLQFMETFAHILRAREEEMQTKRDRFHMGLSTILEATTLVTEMQEELLILGPQVEQKTKETETLMEKLRKDSQVVEKVQMLVKQDEEIVAEEVRIVEDYAQKTANELKSVLPAFDKAIVALNALDKADVAELRVYTRPPFLVLTVMNAVCILLQKKPNWATAKLLLSETGFLKKLINLDKDSIPDKVFVKLKKIVTLPDFNPHKISLVSVACCSLCQWVIALNNYHEVQKVVGPKQIQVAEAQNVLKIARQRLAEKQRGLQLVEEHLLFLQAAYKDTVAEKQLLANRKTMASRRFQCASVLLTVLEDEKTRWQETINQIDNKLEGILGDILLSAACIVYSGILTPEFRQLIVNKWETFCIENGISLSSKFSLIKVMAQKYEISRWHNQGLPHGQYSVENAILIKNGQQWPLLIDPHRQAHKWIRQMEGSRLQKLSIEDSNYTKKIENAMKTGGSVLLQNLLETLAPGLKAILKKDIYQKKGHYFIRVGDAEFEYNSNFRLYLSTEIDNPHFLPSVYNFVTMINFTVTFQGLQDQLLSTVVTHEVPHLEDQRSKLLESISLDAITLEELEEKTLNLLQKALGSILDDDKIVDTLRKSKMTSNEISKRIEATKKAESEIQAIRKNYLPIATRGALLYFLVADLTQINYMYQFSLDWFHQVFVSSVVSKSKEQEHSFKREKVSPKEVHEFISISKEPNLENEKNLLDKHIKSAIDMLTKSIFKVVSSALFNEDKLCFSFRLCTVIMQNNANGNLIQDDIGFLPEEEWNIFLYSGILINIKSALSQSRLTSTFEIGESQHLQWLSDSRWRQCQYVSTHLEPFSLLCKSLLSNVSQWDTFKNSKAVYSLISTPFSSENASLEENTKPPEETELLNENKETCNPINFPWEKLTSFQRLILVKVLRPESLNNSVRKFITEKMGNKYLQRTGVNLKDAYKGSNARTPLILIQTHGIDLTNILLRFAQELKGTTHHVTIISLGRDQAAKAEDLILKALTKTQQWVFLQNCHLATSFMPRLCTIVESFNSPNVTIDPEFRLWLSSKSYSSFPIPVLKKGLKIAVESPQGLKSNLLQTFGCTGSGEVTEEIFENPDCGQWWKKLLFSLCFFNAVINERKNYGILGWNIAYKFNSSDLGVAIKVLENSLRGQPSISWQALRYLIGEVIYGGRVIDNWDKRCLKTLLYKFCNPEVLKDDFSFSRSASIKDYIHIIQSLPDDDLPEVLGIHPEAIRSCWETQGEKFIENLIAMQPKTTTANLMIRPEQSKDELVMEILSDLLKRLPLTVEKEEIAVGTPSTLKSMMSSSIWESLSKNLKDHDPLIHCVLLTFLKQEIKRFDKLLFVIHKSLKDLQLAIKGEIILTQELEEIFNSFLNMRVPTLWQKHAYRSCKPLSSWIDDLIQRLNFFNTWAKVAYTAIQRRYMRFVTVWKQSIPSTSQKCKHPEDSENNFFEGFPSRYWLPAFFFPQAFLAAVLQDYGRSRGIAVDALTFTHHVISNTTDKDEKFSVFMPKKLNIVRRAFKGSASSHTGVYIFGLFIEGARWNREQKILEDSLPLEMCCDFPDIYFLPTKISTKTPNASNQTDSELYAFECPVYQTPERSRILATTGLPTNFLTSVYLSTKKPPSHWITMRVALLCEKNEK

SEQ ID NO: 13712 - protein, 796 aa, Homo sapiens
MEGLTLSDAEQKYYSDLFSYCDIESTKKVVVNGRVLELFRAAQLPNDVVLQIMELCGATRLGYFGRSQFYIALKLVAVAQSGFPLRVESINTVKDLPLPRFVASKNEQESRHAASYSSDSENQGSYSGVIPPPPGRGQVKKGSVSHDTVQPRTSADAQEPASPVVSPQQSPPTSPHTWRKHSRHPSGGNSERPLAGPGPFWSPFGEAQSGSSAGDAVWSGHSPPPPQENWVSFADTPPTSTLLTMHPASVQDQTTVRTVASATTAIEIRRQSSSYDDPWKITDEQRQYYVNQFKTIQPDLNGFIPGSAAKEFFTKSKLPILELSHIWELSDFDKDGALTLDEFCAAFHLVVARKNGYDLPEKLPESLMPKLIDLEDSADVGDQPGEVGYSGSPAEAPPSKSPSMPSLNQTWPELNQSSEQWETFSERSSSSQTLTQFDSNIAPADPDTAIVHPVPIRMTPSKIHMQEMELKRTGSDHTNPTSPLLVKPSDLLEENKINSSVKFASGNTVADGYSSSDSFTSDPEQIGSNVTRQRSHSGTSPDNTAPPPPPPRPQPSHSRSSSLDMNRTFTVTTGQQQAGVVAHPPAVPPRPQPSQAPGPAVHRPVDADGLITHTSTSPQQIPEQPNFADFSQFEVFAASNVNDEQDDEAEKHPEVLPAEKASDPASSLRVAKTDSKTEEKTAASAPANVSKGTTPLAPPPKPVRRRLKSEDELRPEVDEHTQKTGVLAAVLASQPSIPRSVGKDKKAIQASIRRNKETNTVLARLNSELQQQLKDVLEERISLEVQLEQLRPFSHL

SEQ ID NO: 13713 - protein, 1571 aa, Homo sapiens
MADRGCPLEAAPLPAEVRESLAELELELSEGDITQKGYEKKRAKLLARYIPLIQGIDPSLQAENRIPGPSQTTAAAPKQQKSRPTASRDERFRSDVHTEAVQAALAKYKERKMPMPSKRRSVLVHSSVETYTPPDTSSASEDEGSLRRPGRLTSTPLQSHSSVEPWLDRVIQGSSTSSSASSTSSHPGGRPTTAPSAAATPGAAATTALAGLEAHTHIDLHSAPPDVTTGLVEHSYFERPQVASVRSVPRGCSGSMLETADGVPVNSRVSSKIQQLLNTLKRPKRPPLKEFFVDDFEELLEVQQPDPNQPKPEGSETSVLRGEPLTAGVPRPPSLLATLQRWGTTQPKSPCLTALDTTGKAVYTLTYGKLWSRSLKLAYTLLNKLTSKNEPLLKPGDRVALVFPNSDPVMFMVAFYGCLLAELVPVPIEVPLTRKDAGSQQVGFLLGSCGVFLALTTDACQKGLPKAQTGEVAAFKGWPPLSWLVIDGKHLAKPPKDWHPLAQDTGTGTAYIEYKTSKEGSTVGVTVSHASLLAQCRALTQACGYSEAETLTNVLDFKRDAGLWHGVLTSVMNRMHVVSVPYALMKANPLSWIQKVCFYKARAALVKSRDMHWSLLAQRGQRDVSLSSLRMLIVADGANPWSISSCDAFLNVFQSRGLRPEVICPCASSPEALTVAIRRPPDLGGPPPRKAVLSMNGLSYGVIRVDTEEKLSVLTVQDVGQVMPGANVCVVKLEGTPYLCKTDEVGEICVSSSATGTAYYGLLGITKNVFEAVPVTTGGAPIFDRPFTRTGLLGFIGPDNLVFIVGKLDGLMVTGVRRHNADDVVATALAVEPMKFVYRGRIAVFSVTVLHDDRIVLVAEQRPDASEEDSFQWMSRVLQAIDSIHQVGVYCLALVPANTLPKAPLGGIHISETKQRFLEGTLHPCNVLMCPHTCVTNLPKPRQKQPEVGPASMIVGNLVAGKRIAQASGRELAHLEDSDQARKFLFLADVLQWRAHTTPDHPLFLLLNAKGTVTSTATCVQLHKRAERVAAALMEKGRLSVGDHVALVYPPGVDLIAAFYGCLYCGCVPVTVRPPHPQNLGTTLPTVKMIVEVSKSACVLTTQAVTRLLRSKEAAAAVDIRTWPTILDTDDIPKKKIASVFRPPSPDVLAYLDFSVSTTGILAGVKMSHAATSALCRSIKLQCELYPSRQIAICLDPYCGLGFALWCLCSVYSGHQSVLVPPLELESNVSLWLSAVSQYKARVTFCSYSVMEMCTKGLGAQTGVLRMKGVNLSCVRTCMVVAEERPRIALTQSFSKLFKDLGLPARAVSTTFGCRVNVAICLQGTAGPDPTTVYVDMRALRHDRVRLVERGSPHSLPLMESGKILPGVKVIIAHTETKGPLGDSHLGEIWVSSPHNATGYYTVYGEEALHADHFSARLSFGDTQTIWARTGYLGFLRRTELTDASGGRHDALYVVGSLDETLELRGMRYHPIDIETSVIRAHRSIAECAVFTWTNLLVVVVELDGLEQDALDLVALVTNVVLEEHYLVVGVVVIVDPGVIPINSRGEKQRMHLRDGFLADQLDPIYVAYNM

SEQ ID NO: 13714 - protein, 839 aa, Homo sapiens
MAAAGPRRSVRGAVCLHLLLTLVIFSRAGEACKKVILNVPSKLEADKIIGRVNLEECFRSADLIRSSDPDFRVLNDGSVYTARAVALSDKKRSFTIWLSDKRKQTQKEVTVLLEHQKKVSKTRHTRETVLRRAKRRWAPIPCSMQENSLGPFPLFLQQVESDAAQNYTVFYSISGRGVDKEPLNLFYIERDTGNLFCTRPVDREEYDVFDLIAYASTADGYSADLPLPLPIRVEDENDNHPVFTEAIYNFEVLESSRPGTTVGVVCATDRDEPDTMHTRLKYSILQQTPRSPGLFSVHPSTGVITTVSHYLDREVVDKYSLIMKVQDMDGQFFGLIGTSTCIITVTDSNDNAPTFRQNAYEAFVEENAFNVEILRIPIEDKDLINTANWRVNFTILKGNENGHFKISTDKETNEGVLSVVKPLNYEENRQVNLEIGVNNEAPFARDIPRVTALNRALVTVHVRDLDEGPECTPAAQYVRIKENLAVGSKINGYKAYDPENRNGNGLRYKKLHDPKGWITIDEISGSIITSKILDREVETPKNELYNITVLAIDKDDRSCTGTLAVNIEDVNDNPPEILQEYVVICKPKMGYTDILAVDPDEPVHGAPFYFSLPNTSPEISRLWSLTKVNDTAARLSYQKNAGFQEYTIPITVKDRAGQAATKLLRVNLCECTHPTQCRATSRSTGVILGKWAILAILLGIALLFSVLLTLVCGVFGATKGKRFPEDLAQQNLIISNTEAPGDDRVCSANGFMTQTTNNSSQGFCGTMGSGMKNGGQETIEMMKGGNQTLESCRGAGHHHTLDSCRGGHTEVDNCRYTYSEWHSFTQPRLGEESIRGHTG

SEQ ID NO: 13715 - protein, 1514 aa, Homo sapiens
MSTPTDPGAMPHPGPSPGPGPSPGPILGPSPGPGPSPGSVHSMMGPSPGPPSVSHPMPTMGSTDFPQEGMHQMHKPIDGIHDKGIVEDIHCGSMKGTGMRPPHPGMGPPQSPMDQHSQGYMSPHPSPLGAPEHVSSPMSGGGPTPPQMPPSQPGALIPGDPQAMSQPNRGPSPFSPVQLHQLRAQILAYKMLARGQPLPETLQLAVQGKRTLPGLQQQQQQQQQQQQQQQQQQQQQQQPQQQPPQPQTQQQQQPALVNYNRPSGPGPELSGPSTPQKLPVPAPGGRPSPAPPAAAQPPAAAVPGPSVPQPAPGQPSPVLQLQQKQSRISPIQKPQGLDPVEILQEREYRLQARIAHRIQELENLPGSLPPDLRTKATVELKALRLLNFQRQLRQEVVACMRRDTTLETALNSKAYKRSKRQTLREARMTEKLEKQQKIEQERKRRQKHQEYLNSILQHAKDFKEYHRSVAGKIQKLSKAVATWHANTEREQKKETERIEKERMRRLMAEDEEGYRKLIDQKKDRRLAYLLQQTDEYVANLTNLVWEHKQAQAAKEKKKRRRRKKKAEENAEGGESALGPDGEPIDESSQMSDLPVKVTHTETGKVLFGPEAPKASQLDAWLEMNPGYEVAPRSDSEESDSDYEEEDEEEESSRQETEEKILLDPNSEEVSEKDAKQIIETAKQDVDDEYSMQYSARGSQSYYTVAHAISERVEKQSALLINGTLKHYQLQGLEWMVSLYNNNLNGILADEMGLGKTIQTIALITYLMEHKRLNGPYLIIVPLSTLSNWTYEFDKWAPSVVKISYKGTPAMRRSLVPQLRSGKFNVLLTTYEYIIKDKHILAKIRWKYMIVDEGHRMKNHHCKLTQVDLNEEETILIIRRLHKVLRPFLLRRLKKEVESQLPEKVEYVIKCDMSALQKILYRHMQAKGILLTDGSEKDKKGKGGAKTLMNTIMQLRKICNHPYMFQHIEESFAEHLGYSNGVINGAELYRASGKFELLDRILPKLRATNHRVLLFCQMTSLMTIMEDYFAFRNFLYLRLDGTTKSEDRAALLKKFNEPGSQYFIFLLSTRAGGLGLNLQAADTVVIFDSDWNPHQDLQAQDRAHRIGQQNEVRVLRLCTVNSVEEKILAAAKYKLNVDQKVIQAGMFDQKSSSHERRAFLQAILEHEEENEEEDEVPDDETLNQMIARREEEFDLFMRMDMDRRREDARNPKRKPRLMEEDELPSWIIKDDAEVERLTCEEEEEKIFGRGSRQRRDVDYSDALTEKQWLRAIEDGNLEEMEEEVRLKKRKRRRNVDKDPAKEDVEKAKKRRGRPPAEKLSPNPPKLTKQMNAIIDTVINYKDSSGRQLSEVFIQLPSRKELPEYYELIRKPVDFKKIKERIRNHKYRSLGDLEKDVMLLCHNAQTFNLEGSQIYEDSIVLQSVFKSARQKIAKEEESEDESNEEEEEEDEEESESEAKSVKVKIKLNKKDDKGRDKGKGKKRPNRGKAKPVVSDFDSDEEQDEREQSEGSGTDDE

SEQ ID NO: 13716 - protein, 972 aa, Homo sapiens
MDTDLYDEFGNYIGPELDSDEDDDELGRETKDLDEMDDDDDDDDVGDHDDDHPGMEVVLHEDKKYYPTAEEVYGPEVETIVQEEDTQPLTEPIIKPVKTKKFTLMEQTLPVTVYEMDFLADLMDNSELIRNVTLCGHLHHGKTCFVDCLIEQTHPEIRKRYDQDLCYTDILFTEQERGVGIKSTPVTVVLPDTKGKSYLFNIMDTPGHVNFSDEVTAGLRISDGVVLFIDAAEGVMLNTERLIKHAVQERLAVTVCINKIDRLILELKLPPTDAYYKLRHIVDEVNGLISMYSTDENLILSPLLGNVCFSSSQYSICFTLGSFAKIYADTFGDINYQEFAKRLWGDIYFNPKTRKFTKKAPTSSSQRSFVEFILEPLYKILAQVVGDVDTSLPRTLDELGIHLTKEELKLNIRPLLRLVCKKFFGEFTGFVDMCVQHIPSPKVGAKPKIEHTYTGGVDSDLGEAMSDCDPDGPLMCHTTKMYSTDDGVQFHAFGRVLSGTIHAGQPVKVLGENYTLEDEEDSQICTVGRLWISVARYHIEVNRVPAGNWVLIEGVDQPIVKTATITEPRGNEEAQIFRPLKFNTTSVIKIAVEPVNPSELPKMLDGLRKVNKSYPSLTTKVEESGEHVILGTGELYLDCVMHDLRKMYSEIDIKVADPVVTFCETVVETSSLKCFAETPNKKNKITMIAEPLEKGLAEDIENEVVQITWNRKKLGEFFQTKYDWDLLAARSIWAFGPDATGPNILVDDTLPSEVDKALLGSVKDSIVQGFQWGTREGPLCDELIRNVKFKILDAVVAQEPLHRGGGQIIPTARRVVYSAFLMATPRLMEPYYFVEVQAPADCVSAVYTVLARRRGHVTQDAPIPGSPLYTIKAFIPAIDSFGFETDLRTHTQGQAFSLSVFHHWQIVPGDPLDKSIVIRPLEPQPAPHLAREFMIKTRRRKGLSEDVSISKFFDDPMLLELAKQDVVLNYPM

SEQ ID NO: 13717 - protein, 401 aa, Homo sapiens
MPPAIPEATEASGPPSPTPGDKLSPASELPKESPLEVWLNLGGSTPDPQGPELTYPFQGTLEPQPASDIIDIDYFEGLDGEGRGADLGSFPGSPGTSENHPDTEGETPSWSLLDLYDDFTPFDESDFYPTTSFYDDLDEEEEEEEDDKDAVGGGDLEDENELLVPTGKPGLGPGTGQPTSRWHAVPPQHTLGSVPGSSIALRPRPGEPGRDLASSENGTECRSGFVRHNGSCRSVCDLFPSYCHNGGQCYLVENIGAFCRCNTQDYIWHKGMRCESIITDFQVMCVAVGSAALVLLLLFMMTVFFAKKLYLLKTENTKLRRTNKFRTPSELHNDNFSLSTIAEGSHPNDDPSAPHKIQEVLKSCLKEEESFNIQNSMSPKLEGGKGDQADLDVNCLQNNLT

SEQ ID NO: 13718 - protein, 430 aa, Homo sapiens
MDGTEGSAGQPGPAERSHRSSVSSVGARAADVLVYLADDTVVPLAVENLPSLSAHELHRAVREVLQLPDIALDVFALWLVSPLLDEPFLQFRRNVFFPKRRELQIHDEEVLRLLYEEAKGNVLAARYPCDVEDCEALGALVCRVQLGPYQPGRPAACDLREKLDSFLPAHLCKRGQSLFAALRGRGARAGPGEQGLLNAYRQVQEVSSDGGCEAALGTHYRAYLLKCHELPFYGCAFFHGEVDKPAQGFLHRGGRKPVSVAISLEGVHVIDSREKHVLLGLRFQELSWDHTSPEEEEPILWLEFDGDSEGTPVNKLLKIYSKQAELMSSLIEYCIELSQAAEPAGPQDSATGSPSDPSSSLAPVQRPKLRRQGSVVSSRIQHLSTIDYVEDGKGIRRVKPKRTTSFFSRQLSLGQGSYTVVQPGDSLEQG

SEQ ID NO: 13719 - protein, 207 aa, Homo sapiens
MIAAPEIPTDFNLLQESETHFSSDTDFEDIEGKNQKQGKGKTCKKGKKGPAEKGKGGNGGGKPPSGPNRMNGHHQQNGVENMMLFEVVKMGKSAMQSVVDDWIESYKHDRDIALLDLINFFIQCSGCKGVVTAEMFRHMQNSEIIRKMTEEFDEDSGDYPLTMAGPQWKKFKSSFCEFIGVLVRQCQYSIIYDEYMMDTVISLLTGL

SEQ ID NO: 13720 - protein, 13 aa, Homo sapiens
MGETEKRIETHRI

SEQ ID NO: 13721 - protein, 202 aa, Homo sapiens
LNTSHSPSASSRSSHKSSHTAMSEPTSTPTKLMAEASTPALPRSATLPQELPVPGLSQAATMPAPLPSPSSCDLTQQLLPQTVLQSTPAPMAQFSAQFSMFQTIKDQLEQRTRILQANIRWQQEELHKIQEQLCLVQDSNVQVRPEPDRVSKSRRTPRQQQQRPDARPADGAGGAPPQLPCLPTIAPAACTGPAAATAALPA

SEQ ID NO: 13722 - protein, 464 aa, Homo sapiens
MAAAALRDPAQGYVTFEDVAVYFSQEEWRLLDDAQRLLYRNVMLENFTLLASLGCWHGAEAEEAPEQIASVGLLSSNIQQHQKQHCGEKPLKRQEGRVPVLRSCKVHLSEKSLQSREVGKALLISSGVLKHQVTHTGEKSHRSSKSREAFHAGKRHYKCSECGKAFGQKYLLVQHQRLHAGKKTYECSECGKLFRDMSNLFIHQIVHTGERPYGCSNCGKSFSRNAHLIEHQRVHTGEKPFTCSECGKAFRHNSTLVQHHKIHTGVRPYECSECGKLFSFNSSLMKHQRIHTGERPYKCSECGKFYSHKSNLIKHWRVHTGERPYKCSDCGKFFTQCSSLMQHQKVHTGEKPFKCNECGRFFRENSTLVRHQRVHTGAKPYECRECGKFFSQSSTLMQHRKVHIGEKPFKCNECGRLFRENSSLVKHQRVHTGAKPYECRECGKFFRHNSSLFKHRRIHTGEMQ

SEQ ID NO: 13723 - protein, 576 aa, Homo sapiens
MIWRNNWKSTTGRLNVKLQSDKLQHGCGPDYSSAWLPANESLWQATTVPSNHRNNHIRRHSIASDSGDTGIGTSCSDSVEDHSTSSGTLSFKPSQSLITLPTAHVMPSNSSASISKLRESLTPDGSKWSTSLMQTLGNHSRGEQDSSLDMKDFRPLRKWSSLSKLTAPDNCGQGGTVCREESRNGLEKIGKAKALTSQLRTIGPSCLHDSMEMLRLEDKEINKKRSSTLDCKYKFESCSKEDFRASSSTLRRQPVDMTYSALPESKPIMTSSEAFEPPKYLMLGQQAVGGVPIQPSVRTQMWLTEQLRTNPLEGRNTEDSYSLAPWQQQQIEDFRQGSETPMQVLTGSSRQSYSPGYQDFSKWESMLKIKEGLLRQKEIVIDRQKQQITHLHERIRDNELRAQHAMLGHYVNCEDSYVASLQPQYENTSLQTPFSEESVSHSQQGEFEQKLASTEKEVLQLNEFLKQRLSLFSEEKKKLEEKLKTRDRYISSLKKKCQKESEQNKEKQRRIETLEKYLADLPTLDDVQSQSLQLQILEEKNKNLQEALIDTEKKLEEIKKQCQDKETQLICQKKKE

SEQ ID NO: 13724 - protein, 342 aa, Homo sapiens
MAPLDLDKYVEIARLCKYLPENDLKVSPICGLAPSGCGAPAGRPFLSPGPPPVFHFLRFLKERLCDYVCDLLLEESNVQPVSTPVTVCGDIHGQFYDLCELFRTGGQVPDTNYIFMGDFVDRGYYSLETFTYLLALKAKWPDRITLLRGNHESRQITQVYGFYDECQTKYGNANAWRYCTKVFDMLTVAALIDEQILCVHGGLSPDIKTLDQIRTIERNQEIPHKGAFCDLVWSDPEDVDTWAISPRGAGWLFGAKVTNEFVHINNLKLICRAHQLVHEGYKFMFDEKLVTVWSAPNYCYRCGNIASIMVFKDVNTREPKLFRAVPDSERVIPPRTTTPYFL

SEQ ID NO: 13725 - protein, 734 aa, Homo sapiens
MLHHIEEPCSLGAHAAVIVPPTWIIKVKKPQNSLKASNRKKKRTSFKRKASKRGMEQENKGRPFVIKPISSPLMKPLLVFVNPKSGGNQGTKVLQMFMWYLNPRQVFDLSQEGPKDALELYRKVPNLRILACGGDGTVGWILSILDELQLSPQPPVGVLPLGTGNDLARTLNWGGGYTDEPVSKILCQVEDGTVVQLDRWNLHVERNPDLPPEELEDGVCKLPLNVFNNYFSLGFDAHVTLEFHESREANPEKFNSRFRNKMFYAGAAFSDFLQRSSRDLSKHVKVVCDGTDLTPKIQELKFQCIVFLNIPRYCAGTMPWGNPGDHHDFEPQRHDDGYIEVIGFTMASLAALQVGGHGERLHQCREVMLLTYKSIPMQVDGEPCRLAPAMIRISLRNQANMVQKSKRRTSMPLLNDPQSVPDRLRIRVNKISLQDYEGFHYDKEKLREASISDWLRTIAGELVQSFGAIPLGILVVRGDCDLETCRMYIDRLQEDLQSVSSGSQRVHYQDHETSFPRALSAQRLSPRWCFLDATSADRFYRIDRSQEHLHFVMEISQDEIFILDPDMVVSQPAGTPPGMPDLVVEQASGSPVSSEDHAILQAVIAGDLMKLIESYKNGGSLLIQGPDHCSLLHYAAKTGNGEIVKYILDHGPSELLDMADSETGETALHKAACQRNRAVCQLLVDAGASLRKTDSKGKTPQERAQQAGDPDLAAYLESRQNYKVIGHEDLETAV

SEQ ID NO: 13726 - protein, 1823 aa, Homo sapiens
MADERKDEAKAPHWTSAPLTEASAHSHPPEIKDQGGAGEGLVRSANGFPYREDEEGAFGEHGSQGTYSNTKENGINGELTSADRETAEEVSARIVQVVTAEAVAVLKGEQEKEAQHKDQTAALPLAAEETANLPPSPPPSPASEQTVTVEEASKMEFHDQQELTPSTAEPSDQKEKESEKQSKPGEDLKHAALVSQPETTKTYPDKKDMQGTEEEKAPLALFGHTLVASLEDMKQKTEPSLVVPGIDLPKEPPTPKEQKDWFIEMPTEAKKDEWGLVAPISPGPLTPMREKDVFDDIPKWEGKQFDSPMPSPFQGGSFTLPLDVMKNEIVTETSPFAPAFLQPDDKKSLQQTSGPATAKDSFKIEEPHEAKPDKMAEAPPSEAMTLPKDAHIPVVEEHVMGKVLEEEKEAINQETVQQRDTFTPSGQEPILTEKETELKLEEKTTISDKEAVPKESKPPKPADEEIGIIQTSTEHTFSEQKDQEPTTDMLKQDSFPVSLEQAVTDSAMTSKTLEKAMTEPSALIEKSSIQELFEMRVDDKDKIEGVGAATSAELDMPFYEDKSGMSKYFETSALKEEATKSIEPGSDYYELSDTRESVHESIDTMSPMHKNGDKEFQTGKESQPSPPAQEAGYSTLAQSYPSDLPEEPSSPQERMFTIDPKVYGEKRDLHSKNKDDLTLSRSLGLGGRSAIEQRSMSINLPMSCLDSIALGFNFGRGHDLSPLASDILTNTSGSMDEGDDYLPATTPALEKAPCFPVESKEEEQIEKVKATGEESTQAEISCESPFLAKDFYKNGTVMAPDLPEMLDLAGTRSRLASVSADAEVARRKSVPSETVVEDSRTGLPPVTDENHVIVKTDSQLEDLGYCVFNKYTVPLPSPVQDSENLSGESGTFYEGTDDKVRRDLATDLSLIEVKLAAAGRVKDEFSVDKEASAHISGDKSGLSKEFDQEKKANDRLDTVLEKSEEHADSKEHAKKTEEAGDEIETFGLGVTYEQALAKDLSIPTDASSEKAEKGLSSVPEIAEVEPSKKVEQGLDFAVQGQLDVKISDFGQMASGLNIDDRRATELKLEATQDMTPSSKAPQEADAFMGVESGHMKEGTKVSETEVKEKVAKPDLVHQEAVDKEESYESSGEHESLTMESLKADEGKKETSPESSLIQDEIAVKLSVEIPCPPAVSEADLATDERADVQMEFIQGPKEESKETPDISITPSDVAEPLHETIVSEPAEIQSEEEEIEAQGEYDKLLFRSDTLQITDLGVSGAREEFVETCPSEHKGVIESVVTIEDDFITVVQTTTDEGESGSHSVRFAALEQPEVERRPSPHDEEEFEVEEAAEAQAEPKDGSPEAPASPEREEVALSEYKTETYDDYKDETTIDDSIMDADSLWVDTQDDDRSIMTEQLETIPKEEKAEKEARRSSLEKHRKEKPFKTGRGRISTPERKVAKKEPSTVSRDEVRRKKAVYKKAELAKKTEVQAHSPSRKFILKPAIKYTRPTHLSCVKRKTTAAGGESALAPSVFKQAKDKVSDGVTKSPEKRSSLPRPSSILPPRRGVSGDRDENSFSLNSSISSSARRTTRSEPIRRAGKSGTSTPTTPGSTAITPGTPPSYSSRTPGTPGTPSYPRTPHTPGTPKSAILVPSEKKVAIIRTPPKSPATPKQLRLINQPLPDLKNVKSKIGSTDNIKYQPKGGQVQIVTKKIDLSHVTSKCGSLKNIRHRPGGGRVKIESVKLDFKEKAQAKVGSLDNAHHVPGGGNVKIDSQKLNFREHAKARVDHGAEIITQSPGRSSVASPRRLSNVSSSGSINLLESPQLATLAEDVTAALAKQGL

SEQ ID NO: 13727 - protein, 498 aa, Homo sapiens
MWNFRELSENSQQAANVLSGACGLQRGDRVAVVLPRVPEWWLVILGCIRAGLIFMPGTIQMKSTDILYRLQMSKAKAIVAGDEVIQEVDTVASECPSLRIKLLVSEKSCDGWLNFKKLLNEASTTHHCVETGSQEASAIYFTSGTSGLPKMAEHSYSSLGLKAKMDAGWTGLQASDIMWTISDTGWILNILCSLMEPWALGACTFVHLLPKFDPLVILKTLSSYPIKSMMGAPIVYRMLLQQDLSSYKFPHLQNCVTVGESLLPETLENWRAQTGLDIRESYGQTETGLTCMVSKTMKIKPGYMGTAASCYDVQIIDDKGNVLPPGTEGDIGIRVKPIRPIGIFSGYVDNPDKTAANIRGDFWLLGDRGIKDEDGYFQFMGRANDIINSSGYRIGPSEVENALMEHPAVVETAVISSPDPVRGEVVKAFVVLASQFLSHDPEQLTKELQQHVKSVTAPYKYPRKIEFVLNLPKTVTGKIQRAKLRDKEWKMSGKARAQ

SEQ ID NO: 13728 - protein, 1020 aa, Homo sapiens
MEELIWEQYTVTLQKDSKRGFGIAVSGGRDNPHFENGETSIVISDVLPGGPADGLLQENDRVVMVNGTPMEDVLHSFAVQQLRKSGKVAAIVVKRPRKVQVAALQASPPLDQDDRAFEVMDEFDGRSFRSGYSERSRLNSHGGRSRSWEDSPERGRPHERARSRERDLSRDRSRGRSLERGLDQDHARTRDRSRGRSLERGLDHDFGPSRDRDRDRSRGRSIDQDYERAYHRAYDPDYERAYSPEYRRGARHDARSRGPRSRSREHPHSRSPSPEPRGRPGPIGVLLMKSRANEEYGLRLGSQIFVKEMTRTGLATKDGNLHEGDIILKINGTVTENMSLTDARKLIEKSRGKLQLVVLRDSQQTLINIPSLNDSDSEIEDISEIESNRSFSPEERRHQYSDYDYHSSSEKLKERPSSREDTPSRLSRMGATPTPFKSTGDIAGTVVPETNKEPRYQEDPPAPQPKAAPRTFLRPSPEDEAIYGPNTKMVRFKKGDSVGLRLAGGNDVGIFVAGIQEGTSAEQEGLQEGDQILKVNTQDFRGLVREDAVLYLLEIPKGEMVTILAQSRADVYRDILACGRGDSFFIRSHFECEKETPQSLAFTRGEVFRVVDTLYDGKLGNWLAVRIGNELEKGLIPNKSRAEQMASVQNAQRDNAGDRADFWRMRGQRSGVKKNLRKSREDLTAVVSVSTKFPAYERVLLREAGFKRPVVLFGPIADIAMEKLANELPDWFQTAKTEPKDAGSEKSTGVVRLNTVRQIIEQDKHALLDVTPKAVDLLNYTQWFPIVIFFNPDSRQGVKTMRQRLNPTSNKSSRKLFDQANKLKKTCAHLFTATINLNSANDSWFGSLKDTIQHQQGEAVWVSEGKMEGMDDDPEDRMSYLTAMGADYLSCDSRLISDFEDTDGEGGAYTDNELDEPAEEPLVSSITRSSEPVQHEEIEIAQKHPDIYAVPIKTHKPDPGTPQHTSSRPPEPQKAPSRPYQDTRGSYGSDAEEEEYRQQLSEHSKRGYYGQSARYRDTEL

SEQ ID NO: 13729 - protein, 2175 aa, Homo sapiens
MVILQQGDHVWMDLRLGQEFDVPIGAVVKLCDSGQVQVVDDEDNEHWISPQNATHIKPMHPTSVHGVEDMIRLGDLNEAGILRNLLIRYRDHLIYTYTGSILVAVNPYQLLSIYSPEHIRQYTNKKIGEMPPHIFAIADNCYFNMKRNSRDQCCIISGESGAGKTESTKLILQFLAAISGQHSWIEQQVLEATPILEAFGNAKTIRNDNSSRFGKYIDIHFNKRGAIEGAKIEQYLLEKSRVCRQALDERNYHVFYCMLEGMSEDQKKKLGLGQASDYNYLAMGNCITCEGRVDSQEYANIRSAMKVLMFTDTENWEISKLLAAILHLGNLQYEARTFENLDACEVLFSPSLATAASLLEVNPPDLMSCLTSRTLITRGETVSTPLSREQALDVRDAFVKGIYGRLFVWIVDKINAAIYKPPSQDVKNSRRSIGLLDIFGFENFAVNSFEQLCINFANEHLQQFFVRHVFKLEQEEYDLESIDWLHIEFTDNQDALDMIANKPMNIISLIDEESKFPKGTDTTMLHKLNSQHKLNANYIPPKNNHETQFGINHFAGIVYYETQGFLEKNRDTLHGDIIQLVHSSRNKFIKQIFQADVAMGAETRKRSPTLSSQFKRSLELLMRTLGACQPFFVRCIKPNEFKKPMLFDRHLCVRQLRYSGMMETIRIRRAGYPIRYSFVEFVERYRVLLPGVKPAYKQGDLRGTCQRMAEAVLGTHDDWQIGKTKIFLKDHHDMLLEVERDKAITDRVILLQKVIRGFKDRSNFLKLKNAATLIQRHWRGHNCRKNYGLMRLGFLRLQALHRSRKLHQQYRLARQRIIQFQARCRAYLVRKAFRHRLWAVLTVQAYARGMIARRLHQRLRAEYLWRLEAEKMRLAEEEKLRKEMSAKKAKEEAERKHQERLAQLAREDAERELKEKEAARRKKELLEQMERARHEPVNHSDMVDKMFGFLGTSGGLPGQEGQAPSGFEDLERGRREMVEEDLDAALPLPDEDEEDLSEYKFAKFAATYFQGTTTHSYTRRPLKQPLLYHDDEGDQLAALAVWITILRFMGDLPEPKYHTAMSDGSEKIPVMTKIYETLGKKTYKRELQALQGEGEAQLPEGQKKSSVRHKLVHLTLKKKSKLTEEVTKRLHDGESTVQGNSMLEDRPTSNLEKLHFIIGNGILRPALRDEIYCQISKQLTHNPSKSSYARGWILVSLCVGCFAPSEKFVKYLRNFIHGGPPGYAPYCEERLRRTFVNGTRTQPPSWLELQATKSKKPIMLPVTFMDGTTKTLLTDSATTAKELCNALADKISLKDRFGFSLYIALFDKVSSLGSGSDHVMDAISQCEQYAKEQGAQERNAPWRLFFRKEVFTPWHSPSEDNVATNLIYQQVVRGVKFGEYRCEKEDDLAELASQQYFVDYGSEMILERLLNLVPTYIPDREITPLKTLEKWAQLAIAAHKKGIYAQRRTDAQKVKEDVVSYARFKWPLLFSRFYEAYKFSGPSLPKNDVIVAVNWTGVYFVDEQEQVLLELSFPEIMAVSSSRGAKTTAPSFTLATIKGDEYTFTSSNAEDIRDLVVTFLEGLRKRSKYVVALQDNPNPAGEESGFLSFAKGDLIILDHDTGEQVMNSGWANGINERTKQRGDFPTDSVYVMPTVTMPPREIVALVTMTPDQRQDVVRLLQLRTAEPEVRAKPYTLEEFSYDYFRPPPKHTLSRVMVSKARGKDRLWSHTREPLKQALLKKLLGSEELSQEACLAFIAVLKYMGDYPSKRTRSVNELTDQIFEGPLKAEPLKDEAYVQILKQLTDNHIRYSEERGWELLWLCTGLFPPSNILLPHVQRFLQSRKHCPLAIDCLQRLQKALRNGSRKYPPHLVEVEAIQHKTTQIFHKVYFPDDTDEAFEVESSTKAKDFCQNIATRLLLKSSEGFSLFVKIADKVLSVPENDFFFDFVRHLTDWIKKARPIKDGIVPSLTYQVFFMKKLWTTTVPGKDPMADSIFHYYQELPKYLRGYHKCTREEVLQLGALIYRVKFEEDKSYFPSIPKLLRELVPQDLIRQVSPDDWKRSIVAYFNKHAGKSKEEAKLAFLKLIFKWPTFGSAFFEQTTEPNFPEILLIAINKYGVSLIDPKTKDILTTHPFTKISNWSSGNTYFHITIGNLVRGSKLLCETSLGYKMDDLLTSYISQMLTAMSKQRGSRSGK

SEQ ID NO: 13730 - protein, 97 aa, Homo sapiens
AKLENQESRVSEIHSLVHRLPEKNRQMLQLLMNHLAKYAGGLGKKCVKCSLQWRTAANARWPSQRMLGKCSCNQATKQSFQGDFTYGDQGQIGVCCP

SEQ ID NO: 13731 - protein, 734 aa, Homo sapiens
MGCWGQLLVWFGAAGAILCSSPGSQETFLRSSPLPLASPSPRDPKVSAPPSILEPASPLNSPGTEGSWLFSTCGASGRHGPTQTQCDGAYAGTSVVVTVGAAGQLRGVQLWRVPGPGQYLISAYGAAGGKGAKNHLSRAHGVFVSAIFSLGLGESLYILVGQQGEDACPGGSPESQLVCLGESRAVEEHAAMDGSEGVPGSRRWAGGGGGGGGATYVFRVRAGELEPLLVAAGGGGRAYLRPRDRGRTQASPEKLENRSEAPGSGGRGGAAGGDASETDNLWADGEDGVSFIHPSSELFLQPLAVTENHGEVEIRRHLNCSHCPLRDCQWQAELQLAECLCPEGMELAVDNVTCMDLHKPPGPLVLMVAVVATSTLSLLMVCGVLILGGAWPGPVLASATRCHRGFPSQCYSAQTLPELCSPQDELDFLMEALIISKFRHQNIVRCVGLSLRATPRLILLELMSGGDMKSFLRHSRPHLGQPSPLVMRDLLQLAQDIAQGCHYLEENHFIHRDIAARNCLLSCAGPSRVAKIGDFGMARDIYRASYYRRGDRALLPVKWMPPEAFLEGIFTSKTDSWSFGVLLWEIFSLGYMPYPGRTNQEVLDFVVGGGRMDPPRGCPGPVYRIMTQCWQHEPELRPSFASILERLQYCTQDPDVLNSLLPMELGPTPEEEGTSGLGNRSLECLRPPQPQELSPEKLKSWGGSPLGPWLSSGLKPLKSRGLQPQNLWNPTYRS

SEQ ID NO: 13732 - protein, 836 aa, Homo sapiens
METQELRGALALLLLCFFTSASQDLQVIDLLTVGESRQMVAVAEKIRTALLTAGDIYLLSTFRLPPKQGGVLFGLYSRQDNTRWLEASVVGKINKVTNALHSILGEQTKALVTQLTLFNQILVELRDDIRDQVKEMSLIRNTIMECQVCGFHEQRSHCSPNPCFRGVDCMEVYEYPGYRCGPCPPGLQGNGTHCSDINECAHADPCFPGSSCINTMPGFHCEACPRGYKGTQVSGVGIDYARASKQVCNDIDECNDGNNGGCDPNSICTNTVGSFKCGPCRLGFLGNQSQGCLPARTCHSPAHSPCHIHAHCLFERNGAVSCQCNVGWAGNGNVCGTDTDIDGYPDQALPCMDNNKHCKQDNCLLTPNSGQEDADNDGVGDQCDDDADGDGIKNVEDNCRLFPNKDQQNSDTDSFGDACDNCPNVPNNDQKDTDGNGEGDACDNDVDGDGIPNGLDNCPKVPNPLQTDRDEDGVGDACDSCPEMSNPTQTDADSDLVGDVCDTNEDSDGDGHQDTKDNCPQLPNSSQLDSDNDGLGDECDGDDDNDGIPDYVPPGPDNCRLVPNPNQKDSDGNGVGDVCEDDFDNDAVVDPLDVCPESAEVTLTDFRAYQTVVLDPEGDAQIDPNWVVLNQGMEIVQTMNSDPGLAVGYTAFNGVDFEGTFHVNTVTDDDYAGFLFSYQDSGRFYVVMWKQTEQTYWQATPFRAVAQPGLQLKAVTSVSGPGEHLRNALWHTGHTPDQVRLLWTDPRNVGWRDKTSYRWQLLHRPQVGYIRVKLYEGPQLVADSGVIIDTSMRGGRLGVFCFSQENIIWSNLQYRCNDTVPEDFEPFRRQLLQGRV

SEQ ID NO: 13733 - protein, 327 aa, Homo sapiens
PSEPVVPAVMMATHEPSADLAPKKKPRKSSMPVKIEKEIIDTADEFDDEDDDPNDGGAVVNDMSHDNHCHSQEEMSPGMSVKDFSKHNRTRCISRTEIRRADSMTSEDQEPERDYENESESSEPKLGEESMEGDEHIHSEVSEKVLMNSERPDENHSEPSHQDVIKVKEEFTDPTYDMFYMSQYGLYNGGGASMAALHESFTSSLNYGSPQKFSPEGDLCSSPDPKICYVCKKSFKSSYSVKLHYRNVHLKEMHVCTVAGCNAAFPSRRSRDRNRNLRMERTIGPGHRDSLHLRRGNSNRPGTCCLHTGDSLEESVIVRISCKRLES

SEQ ID NO: 13734 - protein, 263 aa, Homo sapiens
SLLLQVRGSGGARLSTKDPLPTIASREEIEATKNHVLETFYPISPIIDLHECNIYDVKNDTGFQEGYPYPYPHTLYLLDKANLRPHRLQPDQLRAKMILFAFGSALAQARLLYGNDAKVLEQPVVVQSVGTDGRVFHFLVFQLNTTDLDCNEGVKNLAWVDSDQLLYQHFWCLPVIKKRVVVTGPCFSKSQMSTSFVLTPSFNAGEEVMQRNLRASASLPPSTGSPASELVKEQEHAAGRVLRRVMLDSETPREELPAADFWK

SEQ ID NO: 13735 - protein, 143 aa, Homo sapiens
FTAAYPTQSSIPFKSQASVIPESEKKGFNSQAKRFPHKKNDIPGPGFYNVIHQSPVSNSVSLSKKGTCMFPSMCARLDTIISKYPAANAYTIPSDFISKRDFSNSCSSMFQLPSFMKALKFETPAPNYYNVRTLPMLAKYRSN

SEQ ID NO: 13736 - protein, 240 aa, Homo sapiens
MGPWGEPELLVWRPEAVASEPPVPVGLEVKLGALVLLLVLTLLCSLVPICVLRRPGANHEGSASRQKALSLVSCFAGGVFLATCLLDLLPDYLAAIDEALAALHVTLQFPLQEFILAMGFFLVLVMEQITLAYKEQSGPSPLEETRALLGTVNGGPQHWHDGPGVPQASGAPATPSALRACVLVFSLALHSVFEGLAVGLQRDRARAMELCLALLLHKGILAVSLSLRLLQSHLRAQVVA

SEQ ID NO: 13737 - protein, 691 aa, Homo sapiens
MGQGWATAGLPSLLFLLLCYGHPLLVPSQEASQQVTVTHGTSSQATTSSQTTTHQATAHQTSAQSPNLVTDEAEASKFVEEYDRTSQVVWNEYAEANWNYNTNITTETSKILLQKNMQIANHTLKYGTQARKFDVNQLQNTTIKRIIKKVQDLERAALPAQELEEYNKILLDMETTYSVATVCHPNGSCLQLEPDLTNVMATSRKYEDLLWAWEGWRDKAGRAILQFYPKYVELINQAARLNGYVDAGDSWRSMYETPSLEQDLERLFQELQPLYLNLHAYVRRALHRHYGAQHINLEGPIPAHLLGNMWAQTWSNIYDLVVPFPSAPSMDTTEAMLKQGWTPRRMFKEADDFFTSLGLLPVPPEFWNKSMLEKPTDGREVVCHASAWDFYNGKDFRIKQCTTVNLEDLVVAHHEMGHIQYFMQYKDLPVALREGANPGFHEAIGDVLALSVSTPKHLHSLNLLSSEGGSDEHDINFLMKMALDKIAFIPFSYLVDQWRWRVFDGSITKENYNQEWWSLRLKYQGLCPPVPRTQGDFDPGAKFHIPSSVPYIRTAMKLGFSRPWPEAMQLITGQPNMSASAMLSYFKPLLDWLRTENELHGEKLGWPQYNWTPNSARSEGPLPDSGRVSFLGLDLDAQQARVGQWLLLFLGIALLVATLGLSQRLFSIRHRSLHRHSHGPQFGSEVELRHS

SEQ ID NO: 13738 - protein, 849 aa, Homo sapiens
MEPERKGLSLASSSDGDGREENKLKQGISQDLASSSRLDRYKIARQLTEKAIKEKKIFSIYGHYPVVRAALRRKGWVEKKFHFLPKVIPDVEDEGARVNDDTCAKVKENQEMALEKTDNIHDVMSRLVKNEMPYLLWTIKRDIIDYHSLTYDQMLNHYAKTASFTTKIGLCVNMRSLPWYVPANPDSFFPRCYSLCTESEQQEFLEDFRRTMASSILKWVVSHQSCSRSSRSKPRDQREEAGSSDLSSRQDAENAEAKLRGLPGQLVDIACKVCQAYLGQLEHEDIDTSADAVEDLTEAEWEDLTQQYYSLVHGDAFISNSRNYFSQCQALLNRITSVNPQTDIDGLRNIWIIKPAAKSRGRDIVCMDRVEEILELAAADHPLSRDNKWVVQKYIETPLLICDTKFDIRQWFLVTDWNPLTIWFYKESYLRFSTQRFSLDKLDSAIHLCNNAVQKYLKNDVGRSPLLPAHNMWTSTRFQEYLQRQGRGAVWGSVIYPSMKKAIAHAMKVAQDHVEPRKNSFELYGADFVLGRDFRPWLIEINSSPTMHPSTPVTAQLCAQVQEDTIKVAVDRSCDIGNFELLWRQPVVEPPPFSGSDLCVAGVSVRRARRQVLPVCNLKASASLLDAQPLKARGPSAMPDPAQGPPSPALQRDLGLKEEKGLPLALLAPLRGAAESGGAAQPTRTKAAGKVELPACPCRHVDSQAPNTGVPVAQPAKSWDPNQLNAHPLEPVLRGLKTAEGALRPPPGGKGEGTVCSRLPHHGHHVAACQTTGTTWDGGPGVCFLRQLLASELPMGPGLPRDPRAPPCLVCRGLLPPAGPCKRCRSFCAAVLQGASFVRLGGRSCSPRT

SEQ ID NO: 13739 - protein, 1194 aa, Homo sapiens
MTKKEEPPPSRVPRAVRVASLLSEGEELSGDDQGDEEEDDHAYEGVPNGGWHTSSLSLSLPSTIAAPHPMDGPPGGSTPVTPVIKAGWLDKNPPQGSYIYQKRWVRLDTDHLRYFDSNKDAYSKRFISVACISHVAAIGDQKFEVITNNRTFAFRAESDVERKEWMQALQQAMAEQRARARLSSAYLLGVPGSEQPDRAGSLELRGFKNKLYVAVVGDKVQLYKNLEEYHLGIGITFIDMSVGNVKEVDRRSFDLTTPYRIFSFSADSELEKEQWLEAMQGAIAEALSTSEVAERIWAAAPNRFCADCGAPQPDWASINLCVVICKRCAGEHRGLGAGVSKVRSLKMDRKVWTETLIELFLQLGNGAGNRFWAANVPPSEALQPSSSPSTRRCHLEAKYREGKYRRYHPLFGNQEELDKALCAAVTTTDLAETQALLGCGAGINCFSGDPEAPTPLALAEQAGQTLQMEFLRNNRTTEVPRLDSMKPLEKHYSVVLPTVSHSGFLYKTASAGKLLQDRRAREEFSRRWCVLGDGVLSYFENERAVTPNGEIRASEIVCLAVPPPDTHGFEHTFEVYTEGERLYLFGLESAEQAHEWVKCIAKAFVPPLAEDLLARDFERLGRLPYKAGLSLQRAQEGWFSLSGSELRAVFPEGPCEEPLQLRKLQELSIQGDSENQVLVLVERRRTLYIQGERRLDFMGWLGAIQKAAASMGDTLSEQQLGDSDIPVIVYRCVDYITQCGLTSEGIYRKCGQTSKTQRLLESLRQDARSVHLKEGEQHVDDVSSALKRFLRDLPDGLFTRAQRLTWLEASEIEDEEEKVSRYRELLVRLPPVNRATVKALISHLYCVQCFSDTNQMNVHNLAIVFGPTLFQTDGQDYKAGRVVEDLINHYVVVFSVDEEELRKQREEITAIVKMRVAGTASGTQHAGDFICTVYLEEKKAETEQHIKVPASMTAEELTLEILDRRNVGIREKDYWTCFEVNEREEAERPLHFAEKVLPILHGLGTDSHLVVKKHQAMEAMLLYLASRVGDTKHGMMKFREDRSLLGLGLPSGGFHDRYFILNSSCLRLYKEVRSHRPEKEWPIKSLKVYLGVKKKLRPPTCWGFTVVHETEKHEKQQWYLCCDTQMELREWFATFLFVQHDGLVWPSEPSRVSRAVPEVRLGSVSLIPLRGSENEMRRSVAAFTADPLSLLRNV

SEQ ID NO: 13740 - protein, 493 aa, Homo sapiens
MCELYSKRDTLGLRKKHIGPSCKVFFASDPIKIVRAQRQYMFDENGEQYLDCINNVAHGVVKAALKQMELLNTNSRFLHDNIVEYAKRLSATLPEKLSVCYFTNSGSEANDLALRLARQFRGHQDVITLDHAYHGHLSSLIEISPYKFQKGKDVKKEFVHVAPTPDTYRGKYREDHADSASAYADEVKKIIEDAHNSGRKIAAFIAESMQSCGGQIIPPAGYFQKVAEYVHGAGGVFIADEVQVGFGRVGKHFWSFQMYGEDFVPDIVTMGKPMGNGHPVACVVTTKEIAEAFSSSGMEYFNTYGGNPVSCAVGLAVLDIIENEDLQGNAKRVGNYLTELLKKQKAKHTLIGDIRGIGLFIGIDLVKDHLKRTPATAEAQHIIYKMKEKRVLLSADGPHRNVLKIKPPMCFTEEDAKFMVDQLDRILTVLEEAMGTKTESVTSENTPCKTKMLKEAHIELLRDSTTDSKENPSRKRNGMCTDTHSLLSKRLKT

SEQ ID NO: 13741 - protein, 301 aa, Homo sapiens
MSFSLAPFLSPQSWPPPLPPAQSEIMKVVNLKQAILQAWKERWSDYQWAINMKKFFPKGATWDILNLADALLEQAMIGPSPNPLILSYLKYAISSQFDDFSRDLCVQALLDIMDMFCDRLSCHGKAEECIGLCRALLSALHWLLRCTAASAERLREGLEAGTPAAGEKQLAMCLQRLEKTLSSTKNRALLHIAKLEEASSWTAIEHSLLKLGEILANLSNPQLRSQAEQCGTLIRSIPTMLSVHAEQMHKTGFPTVHAVILLEGTMNLTGETQSLVEQLTMVKRMQHIPTPLFVLEIWKAC

SEQ ID NO: 13742 - protein, 141 aa, Homo sapiens
MHMMVSKPEQWVKPMAVAGANQYTFHLEATENPGALIKDIRENGMKVGLAIKPGTSVEYLAPWANQIDMALVMTVEPGFGGQKFMEDMMPKVHWLRTQFPSLDIEVDGGVGPDTVHKCAEPFGRSLSFTALEVRNFSKIRN

SEQ ID NO: 13743 - protein, 463 aa, Homo sapiens
MGCDRNCGLIAGAVIGAVLAVFGGILMPVGDLLIQKTIKKQVVLEEGTIAFKNWVKTGTEVYRQFWIFDVQNPQEVMMNSSNIQVKQRGPYTYRVRFLAKENVTQDAEDNTVSFLQPNGAIFEPSLSVGTEADNFTVLNLAVAAASHIYQNQFVQMILNSLINKSKSSMFQVRTLRELLWGYRDPFLSLVPYPVTTTVGLFYPYNNTADGVYKVFNGKDNISKVAIIDTYKGKRNLSYWESHCDMINGTDAASFPPFVEKSQVLQFFSSDICRSIYAVFESDVNLKGIPVYRFVLPSKAFASPVENPDNYCFCTEKIISKNCTSYGVLDISKCKEGRPVYISLPHFLYASPDVSEPIDGLNPNEEEHRTYLDIEPITGFTLQFAKRLQVNLLVKPSEKIQVLKNLKRNYIVPILWLNETGTIGDEKANMFRSQVTGKINLLGLIEMILLSVGVVMFVAFMISY

SEQ ID NO: 13744 - protein, 573 aa, Homo sapiens
MFSCFCFSLQDNSFSSTTVTECDEDPVSLHEDQTDCSSLRDENNKENYPDAGALVEEHAPPSWEPQQQNVEATVLVDSVLRPSMGNFKSRKPKSIFKAESGRSHGESQETEHVVSSQSECQVRAGTPAHESPQNNAFKCQETVRLQPRIDQRTAISPKDAFETRQDLNEEEAAQVHGVKDPAPASTQSVLADGTDSADPSPVHKDGQNEADSAPEDLHSVGTSRLLYHITDGDNPLLSPRCSIFSQSQRFNLDPESAPSPPSTQQFMMPRSSSRCSCGDGKEPQTITQLTKHIQSLKRKIRKFEEKFEQEKKYRPSHGDKTSNPEVLKWMNDLAKGRKQLKELKLKLSEEQGSAPKGPPRNLLCEQPTVPRENGKPEAAGPEPSSSGEETPDAALTCLKERREQLPPQEDSKVTKQDKNLIKPLYDRYRIIKQILSTPSLIPTIQEEEDSDEDRPQGSQQPSLADPASHLPVGDHLTYSNETEPVRALLPDEKKEVKPPALSMSNLHEATMPVLLDHLRETRADKKRLRKALREFEEQFFKQTGRYVSAERFLKLILPRELLLKMSCNFLQER

SEQ ID NO: 13745 - protein, 442 aa, Homo sapiens
MPRARKGNTLRKGGQRRGGGARSSAQADSGSSDDEAASEARSTASECPSLLSTTAEDSLGGDVVDEQGQQEDLEEKLKEYVDCLTDKSAKTRQGALESLRLALASRLLPDFLLERRLTLADALEKCLKKGKGEEQALAAAVLGLLCVQLGPGPKGEELFHSLQPLLVSVLSDSTASPAARLHCASALGLGCYVAAADIQDLVSCLACLESVFSRFYGLGGSSTSPVVPASLHGLLSAALQAWALLLTICPSTQISHILDRQLPRLPQLLSSESVNLRIAAGETIALLFELARDLEEEFVYEDMEALCSVLRTLATDSNKYRAKADRRRQRSTFRAVLHSVEGGECEEEIVRFGFEVLYMDSWARHRIYAAFKEVLGSGMHHHLQNNELLRDIFGLGPVLLLDATALKACKVPRFEKHLYNAAAFKARTKARSRVRDKRADIL

SEQ ID NO: 13746 - protein, 782 aa, Homo sapiens
MDSSIHLSSLISRHDDEATRTSTSEGLEEGEVEGETLLIVESEDQASVDLSHDQSGDSLNSDEGDVSWMEEQLSYFCDKCQKWIPASQLREQLSYLKGDNFFRFTCSDCSADGKEQYERLKLTWQQVVMLAMYNLSLEGSGRQGYFRWKEDICAFIEKHWTFLLGNRKKTSTWWSTVAGCLSVGSPMYFRSGAQEFGEPGWWKLVHNKPPTMKPEGEKLSASTLKIKAASKPTLDPIITVEGLRKRASRNPVESAMELKEKRSRTQEAKDIRRAQKEAAGFLDRSTSSTPVKFISRGRRPDVILEKGEVIDFSSLSSSDRTPLTSPSPSPSLDFSAPGTPASHSATPSLLSEADLIPDVMPPQALFHDDDEMEGDGVIDPGMEYVPPPAGSVASGPVVGVRKKVRGPEQIKQEVESEEEKPDRMDIDSEDTDSNTSLQTRAREKRKPQLEKDTKPKEPRYTPVSIYEEKLLLKRLEACPGAVAMTPEARRLKRKLIVRQAKRDRGLPLFDLDQVVNAALLLVDGIYGAKEGGISRLPAGQATYRTTCQDFRILDRYQTSLPSRKGFRHQTTKFLYRLVGSEDMAVDQSIVSPYTSRILKPYIRRDYETKPPKLQLLSQIRSHLHRSDPHWTPEPDAPLDYCYVRPNHIPTINSMCQEFFWPGIDLSECLQYPDFSVVVLYKKVIIAFGFMVPDVKYNEAYISFLFVHPEWRRAGIATFMIYHLIQTCMGKDVTLHVSASNPAMLLYQKFGFKTEEYVLDFYDKYYPLESTECKHAFFLRLRR

SEQ ID NO: 13747 - protein, 1433 aa, Homo sapiens
MARAQALVLALTFQLCAPETETPAAGCTFEEASDPAVPCEYSQAQYDDFQWEQVRIHPGTRAPADLPHGSYLMVNTSQHAPGQRAHVIFQSLSENDTHCVQFSYFLYSRDGHSPGTLGVYVRVNGGPLGSAVWNMTGSHGRQWHQAELAVSTFWPNEYQVLFEALISPDRRGYMGLDDILLLSYPCAKAPHFSRLGDVEVNAGQNASFQCMAAGRAAEAERFLLQRQSGALVPAAGVRHISHRRFLATFPLAAVSRAEQDLYRCVSQAPRGAGVSNFAELIVKEPPTPIAPPQLLRAGPTYLIIQLNTNSIIGDGPIVRKEIEYRMARGPWAEVHAVSLQTYKLWHLDPDTEYEISVLLTRPGDGGTGRPGPPLISRTKCAEPMRAPKGLAFAEIQARQLTLQWEPLGYNVTRCHTYTVSLCYHYTLGSSHNQTIRECVKTEQGVSRYTIKNLLPYRNVHVRLVLTNPEGRKEGKEVTFQTDEDVPSGIAAESLTFTPLEDMIFLKWEEPQEPNGLITQYEISYQSIESSDPAVNVPGPRRTISKLRNETYHVFSNLHPGTTYLFSVRARTGKGFGQAALTEITTNISAPSFDYADMPSPLGESENTITVLLRPAQGRGAPISVYQVIVEEERARRLRREPGGQDCFPVPLTFEAALARGLVHYFGAELAASSLPEAMPFTVGDNQTYRGFWNPPLEPRKAYLIYFQAASHLKGETRLNCIRIARKAACKESKRPLEVSQRSEEMGLILGICAGGLAVLILLLGAIIVIIRKGKPVNMTKATVNYRQEKTHMMSAVDRSFTDQSTLQEDERLGLSFMDTHGYSTRGDQRSGGVTEASSLLGGSPRRPCGRKGSPYHTGQLHPAVRVADLLQHINQMKTAEGYGFKQEYESFFEGWDATKKKDKVKGSRQEPMPAYDRHRVKLHPMLGDPNADYINANYIDGYHRSNHFIATQGPKPEMVYDFWRMVWQEHCSSIVMITKLVEVKCSRYWPEDSDTYGDIKIMLVKTETLAEYVVRTFALERRGYSARHEVRQFHFTAWPEHGVPYHATGLLAFIRRVKASTPPDAGPIVIHCSAGTGRTGCYIVLDVMLDMAECEGVVDIYNCVKTLCSRRVNMIQTEEQYIFIHDAILEACLCGETTIPVSEFKATYKEMIRIDPQSNSSQLREEFQTLNSVTPPLDVEECSIALLPRNRDKNRSMDVLPPDRCLPFLISTDGDSNNYINAALTDSYTRSAAFIVTLHPLQSTTPDFWRLVYDYGCTSIVMLNQLNQSNSAWPCLQYWPEPGRQQYGLMEVEFMSGTADEDLVARVFRVQNISRLQEGHLLVRHFQFLRWSAYRDTPDSKKAFLHLLAEVDKWQAESGDGRTIVHCLNGGGRSGTFCACATVLEMIRCHNLVDVFFAAKTLRNYKPNMVETMDQYHFCYDVALEYLEGLESR

SEQ ID NO: 13748 - protein, 255 aa, Homo sapiens
EVVPEKKVPLVVPKKPEAPPAKVPEVPKEVVPEKKVAVPKKPEVPPAKVPEVPKKPVLEEKPAVPVPERAESPPPEVYEEPEEIAPEEEIAPEEEKPVPVAEEEEPEVPPPAVPEEPKKIIPEKKVPVIKKPEAPPPKEPEPEKVIEKPKLKPRPPPPPPAPPKEDVKEKIFQLKAIPKKKVPEKPQVPEKVELTPLKVPEPPPPKPVEEVEVPTVTKRERKIPEPTKVPEIKPAIPLPAPEPKPKPEAEVKTIK

SEQ ID NO: 13749 - protein, 628 aa, Homo sapiens
MSDKSDLKAELERKKQRLAQIREEKKRKEEERKKKEADMQQKKEPVQDDSDLDRKRRETEALLQSIGISPEPPLVPTPMSPSSKSVSTPSEAGSQDSGDLGPLTRTLQWDTDPSVLQLQSDSELGRRLHKLGVSKVTQVDFLPREVVSYSKETQTPLATHQSEEDEEDEEMVESKVGQDSELENQDKKQEVKEAPPRELTEEEKQQILHSEEFLIFFDRTIRVIERALAEDSDIFFDYSGRELEEKDGDVQAGANLSFNRQFYDEHWSKHRVVTCMDWSLQYPELMVASYNNNEDAPHEPDGVALVWNMKFKKTTPEYVFHCQSSVMSVCFARFHPNLVVGGTYSGQIVLWDNRSHRRTPVQRTPLSAAAHTHPVYCVNVVGTQNAHNLITVSTDGKMCSWSLDMLSTPQESMELVYNKSKPVAVTGMAFPTGDVNNFVVGSEEGTVYTACRHGSKAGIGEVFEGHQGPVTGINCHMAVGPIDFSHLFVTSSFDWTVKLWTTKHNKPLYSFEDNADYVYDVMWSPVHPALFACVDGMGRLDLWNLNNDTEVPTASVAIEGASALNRVRWAQAGKEVAVGDSEGRIWVYDVGELAVPHNDEWTRFARTLVEIRANRADSEEEGTVELSA

SEQ ID NO: 13750 - protein, 246 aa, Homo sapiens; identical to SEQ ID NO: 741

SEQ ID NO: 13751 - protein, 515 aa, Homo sapiens
DGLEEKQLKFVKKLVQCYQNGLPLRDLAQIFKILNLCSGKIKNQPRFIESAYDIIKLCGLPFLKKKVSDEITYAEDTANSIALLGDLMKIPSSELRIQICKCIVDFYHAEPPKKHIPGYQQASSSYKIQMAEVGGLAKTMVQSMTLLENQLVEKLWVLKVLQHLSTSEVNCTIMMKAQAASGICTHLNDPDPSGQLLFRSSEILWNLLEKSSKEEVIQQLSNLECLLALKEVFKNLFMRGFSHYDRQLRNDILVITTIIAQNPEAPMILLIDGKVILALFTYVKKPEKQKIIDWSAAQHEELQLHAIATLSSVAPLLIEEYMSCQGNARVLAFLEWCESEDPFFSHGNSFHGTGGRGNKFAQMRYSLRLLRAVVYLEDETVNKDLCEKGTIQQMIGIFKNIISKPNEKEEAIVLEIQSDILLILSGLCENHIQRKEIFGTEGVDIVLHVMKTDPRKLQSGLGYNVLLFSTLDSIWCCILGCYPSEDYFLEKEGIFLLLDLLAKDQTAASLLIKLW

SEQ ID NO: 13752 - protein, 89 aa, Homo sapiens
MEDRHVSLPSFNQLFGLSDPVNRAYFAVFDGHGGVDAARYAAVHVHTNAARQPELPTDPEGALREAFRRTDQMFLRKAKRERLQSGTTG

SEQ ID NO: 13753 - protein, 334 aa, Homo sapiens
RVESEESGDEEGKKHSSGIVADLSEQSLKDGEERGEEDPEEEHELPVDMETINLDRDAEDVDLNHYRIGKIEGFETLCLRQNLIKCIENLEELQSLRELDLYDNQIKKIENLEALTELEILDISFNLLRNIEGVDKLTRLKKLFLVNNKISKIENLSNLHQLQMLELGSNRIRAIENIDTLTNLESLFLGKNKITKLQNLDALTNLTVLSMQSNRLTKIEGLQNLVNLRELYLSHNGIEVIEGLENNNKLTMLDIASNRIKKIENISHLTELQEFWMNDNLLESWSDLDELKGARSLETVYLERNPLQKDPQYRRKVMLALPSVRQIDATFVRF

SEQ ID NO: 13754 - protein, 252 aa, Homo sapiens
SVNKLFGEKSASFREEYIRLCQKYYSSEPQAVDFLECAEEARKKINSWVKTQTKGKIPNLLPEGSVDGDTRMVLVNAVYFKGKWKTPFEKKLNGLYPFRVNSAQRTPVQMMYLREKLNIGYIEDLKAQILELPYAGDVSMFLLLPDEIADVSTGLELLESEITYDKLNKWTSKDKMAEDEVEVSSMDSLATSINQFALELSKKLAESAQGKNIFFSSWSISTSLTIVYLGAKGTTAAQMAQVLQFNRDQGVK

SEQ ID NO: 13755 - protein, 351 aa, Homo sapiens
ETEEELIENDYRVSTSKITKQSFKEIEKVALPTNTTSSRPRTECCSDAGDSPLKPVSCPKSKASDKRSLLPHQISQIYDELFQIHLKLQCETAAQQKFAEELQKRERFLLEREQLLFRHENALSKIKGVEEEVLTRFQIIKEHDAEVEHLTEVLKEKNKETKRLRSSFDALKELNDTLKKQLNEASEENRKIDIQAKRVQARLDNLQRKYEFMTIQRLKGSSHAVHEMKSLKQEKAPVSKTYKVPLNGQVYELLTVFMDWISDHHLSKVKHEESGMDGKKPQLKFASQRNDIQEKCVKLLPLMTEQLQWMPFVNIKLHEPFVKFIYWSLRQLDAGAQHSTMTSTLRRLGED

SEQ ID NO: 13756 - protein, 1555 aa, Homo sapiens
MDEEEDGAGAEESGQPRSFMRLNDLSGAGGRPGPGSAEKDPGSADSEAEGLPYPALAPVVFFYLSQDSRPRSWCLRTVCNPWFERISMLVILLNCVTLGMFRPCEDIACDSQRCRILQAFDDFIFAFFAVEMVVKMVALGIFGKKCYLGDTWNRLDFFIVIAGMLEYSLDLQNVSFSAVRTVRVLRPLRAINRVPSMRILVTLLLDTLPMLGNVLLLCFFVFFIFGIVGVQLWAGLLRNRCFLPENFSLPLSVDLERYYQTENEDESPFICSQPRENGMRSCRSVPTLRGDGGGGPPCGLDYEAYNSSSNTTCVNWNQYYTNCSAGEHNPFKGAINFDNIGYAWIAIFQVITLEGWVDIMYFVMDAHSFYNFIYFILLIIVGSFFMINLCLVVIATQFSETKQRESQLMREQRVRFLSNASTLASFSEPGSCYEELLKYLVYILRKAARRLAQVSRAAGVRVGLLSSPAPLGGQETQPSSSCSRSHRRLSVHHLVHHHHHHHHHYHLGNGTLRAPRASPEIQDRDANGSRRLMLPPPSTPALSGAPPGGAESVHSFYHADCHLEPVRCQAPPPRSPSEASGRTVGSGKVYPTVHTSPPPETLKEKALVEVAASSGPPTLTSLNIPPGPYSSMHKLLETQSTGACQSSCKISSPCLKADSGACGPDSCPYCARAGAGEVELADREMPDSDSEAVYEFTQDAQHSDLRDPHSRRQRSLGPDAEPSSVLAFWRLICDTFRKIVDSKYFGRGIMIAILVNTLSMGIEYHEQPEELTNALEISNIVFTSLFALEMLLKLLVYGPFGYIKNPYNIFDGVIVVISVWEIVGQQGGGLSVLRTFRLMRVLKLVRFLPALQRQLVVLMKTMDNVATFCMLLMLFIFIFSILGMHLFGCKFASERDGDTLPDRKNFDSLLWAIVTVFQILTQEDWNKVLYNGMASTSSWAALYFIALMTFGNYVLFNLLVAILVEGFQAEEISKREDASGQLSCIQLPVDSQGGDANKSESEPDFFSPSLDGDGDRKKCLALVSLGEHPELRKSLLPPLIIHTAATPMSLPKSTSTGLGEALGPASRRTSSSGSAEPGAAHEMKSPPSARSSPHSPWSAASSWTSRRSSRNSLGRAPSLKRRSPSGERRSLLSGEGQESQDEEESSEEERASPAGSDHRHRGSLEREAKSSFDLPDTLQVPGLHRTASGRGSASEHQDCNGKSASGRLARALRPDDPPLDGDDADDEGNLSKGERVRAWIRARLPACCLERDSWSAYIFPPQSRFRLLCHRIITHKMFDHVVLVIIFLNCITIAMERPKIDPHSAERIFLTLSNYIFTAVFLAEMTVKVVALGWCFGEQAYLRSSWNVLDGLLVLISVIDILVSMVSDSGTKILGMLRVLRLLRTLRPLRVISRAQGLKLVVETLMSSLKPIGNIVVICCAFFIIFGILGVQLFKGKFFVCQGEDTRNITNKSDCAEASYRWVRHKYNFDNLGQVSPRLRGGAVVKEAGGGTGPCLVIPADSGGGGLHEEISPSHPLLSNHQHVAKPSPSHSAPKSGPMGSLAVLKDEETEAQRG

SEQ ID NO: 13757 - protein, 758 aa, Homo sapiens
MEDPAAPGTGGPPANGNGNGGGKGKQAAPKGREAFRSQRRESEGSVDCPTLEFEYGDADGHAAELSELYSYTENLEFTNNRRCFEEDFKTQVQGKEWLELEEDAQKAYIMGLLDRLEVVSRERRLKVARAVLYLAQGTFGECDSEVDVLHWSRYNCFLLYQMGTFSTFLELLHMEIDNSQACSSALRKPAVSIADSTELRVLLSVMYLMVENIRLERETDPCGWRTARETFRTELSFSMHNEEPFALLLFSMVTKFCSGLAPHFPIKKVLLLLWKVVMFTLGGFEHLQTLKVQKRAELGLPPLAEDSIQVVKSMRAASPPSYTLDLGESQLAPPPSKLRGRRGSRRQLLTKQDSLDIYNERDLFKTEEPATEEEEESAGDGERTLDGELDLLEQDPLVPPPPSQAPLSAERVAFPKGLPWAPKVRQKDIEHFLEMSRNKFIGFTLGQDTDTLVGLPRPIHESVKTLKQHKYISIADVQIKNEEELEKCPMSLGEEVVPETPCEILYQGMLYSLPQYMIALLKILLAAAPTSKAKTDSINILADVLPEEMPITVLQSMKLGIDVNRHKEIIVKSISTLLLLLLKHFKLNHIYQFEYVSQHLVFANCIPLILKFFNQNILSYITAKNSISVLDYPCCTIQDLPELTTESLEAGDNSQFCWRNLFSCINLLRLLNKLTKWKHSRTMMLVVFKSAPILKRALKVKQAMLQLYVLKLLKLQTKYLGRQWRKSNMKTMSAIYQKVRHRMNDDWAYGNGESSQSS

SEQ ID NO: 13758 - protein, 664 aa, Homo sapiens
MERPEEGKQSPPPQPWGRLLRLGAEEGEPHVLLRKREWTIGRRRGCDLSFPSNKLVSGDHCRIVVDEKSGQVTLEDTSTSGTVINKLKVVKKQTCPLQTGDVIYLVYRKNEPEHNVAYLYESLSEKQGMTQESFEANKENVFHGTKDTSGAGAGRGADPRVPPSSPATQVCFEEPQPSTSTSDLFPTASASSTEPSPAGRERSSSCGSGGGGISPKGSGPSVASDEVSSFASALPDRKTASFSSLEPQDQEDLEPVKKKMRGDGDLDLNGQLLVAQPRRNAQTVHEDVRAAAGKPDKMEETLTCIICQDLLHDCVSLQPCMHTFCAACYSGWMERSSLCPTCRCPVERICKNHILNNLVEAYLIQHPDKSRSEEDVQSMDARNKITQDMLQPKVRRSFSDEEGSSEDLLELSDVDSESSDISQPYVVCRQCPEYRRQAAQPPHCPAPEGEPGAPQALGDAPSTSVSLTTAVQDYVCPLQGSHALCTCCFQPMPDRRAEREQDPRVAPQQCAVCLQPFCHLYWGCTRTGCYGCLAPFCELNLGDKCLDGVLNNNSYESDILKNYLATRGLTWKNMLTESLVALQRGVFLLSDYRVTGDTVLCYCCGLRSFRELTYQYRQNIPASELPVAVTSRPDCYWGRNCRTQVKAHHAMKFNHICEQTRFKN

SEQ ID NO: 13759 - protein, 3460 aa, Homo sapiens
MERSGWARQTFLLALLLGATLRARAAAGYYPRFSPFFFLCTHHGELEGDGEQGEVLISLHIAGNPTYYVPGQEYHVTISTSTFFDGLLVTGLYTSTSVQASQSIGGSSAFGFGIMSDHQFGNQFMCSVVASHVSHLPTTNLSFIWIAPPAGTGCVNFMATATHRGQVIFKDALAQQLCEQGAPTDVTVHPHLAEIHSDSIILRDDFDSYHQLQLNPNIWVECNNCETGEQCGAIMHGNAVTFCEPYGPRELITTGLNTTTASVLQFSIGSGSCRFSYSDPSIIVLYAKNNSADWIQLEKIRAPSNVSTIIHILYLPEDAKGENVQFQWKQENLRVGEVYEACWALDNILIINSAHRQVVLEDSLDPVDTGNWLFFPGATVKHSCQSDGNSIYFHGNEGSEFNFATTRDVDLSTEDIQEQWSEEFESQPTGWDVLGAVIGTECGTIESGLSMVFLKDGERKLCTPSMDTTGYGNLRFYFVMGGICDPGNSHENDIILYAKIEGRKEHITLDTLSYSSYKVPSLVSVVINPELQTPATKFCLRQKNHQGHNRNVWAVDFFHVLPVLPSTMSHMIQFSINLGCGTHQPGNSVSLEFSTNHGRSWSLLHTECLPEICAGPHLPHSTVYSSENYSGWNRITIPLPNAALTRNTRIRWRQTGPILGNMWAIDNVYIGPSCLKFCSGRGQCTRHGCKCDPGFSGPACEMASQTFPMFISESFGSSRLSSYHNFYSIRGAEVSFGCGVLASGKALVFNKDGRRQLITSFLDSSQSRFLQFTLRLGSKSVLSTCRAPDQPGEGVLLHYSYDNGITWKLLEHYSYLSYHEPRIISVELPGDAKQFGIQFRWWQPYHSSQREDVWAIDEIIMTSVLFNSISLDFTNLVEVTQSLGFYLGNVQPYCGHDWTLCFTGDSKLASSMRYVETQSMQIGASYMIQFSLVMGCGQKYTPHMDNQVKLEYSTNHGLTWHLVQEECLPSMPSCQEFTSASIYHASEFTQWRRVIVLLPQKTWSSATRFRWSQSYYTAQDEWALDSIYIGQQCPNMCSGHGSCDHGICRCDQGYQGTECHPEAALPSTIMSDFENQNGWESDWQEVIGGEIVKPEQGCGVISSGSSLYFSKAGKRQLVSWDLDTSWVDFVQFYIQIGGESASCNKPDSREEGVLLQYSNNGGIQWHLLAEMYFSDFSKPRFVYLELPAAAKTPCTRFRWWQPVFSGEDYDQWAVDDIIILSEKQKQIIPVINPTLPQNFYEKPAFDYPMNQMSVWLMLANEGMVKNETFCAATPSAMIFGKSDGDRFAVTRDLTLKPGYVLQFKLNIGCANQFSSTAPVLLQYSHDAGMSWFLVKEGCYPASAGKGCEGNSRELSEPTMYHTGDFEEWTRITIVIPRSLASSKTRFRWIQESSSQKNVPPFGLDGVYISEPCPSYCSGHGDCISGVCFCDLGYTAAQGTCVSNVPNHNEMFDRFEGKLSPLWYKITGAQVGTGCGTLNDGKSLYFNGPGKREARTVPLDTRNIRLVQFYIQIGSKTSGITCIKPRTRNEGLIVQYSNDNGILWHLLRELDFMSFLEPQIISIDLPQDAKTPATAFRWWQPQHGKHSAQWALDDVLIGMNDSSQTGFQDKFDGSIDLQANWYRIQGGQVDIDCLSMDTALIFTENIGKPRYAETWDFHVSASTFLQFEMSMGCSKPFSNSHSVQLQYSLNNGKDWHLVTEECVPPTIGCLHYTESSIYTSERFQNWKRITVYLPLSTISPRTRFRWIQANYTVGADSWAIDNVVLASGCPWMCSGRGICDAGRCVCDRGFGGPYCVPVVPLPSILKDDFNGNLHPDLWPEVYGAERGNLNGETIKSGTSLIFKGEGLRMLISRDLDCTNTMYVQFSLRFIAKSTPERSHSILLQFSISGGITWHLMDEFYFPQTTNILFINVPLPYTAQTNATRFRLWQPYNNGKKEEIWIVDDFIIDGNNVNNPVMLLDTFDFGPREDNWFFYPGGNIGLYCPYSSKGAPEEDSAMVFVSNEVGEHSITTRDLNVNENTIIQFEINVGCSTDSSSADPVRLEFSRDFGATWHLLLPLCYHSSSHVSSLCSTEHHPSSTYYAGTMQGWRREVVHFGKLHLCGSVRFRWYQGFYPAGSQPVTWAIDNVYIGPQCEEMCNGQGSCINGTKCICDPGYSGPTCKISTKNPDFLKDDFEGQLESDRFLLMSGGKPSRKCGILSSGNNLFFNEDGLRMLMTRDLDLSHARFVQFFMRLGCGKGVPDPRSQPVLLQYSLNGGLSWSLLQEFLFSNSSNVGRYIALEIPLKARSGSTRLRWWQPSENGHFYSPWVIDQILIGGNISGNTVLEDDFTTLDSRKWLLHPGGTKMPVCGSTGDALVFIEKASTRYVVSTDVAVNEDSFLQIDFAASCSVTDSCYAIELEYSVDLGLSWHPLVRDCLPTNVECSRYHLQRILVSDTFNKWTRITLPLPPYTRSQATRFRWHQPAPFDKQQTWAIDNVYIGDGCIDMCSGHGRCIQGNCVCDEQWGGLYCDDPETSLPTQLKDNFNRAPSSQNWLTVNGGKLSTVCGAVASGMALHFSGGCSRLLVTVDLNLTNAEFIQFYFMYGCLITPNNRNQGVLLEYSVNGGITWNLLMEIFYDQYSKPGFVNILLPPDAKEIATRFRWWQPRHDGLDQNDWAIDNVLISGSADQRTVMLDTFSSAPVPQHERSPADAGPVGRIAFDMFMEDKTSVNEHWLFHDDCTVERFCDSPDGVMLCGSHDGREVYAVTHDLTPTEGWIMQFKISVGCKVSEKIAQNQIHVQYSTDFGVSWNYLVPQCLPADPKCSGSVSQPSVFFPTKGWKRITYPLPESLVGNPVRFRFYQKYSDMQWAIDNFYLGPGCLDNCRGHGDCLREQCICDPGYSGPNCYLTHTLKTFLKERFDSEEIKPDLWMSLEGGSTCTECGILAEDTALYFGGSTVRQAVTQDLDLRGAKFLQYWGRIGSENNMTSCHRPICRKEGVLLDYSTDGGITWTLLHEMDYQKYISVRHDYILLPEDALTNTTRLRWWQPFVISNGIVVSGVERAQWALDNILIGGAEINPSQLVDTFDDEGTSHEENWSFYPNAVRTAGFCGNPSFHLYWPNKKKDKTHNALSSRELIIQPGYMMQFKIVVGCEATSCGDLHSVMLEYTKDARSDSWQLVQTQCLPSSSNSIGCSPFQFHEATIYNSVNSSSWKRITIQLPDHVSSSATQFRWIQKGEETEKQSWAIDHVYIGEACPKLCSGHGYCTTGAICICDESFQGDDCSVFSHDLPSYIKDNFESARVTEANWETIQGGVIGSGCGQLAPYAHGDSLYFNGCQIRQAATKPLDLTRASKIMFVLQIGSMSQTDSCNSDLSGPHAVDKAVLLQYSVNNGITWHVIAQHQPKDFTQAQRVSYNVPLEARMKGVLLRWWQPRHNGTGHDQWALDHVEVVLVSTRKQNYMMNFSRQHGLRHFYNRRRRSLRRYP

SEQ ID NO: 13760 - protein, 661 aa, Homo sapiens
MIWEYNVVIIVMACREFEMGRKKCERYWPLYGEDPITFAPFKISCEDEQARTDYFIRTLLLEFQNESRRLYQFHYVNWPDHDVPSSFDSILDMISLMRKYQEHEDVPICIHCSAGCGRTGAICAIDYTWNLLKAGKIPEEFNVFNLIQEMRTQRHSAVQTKEQYELVHRAIAQLFEKQLQLYEIHGAQKIADGVNEINTENMVSSIEPEKQDSPPPKPPRTRSCLVEGDAKEEILQPPEPHPVPPILTPSPPSAFPTVTTVWQDNDRYHPKPVLHMVSSEQHSADLNRNYSKSTELPGKNESTIEQIDKKLERNLSFEIKKVPLQEGPKSFDGNTLLNRGHAIKIKSASPCIADKISKPQELSSDLNVGDTSQNSCVDCSVTQSNKVSVTPPEESQNSDTPPRPDRLPLDEKGHVTWSFHGPENAIPIPDLSEGNSSDINYQTRKTVSLTPSPTTQVETPDLVDHDNTSPLFRTPLSFTNPLHSDDSDSDERNSDGAVTQNKTNISTASATVSAATSTESISTRKVLPMSIARHNIAGTTHSGAEKDVDVSEDSPPPLPERTPESFVLASEHNTPVRSEWSELQSQERSEQKKSEGLITSENEKCDHPAGGIHYEMCIECPPTFSDKREQISENPTEATDIGFGNRCGKPKGPRDPPSEWT

SEQ ID NO: 13761 - protein, 265 aa, Homo sapiens
MVVVGILLAYLAGWVLEWRWLAVLGCVPPSLMLLLMCFMPETPRFLLTQHRRQEAMAALRFLWGSEQGWEDPPIGAEQSFHLALLRQPGIYKPFIIGVSLMAFQQLSGVNAVMFYAETIFEEAKFKDSSLASVVVGVIQVLFTAVAALIMDRAGRRLLLVLSGVVMVFSTSAFGAYFKLTQGGPGNSSHVAISAPVSAQPVDASVGLAWLAVGSMCLFIAGFAVGWGPIPWLLMSEIFPLHVKGVATGICVLTNWLMAFLVTKEF

SEQ ID NO: 13762 - protein, 180 aa, Homo sapiens
MTVWTGDVVGGGTDSNIFMTLYGINGSTEEMQLDKKKARFEREQNDTFIMEILDIAPFTKMRIRIDGLGSRPEWFLERILLKNMNTGDLTMFYYGDWLSQRKGKKTLVCEMCAVIDEEEMMEWTSYTVAVKTSDILGAGTDANVFIIIFGENGDSGTLALKQSANWNKFERNNTDTFNFP

SEQ ID NO: 13763 - protein, 762 aa, Homo sapiens
MQIGWCTISCRFNQEEGVGDTHNSYAYDGNRVRKWNVTTTNYGKAWAAGDIVSCLIDLDDGTLSFCLNGVSLGTAFENLSRGLGMAYFPAISLSFKESVAFNFGSRPLRYPVAGYRPLQDPPSADLVRAQRLLGCFRAVLSVELDPVEGRLLDKESSKWRLRGQPTVLLTLAHIFHHFAPLLRKVYLVEAVLMSFLLGIVEKGTPTQAQSVVHQVLDLLWLFMEDYEVQDCLKQLMMSLLRLYRFSPIVPDLGLQIHYLRLTIAILRHEKSRKFLLSNVLFDVLRSVVFFYIKSPLRVEEAGLQELIPTTWWPHCSSREGKESTEMKEETAEERLRRRAYERGCQRLRKRIEVVEELQVQILKLLLDNKDDNGGEASRYIFLTKFRKFLQENASGRGNMPMLCPPEYMVCFLHRLISALRYYWDEYKASNPHASFSEEAYIPPQVFYNGKVDYFDLQRLGGLLSHLRKTLKDDLASKANIVIDPLELQSTAMDDLDEDEEPAPAMAQRPMQALAVGGPLPLPRPGWLSSPTLGRANRFLSTAAVSLMTPRRPLSTSEKVKVRTLSVEQRTREDIEGSHWNEGLLLGRPPEEPEQPLTENSLLEVLDGAVMMYNLSVHQQLGKMVGVSDDVNEYAMALRDTEDKLRRCPKRRKDILAELTKSQKVFSEKLDHLSRRLAWVHATVYSQEKMLDIYWLLRVCLRTIEHGDRTGSLFAFMPEFYLSVAINSYSALKNYFGPVHSMEELPGDGTIQAEAEAEKGSLV

SEQ ID NO: 13764 - protein, 571 aa, Homo sapiens
MEYEVKKGKKGFVSPIRRLVFPKAGRRAACRSSVSRRPLHSMPLYPPDYLIDPQILLCDYLEKEVKFLGHLTWVTSSLNPSSRDELLQLLDTARQLKELPLKTTAEQDSILSLSARCLLLTWRDNEELILRIPTHEIAAASYLQDDALHLLVLKTGLGVDPVPAGVDASPGGAGRDPGPPGGAPEKRRVGTAERRHTICSLDWRMGWGGGAAEARAGGGGGGSLERQRAGARASGSWERRQTFSGSWERRHGGGGGGGGAGKPGGSWERRQAGSGGGGSWERRHPGPNPLDPQDPSPDAYCNLVILAVANRDAAEESCALICQVFQIIYGDQSIECVDRAGYHYTSTPERPWLCSRSESCHTDGTYAYDADFSCCSSFNGSQDTFEACYSGTSTPSFHGSHCSGSDHSSLGLEQLQDYMVTLRSKLGPLEIQQFAMLLREYRLGLPIQDYCTGLLKLYGDRRKFLLLGMRPFIPDQDIGYFEGFLEGVGIREGGILTDSFGRIKRSMSSTSASAVRSYDGAAQRPEAQAFHRLLADITHDIEALAPDDDDDDEDEPRGSRGGSDAAEDNYL

SEQ ID NO: 13765 - protein, 179 aa, Homo sapiens
MLKAVILIGGPQKGTRFRPLSFEVPKPLFPVAGVPMIQHHIEACAQVPGMQEILLIGFYQPDEPLTQFLEAAQQEFNLPVRYLQEFAPLGTGGGLYHFRDQILAGSPEAFFVLNADVCSDFPLSAMLEAHRRQRHPFLLLGTTANRTQSLNYGCIVENPQTHEVLHYVEKPSTFISDII

SEQ ID NO: 13766 - protein, 409 aa, Homo sapiens
MSVGCACPGCSSKSFKLYSPKEPPNGNAFPPFHPGTMLDRDVGPTPMYPPTYLEPGIGRHTPYGNQTDYRIFELNKRLQNWTEECDNLWWDAFTTEFFEDDAMLTITFCLEDGPKRYTIGRTLIPRYFRSIFEGGATELYYVLKHPKEAFHSNFVSLDCDQGSMVTQHGKPMFTQVCVEGRLYLEFMFDDMMRIKTWHFSIRQHRELIPRSILAMHAQDPQMLDQLSKNITRCGLSNSTLNYLRLCVILEPMQELMSRHKTYSLSPRDCLKTCLFQKWQRMVAPPAEPTRQQPSKRRKRKMSGGSTMSSGGGNTNNSNSKKKSPASTFALSSQDVMVVGEPTLMGGEFGDEDERLITRLENTQFDAANGIDDEDSFNNSPALGANSPWNSKPPSSQESKSENPTSQASQ

SEQ ID NO: 13767 - protein, 646 aa, Homo sapiens
MSHVAVENALGLDQQFAGLDLNSSDNQSGGSTASSFYDKDSSGWSSSKDKDAYSSFGSRSDSRGKSSFFSDRGSGSRGRFDDRGRSDYDGIGSRGDRSGFGKFERGGNSRWCDKSDEDDWSKPLPPSERLEQELFSGGNTGINFEKYDDIPVEATGNNCPPHIESFSDVEMGEIIMGNIELTRYTRPTPVQKHAIPIIKEKRDLMACAQTGSGKTAAFLLPILSQIYSDGPGEALRAMKENGRYGRRKQYPISLVLAPTRELAVQIYEEARKFSYRSRVRPCVVYGGADIGQQIRDLERGCHLLVATPGRLVDMMERGKIGLDFCKYLVLDEADRMLDMGFEPQIRRIVEQDTMPPKGVRHTMMFSATFPKEIQMLARDFLDEYIFLAVGRVGSTSENITQKVVWVEESDKRSFLLDLLNATGKDSLTLVFVETKKGADSLEDFLYHEGYACTSIHGDRSQRDREEALHQFRSGKSPILVATAVAARGLDISNVKHVINFDLPSDIEEYVHRIGRTGRVGNLGLATSFFNERNINITKDLLDLLVEAKQEVPSWLENMAYEHHYKGSSRGRSKSSRFSGGFGARDYRQSSGASSSSFSSSRASSSRSGGGGHGSSRGFGGGGYGGFYNSDGYGGNYNSQGVDWWGN

SEQ ID NO: 13768 - protein, 274 aa, Homo sapiens
MECALLLACAFPAAGSGPPRGLAGLGRVAKALQLCCLCCASVAAALASDSSSGASGLNDDYVFVTPVEVDSAGSYISHDILHNGRKKRSAQNARSSLHYRFSAFGQELHLELKPSAILSSHFIVQVLGKDGASETQKPEVQQCFYQGFIRNDSSSSVAVSTCAGLSGLIRTRKNEFLISPLPQLLAQEHNYSSPAGHHPHVLYKRTAEEKIQRYRGYPGSGRNYPGYSPSHIPHASQSRETEYHHRRLQKQHFCGRRKKCICSQASHRGHLSKV

SEQ ID NO: 13769 - protein, 1040 aa, Homo sapiens
MPAARRFPGLELSFPLLARLRRRLYTRLGGGRMQPEEGTGWLLELLSEVQLQQYFLRLRDDLNVTRLSHFEYVKNEDLEKIGMGRPGQRRLWEAVKRRKALCKRKSWMSKVFSGKRLEAEFPPHHSQSTFRKTSPAPGGPAGEGPLQSLTCLIGEKDLRLLEKLGDGSFGVVRRGEWDAPSGKTVSVAVKCLKPDVLSQPEAMDDFIREVNAMHSLDHRNLIRLYGVVLTPPMKMVTELAPLGSLLDRLRKHQGHFLLGTLSRYAVQVAEGMGYLESKRFIHRDLAARNLLLATRDLVKIGDFGLMRALPQNDDHYVMQEHRKVPFAWCAPESLKTRTFSHASDTWMFGVTLWEMFTYGQEPWIGLNGSQILHKIDKEGERLPRPEDCPQDIYNVMVQCWAHKPEDRPTFVALRDFLLEAQPTDMRALQDFEEPDKLHIQMNDVITVIEGRAENYWWRGQNTRTLCVGPFPRNVVTSVAGLSAQDISQPLQNSFIHTGHGDSDPRHCWGFPDRIDELYLGNPMDPPDLLSVELSTSRPPQHLGGVKKPTYDPVSEDQDPLSSDFKRLGLRKPGLPRGLWLAKPSARVPGTKASRGSGAEVTLIDFGEEPVVPALRPCAPSLAQLAMDACSLLDETPPQSPTRALPRPLHPTPVVDWDARPLPPPPAYDDVAQDEDDFEICSINSTLVGAGVPAGPSQGQTNYAFVPEQARPPPPLEDNLFLPPQGGGKPPSSAQTAEIFQALQQECMRQLQAPAGSPAPSPSPGGDDKPQVPPRVPIPPRPTRPHVQLSPAPPGEEETSQWPGPASPPRVPPREPLSPQGSRTPSPLVPPGSSPLPPRLSSSPGKTMPTTQSFASDPKYATPQVIQAPGPRAGPCILPIVRDGKKVSSTHYYLLPERPSYLERYQRFLREAQSPEEPTPLPVPLLLPPPSTPAPAAPTATVRPMPQAALDPKANFSTNNSNPGARPPPPRATARLPQRGCPGDGPEAGRPADKIQMVEQLFGLGLRPRGECHKVLEMFDWNLEQAGCHLLGSWGPAHHKR

SEQ ID NO: 13770 - protein, 712 aa, Homo sapiens
MIFHCEVDKIVDQLQQLMQVYDLAALRDYWSYLERRLFSRLEDIYRPTIHKLKTSLFRFYLVYTIQTNRNDKAQEFFAKQATELQNQAEWKDWFVLPFLPSPDTNPTFATYFSRQWADTFIVSLHNFLSVLFQCMPVPVILNFDAECQRTNQVQEENEVLRQKLFALQAEIHRLKKEEQQPEEEEALVQHKLPPYVSNMDRLGDSELAMVCSQRNASLSQSPRVGFLSSLLPQSKKSPSRLSPAQGPPQPQSSAKKESFGGQGTKGKDPTSGAKDGKSLLSGLATGESGWSQHRQRRLQDHGKERKELFSTTTSQCAEKKPEASGPEAEPCPELHTEPVEPLTRASSAGPEGGGVRPEQPFIVLGQEEYGEHHSSIMHCRVDCSGRRVASLDVDGVIKVWSFNPIMQTKASSISKSPLLSLEWATKRDRLLLLGSGVGTVRLYDTEAKKNLCEININDNMPRILSLACSPNGASFVCSAAAPSLTSQVDFSAPDIGSKGMNQVPGRLLLWDTKTMKQQLQFSLDPEPIAINCTAFNHNGNLLVTGAADGVIRLFDMQQHECAMSWRAHYGEVYSVEFSYDENTVYSIGEDGKFIQWNIHKSGLKVSEYSLPSDATGPFVLSGYSGYKQVQVPRGRLFAFDSEGNYMLTCSATGGVIYKLGGDEKVLESCLSLGGHRAPVVTVDWSTAMDCGTCLTASMDGKIKLTTLLAHKA

SEQ ID NO: 13771 - protein, 265 aa, Homo sapiens
MKVLLKQDNTTQLVQDDQVKGPLRVGAIVETRTSDGSFQEAIISKLTDASWYTVVFDDGDERTLRRTSLCLKGERHFAESETLDQLPLTNPEHFGTPVIAKKTNRGRRSSLPVTEDEKEEESSEEEDEDKRRLNDELLGKVVSVVSATERTEWYPALVISPSCNDDITVKKDQCLVRSFIDSKFYSIARKDIKEVDILNLPESELSTKPGLQKASIFLKTRVVPDNWKMDISEILESSSSDDEDGPAEENDEEKEKEAKKTEEEV

SEQ ID NO: 13772 - protein, 700 aa, Homo sapiens
MAGLTAAAPRPGVLLLLLSILHPSRPGGVPGAIPGGVPGGVFYPALGPGGKPLKPVPGGLAGAGLGAGLGAFPAVTFPGALVPGGVADAAAAYKAAKAGAGLGGVPGVGGLGVSAAPSVPGAVVPQPGAGVKPGKVPGVGLPGVYPGGVLPGARFPGVGVLPGVPTGAGVKPKAPGVGGAFAGIPGVGPFGGPQPGVPLGYPIKAPKLPGGYGLPYTTGKLPYGYGPGGVAGAAGKAGYPTGTGVGPQAAAAAAAKAAAKFGAGAAGVLPGVGGAGVPGVPGAIPGIGGIAGVGTPAAAAAAAAAAKAAKYGAAAGLVPGGPGFGPGVVGVPGAGVPGVGVPGAGIPVVPGAGIPGAAVPGVVSPEAAAKAAAKAAKYGARPGVGVGGIPTYGVGAGGFPGFGVGVGGIPGVAGVPGVGGVPGVGGVPGVGISPEAQAAAAAKAAKYGLVPGVGVAPGVGVAPGVGVAPGVGLAPGVGVAPGVGVAPGVGVAPGIGPGGVAAAAKSAAKVAAKAQLRAAAGLGAGIPGLGVGVGVPGLGVGAGVPGLGVGAGVPGFGAVPGALAAAKAAKYGAAVPGVLGGLGALGGVGIPGGVVGAGPAAAAAAAKAAAKAAQFGLVGAAGLGGLGVGGLGVPGVGGLGGIPPAAAAKAAKYGAAGLGGVLGGAGQFPLGGVAARPGFGLSPIFPGGACLGKACGRKRK

SEQ ID NO: 13773 - protein, 568 aa, Homo sapiens
MLENYSHLVSMGYPVSKPDVISKLEQGEEPWIIKGDISNWIYPDEYQADGRQDRKSNLHNSQSCILGTVSFHHKILKGVTRDGSLCSILKVCQGDGQLQRFLENQDKLFRQVTFVNSKTVTEASGHKYNPLGKIFQECIETDISIQRFHKYDAFKKNLKPNIDLPSCYKSNSRKKPDQSFGGGKSSSQSEPNSNLEKIHNGVIPFDDNQCGNVFRNTQSLIQYQNVETKEKSCVCVTCGKAFAKKSQLIVHQRIHTGKKPYDCGACGKAFSEKFHLVVHQRTHTGEKPYDCSECGKAFSQKSSLIIHQRVHTGEKPYECSECGKAFSQKSPLIIHQRIHTGEKPYECRECGKAFSQKSQLIIHHRAHTGEKPYECTECGKAFCEKSHLIIHKRIHTGEKPYKCAQCEEAFSRKTELITHQLVHTGEKPYECTECGKTFSRKSQLIIHQRTHTGEKPYKCSECGKAFCQKSHLIGHQRIHTGEKPYICTECGKAFSQKSHLPGHQRIHTGEKPYICAECGKAFSQKSDLVLHQRIHTGERPYQCAICGKAFIQKSQLTVHQRIHTVVKS

SEQ ID NO: 13774 - protein, 889 aa, Homo sapiens
MSQGLSWHDDLTQYVISQEMERIPRLRPPEPRPRDRSGLAPKRPGPAGELLLQDIPTGSAPAAQHRLPQPPVGKGGAGASSSLSPLQAELLPPLLEHLLLPPQPPHPSLSYEPALLQPYLFHQFGSRDGSRVSEGSPGMVSVGPLPKAEAPALFSRTASKGIFGDHPGHSYGDLPGPSPAQLFQDSGLLYLAQELPAPSRARVPRLPEQGSSSRAEDSPEGYEKEGLGDRGEKPASPAVQPDAALQRLAAVLAGYGVELRQLTPEQLSTLLTLLQLLPKGAGRNPGGVVNVGADIKKTMEGPVEGRDTAELPARTSPMPGHPTASPTSSEVQQVPSPVSSEPPKAARPPVTPVLLEKKSPLGQSQPTVAGQPSARPAAEEYGYIVTDQKPLSLAAGVKLLEILAEHVHMSSGSFINISVVGPALTFRIRHNEQNLSLADVTQQAGLVKSELEAQTGLQILQTGVGQREEAAAVLPQTAHSTSPMRSVLLTLVALAGVAGLLVALAVALCVRQHARQQDKERLAALGPEGAHGDTTFEYQDLCRQHMATKSLFNRAEGPPEPSRVSSVSSQFSDAAQASPSSHSSTPSWCEEPAQANMDISTGHMILAYMEDHLRNRDRLAKEWQALCAYQAEPNTCATAQGEGNIKKNRHPDFLPYDHARIKLKVESSPSRSDYINASPIIEHDPRMPAYIATQGPLSHTIADFWQMVWESGCTVIVMLTPLVEDGVKQCDRYWPDEGASLYHVYEVNLVSEHIWCEDFLVRSFYLKNVQTQETRTLTQFHFLSWPAEGTPASTRPLLDFRRKVNKCYRGRSCPIIVHCSDGAGRTGTYILIDMVLNRMAKGVKEIDIAATLEHVRDQRPGLVRSKDQFEFALTAVAEEVNAILKALPQ

SEQ ID NO: 13775 - protein, 1194 aa, Homo sapiens
MFSLDSFRKDRAQHRQRQCKLPPPRLPPMCVNPTPGGTISRASRDLLKEFPQPKNLLNSVIGRALGISHAKDKLVYVHTNGPKKKKVTLHIKWPKSVEVEGYGSKKIDAERQAAAAACQLFKGWGLLGPRNELFDAAKYRVLADRFGSPADSWWRPEPTMPPTSWRQLNPESIRPGGPGGLSRSLGREEEEDEEEELEEGTIDVTDFLSMTQQDSHAPLRDSRGSSFEMTDDDSAIRALTQFPLPKNLLAKVIQIATSSSTAKNLMQFHTVGTKTKLSTLTLLWPCPMTFVAKGRRKAEAENKAAALACKKLKSLGLVDRNNEPLTHAMYNLASLRELGETQRRPCTIQVPEPILRKIETFLNHYPVESSWIAPELRLQSDDILPLGKDSGPLSDPITGKPYVPLLEAEEVRLSQSLLELWRRRGPVWQEAPQLPVDPHRDTILNAIEQHPVVVISGDTGCGKTTRIPQLLLERYVTEGRGARCNVIITQPRRISAVSVAQRVSHELGPSLRRNVGFQVRLESKPPSRGGALLFCTVGILLRKLQSNPSLEGVSHVIVDEVHERDVNTDFLLILLKGLQRLNPALRLVLMSATGDNERFSRYFGGCPVIKVPGFMYPVKEHYLEDILAKLGKHQYLHRHRHHESEDECALDLDLVTDLVLHIDARGEPGGILCFLPGWQEIKGVQQRLQEALGMHESKYLILPVHSNIPMMDQKAIFQQPPVGVRKIVLATNIAETSITINDIVHVVDSGLHKEERYDLKTKVSCLETVWVSRANVIQRRGRAGRCQSGFAYHLFPRSRLEKMVPFQVPEILRTPLENLVLQAKIHMPEKTAVEFLSKAVDSPNIKAVDEAVILLQEIGVLDQREYLTTLGQRLAHISTDPRLAKAIVLAAIFRCLHPLLVVVSCLTRDPFSSSLQNRAEVDKVKALLSHDSGSDHLAFVRAVAGWEEVLRWQDRSSRENYLEENLLYAPSLRFIHGLIKQFSENIYEAFLVGKPSDCTLASAQCNEYSEEEELVKGVLMAGLYPNLIQVRQGKVTRQGKFKPNSVTYRTKSGNILLHKSTINREATRLRSRWLTYFMAVKSNGSVFVRDSSQVHPLAVLLLTDGDVHIRDDGRRATISLSDSDLLRLEGDSRTVRLLKELRRALGRMVERSLRSELAALPPSVQEEHGQLLALLAELLRGPCGSFDVRKTADD

SEQ ID NO: 13776 - protein, 531 aa, Homo sapiens
MSGRGAGGFPLPPLSPGGGAVAAALGAPPPPAGPGMLPGPALRGPGPAGGVGGPGAAAFRPMGPAGPAAQYQRPGMSPGNRMPMAGLQVGPPAGSPFGAAAPLRPGMPPTMMDPFRKRLLVPQAQPPMPAQRRGLKRRKMADKVLPQRIRELVPESQAYMDLLAFERKLDQTIARKRMEIQEAIKKPLTQKRKLRIYISNTFSPSKAEGDSAGTAGTPGGTPAGDKVASWELRVEGKLLDDPSKQKRKFSSFFKSLVIELDKELYGPDNHLVEWHRMPTTQETDGFQVKRPGDLNVKCTLLLMLDHQPPQYKLDPRLARLLGVHTQTRAAIMQALWLYIKHNQLQDGHEREYINCNRYFRQIFSCGRLRFSEIPMKLAGLLQHPDPIVINHVISVDPNDQKKTACYDIDVEVDDPLKAQMSNFLASTTNQQEIASLDVKIHETIESINQLKTQRDFMLSFSTDPQDFIQEWLRSQRRDLKIITDVIGNPEEERRAAFYHQPWAQEAVGRHIFAKVQQRRQELEQVLGIRLT

SEQ ID NO: 13777 - protein, 2624 aa, Homo sapiens
QLKNPKGGAEIGINDSVTITILSNDDAYGIVAFAQNSLYKQVEEMEQDSLVTLNVERLKGTYGRITIAWEADGSISDIFPTSGVILFTEGQVLSTITLTILADNIPELSEVVIVTLTRITTEGVEDSYKGATIDQDRSKSVITTLPNDSPFGLVGWRAASVFIRVAEPKENTTTLQLQIARDKGLLGDIAIHLRAQPNFLLHVDNQATENEDYVLQETIIIMKENIKEAHAEVSILPGAGEVITAYEVPPPLNVLQVPVVRLAGSFGAVNVYWKASPDSAGLEDFKPSHGILEFADKQVTAMIEITIIDDAEFELTETFNISLISVAGGGRLGDDVVVTVVIPQNDSPFGVFGFEEKTVMIDESLSSDDPDSYVTLTVVRSPGGKGTVRLEWTIDEKAKHNLSPLNGTLHFDETESQKTIVLHTLQDTVLEEDRRFTIQLISIDEVEISPVKGSASIIIRGDKRASGEVGIAPSSRHILIGEPSAKYNGTAIISLVRGPGILGEVTVFWRIFPPSVGEFAETSGKLTMRDEQSAVIVVIQALNDDIPEEKSFYEFQLTAVSEGGVLSESSSTANITVVASDSPYGRFAFSHEQLRVSEAQRVNITIIRSSGDFGHVRLWYKTMSGTAEAGLDFVPAAGELLFEAGEMRKSLHVEILDDDYPEGPEEFSLTITKVELQGRGYDFTIQENGLQIDQPPEIGNISIVRIIIMKNDNAEGIIEFDPKYTAFEVEEDVGLIMIPVVRLHGTYGYVTADFISQSSSASPGGVDYILHGSTVTFQHGQNLSFINISIIDDNESEFEEPIEILLTGATGGAVLGRHLVSRIIIAKSDSPFGVIRFLNQSKISIANPNSTMILSLVLERTGGLLGEIQVNWETVGPNSQEALLPQNRDIADPVSGLFYFGEGEGGVRTIILTIYPHEEIEVEETFIIKLHLVKGEAKLDSRAKDVTLTIQEFGDPNGVVQFAPETLSKKTYSEPLALEGPLLITFFVRRVKGTFGEIMVYWELSSEFDITEDFLSTSGFFTIADGESEASFDVHLLPDEVPEIEEDYVIQLVSVEGGAELDLEKSITWFSVYANDDPHGVFALYSDRQSILIGQNLIRSIQINITRLAGTFGDVAVGLRISSDHKEQPIVTENAERQLVVKDGATYKVDVVPIKNQVFLSLGSNFTLQLVTVMLVGGRFYGMPTILQEAKSAVLPVSEKAANSQVGFESTAFQLMNITAGTSHVMISRRGTYGALSVAWTTGYAPGLEIPEFIVVGNMTPTLGSLSFSHGEQRKGVFLWTFPSPGWPEAFVLHLSGVQSSAPGGAQLRSGFIVAEIEPMGVFQFSTSSRNIIVSEDTQMIRLHVQRLFGFHSDLIKVSYQTTAGSAKPLEDFEPVQNGELFFQKFQTEVDFEITIINDQLSEIEEFFYINLTSVEIRGLQKFDVNWSPRLNLDFSVAVITILDNDDLAGMDISFPETTVAVAVDTTLIPVETESTTYLSTSKTTTILQPTNVVAIVTEATGVSAIPEKLVTLHGTPAVSEKPDVATVTANVSIHGTFSLGPSIVYIEEEMKNGTFNTAEVLIRRTGGFTGNVSITVKTFGERCAQMEPNALPFRGIYGISNLTWAVEEEDFEEQTLTLIFLDGERERKVSVQILDDDEPEGQEFFYVFLTNPQGGAQIVEEKDDTGFAAFAMVIITGSDLHNGIIGFSEESQSGLELREGAVMRRLHLIVTRQPNRAFEDVKVFWRVTLNKTVVVLQKDGVNLVEELQSVSGTTTCTMGQTKCFISIELKPEKVPQVEVYFFVELYEATAGAAINNSARFAQIKILESDESQSLVYFSVGSRLAVAHKKATLISLQVARDSGTGLMMSVNFSTQELRSAETIGRTIISPAISGKDFVITEGTLVFEPGQRSTVLDVILTPETGSLNSFPKRFQIVLFDPKGGARIDKVYGTANITLVSDADSQAIWGLADQLHQPVNDDILNRVLHTISMKVATENTDEQLSAMMHLIEKITTEGKIQAFSVASRTLFYEILCSLINPKRKDTRGFSHFAEVTENFAFSLLTNVTCGSPGEKSKTILDSCPYLSILALHWYPQQINGHKFEGKEGDYIRIPERLLDVQDAEIMAGKSTCKLVQFTEYSSQQWFISGNNLPTLKNKVLSLSVKGQSSQLLTNDNEVLYRIYAAEPRIIPQTSLCLLWNQAAASWLSDSQFCKVVEETADYVECACSHMSVYAVYARTDNLSSYNEAFFTSGFICISGLCLAVLSHIFCARYSMFAAKLLTHMMAASLGTQILFLASAYASPQLAEESCSAMAAVTHYLYLCQFSWMLIQSVNFWYVLVMNDEHTERRYLLFFLLSWGLPAFVVILLIVILKGIYHQSMSQIYGLIHGDLCFIPNVYAALFTAALVPLTCLVVVFVVFIHAYQVKPQWKAYDDVFRGRTNAAEIPLILYLFALISVTWLWGGLHMAYRHFWMLVLFVIFNSLQGLYVFMVYFILHNQMCCPMKASYTVEMNGHPGPSTAFFTPGSGMPPAGGEISKSTQNLIGAMEEVPPDWERASFQQGSQASPDLKPSPQNGATFPSSGGYGQGSLIADEESQEFDDLIFALKTGAGLSVSDNESGQGSQEGGTLTDSQIVELRRIPIADTHL

SEQ ID NO: 13778 - protein, 477 aa, Homo sapiens
MALQLWALTLLGLLGAGASLRPRKLDFFRSEKELNHLAVDEASGVVYLGAVNALYQLDAKLQLEQQVATGPALDNKKCTPPIEASQCHEAEMTDNVNQLLLLDPPRKRLVECGSLFKGICALRALSNISLRLFYEDGSGEKSFVASNDEGVATVGLVSSTGPGGDRVLFVGKGNGPHDNGIIVSTRLLDRTDSREAFEAYTDHATYKAGYLSTNTQQFVAAFEDGPYVFFVFNQQDKHPARNRTLLARMCREDPNYYSYLEMDLQCRDPDIHAAAFGTCLAASVAAPGSGRVLYAVFSRDSRSSGGPGAGLCLFPLDKVHAKMEANRNACYTGTREARDIFYKPFHGDIQCGGHAPGSSKSFPCGSEHLPYPLGSRDGLRGTAVLQRGGLNLTAVTVAAENNHTVAFLGTSDGRILKVYLTPDGTSSEYDSILVEINKRVKRDLVLSGDLGSLYAMTQDKVFRLPVQECLSYPTCTQ

SEQ ID NO: 13779 - protein, 1349 aa, Homo sapiens
MEENESQKCEPCLPYSADRRQMQEQGKGNLHVTSPEDAECRRTKERLSNGNSRGSVSKSSRNIPRRHTLGGPRSSKEILGMQTSEMDRKREAFLEHLKQKYPHHASAIMGHQERLRDQTRSPKLSHSPQPPSLGDPVEHLSETSADSLEAMSEGDAPTPFSRGSRTRASLPVVRSTNQTKERSLGVLYLQYGDETKQLRMPNEITSADTIRALFVSAFPQQLTMKMLESPSVAIYIKDESRNVYYELNDVRNIQDRSLLKVYNKDPAHAFNHTPKTMNGDMRMQRELVYARGDGPGAPRPGSTAHPPHAIPNSPPSTPVPHSMPPSPSRIPYGGTRSMVVPGNATIPRDRISSLPVSRPISPSPSAILERRDVKPDEDMSGKNIAMYRNEGFYADPYLYHEGRMSIASSHGGHPLDVPDHIIAYHRTAIRSASAYCNPSMQAEMHMEQSLYRQKSRKYPDSHLPTLGSKTPPASPHRVSDLRMIDMHAHYNAHGPPHTMQPDRASPSRQAFKKEPGTLVYIEKPRSAAGLSSLVDLGPPLMEKQVFAYSTATIPKDRETSEKMMKTTANRNHTDSAGTPHVSGGKMLSALESTVPPSQPPPVGTSAIHMSLLEMRRSVAELRLQLQQMRQLQLQNQELLRAMMKKAELEISGKVMETMKRLEDPVQRQRVLVEQERQKYLHEEEKIVKKLCELEDFVEDLKKDSTAASRLVTLKDVEDGAFLLRQVGEAVATLKGEFPTLQNKMRAILRIEVEAVRFLKEEPHKLDSLLKRVRSMTDVLTMLRRHVTDGLLKGTDAAQAAQYMAMEKATAAEVLKSQEEAAHTSGQPFHSTGAPGDAKSEVVPLSGMMVRHAQSSPVVIQPSQHSVALLNPAQNLPHVASSPAVPQEATSTLQMSQAPQSPQIPMNGSAMQSLFIEEIHSVSAKNRAVSIEKAEKKWEEKRQNLDHYNGKEFEKLLEEAQANIMKSIPNLEMPPATGPLPRGDAPVDKVELSEDSPNSEQDLEKLGGKSPPPPPPPPRRSYLPGSGLTTTRSGDVVYTGRKENITAKASSEDAGPSPQTRATKYPAEEPASAWTPSPPPVTTSSSKDEEEEEEEGDKIMAELQAFQKCSFMDVNSNSHAEPSRADSHVKDTRSGATVPPKEKKGSSGAPQTSRMPVPMSAKNRPGTLDKPGKQSKLQDPRQYRQANGSAKKSGGDFKPTSPSLPASKIPALSPSSGKSSSLPSSSGDSSNLPNPPATKPSIASNPLSPQTGPPAHSASLIPSVSNGSLKFQSLTHTGKGHHLSFSPQSQNGRAPPPLSFSSSPPSPASSVSLNQGAKGTRTIHTPSLTSYKAQNGSSSKATPSTAKETS

SEQ ID NO: 13780 - protein, 721 aa, Homo sapiens
MAGALAGLAAGLQVPRVAPSPDSDSDTDSEDPSLRRSAGGLLRSQVIHSGHFMVSSPHSDSLPRRRDQEGSVGPSDFGPRSIDPTLTRLFECLSLAYSGKLVSPKWKNFKGLKLLCRDKIRLNNAIWRAWYIQYVKRRKSPVCGFVTPLQGPEADAHRKPEAVVLEGNYWKRRIELPPEDAYVGNADMIQPDLTPLQPSLDDFMDISDFFTNSRLPQPPMPSNFPEPPSFSPVVDSLFSSGTLGPEVPPASSAMTHLSGHSRLQARNSCPGPLDSSAFLSSDFLLPEDPKPRLPPPPVPPPLLHYPPPAKVPGLEPCPPPPFPPMAPPTALLQEEPLFSPRFPFPTVPPAPGVSPLPAPAAFPPTPQSVPSPAPTPFPIELLPLGYSEPAFGPCFSMPRGKPPAPSPRGQKASPPTLAPATASPPTTAGSNNPCLTQLLTAAKPEQALEPPLVSSTLLRSPGSPETVPEFPCTFLPPTPAPTPPRPPPGPATLAPSRPLLVPKAERLSPPAPSGSERRLSGDLSSMPGPGTLSVRVSPPQPILSRGRPDSNKTENRRITHISAEQKRRFNIKLGFDTLHGLVSTLSAQPSLKVSKATTLQKTAEYILMLQQERAGLQEEAQQLRDEIEELNAAINLCQQQLPATGVPITHQRFDQMRDMFDDYVRTRTLHNWKFWVFSILIRPLFESFNGMVSTASVHTLRQTSLAWLDQYCSLPALRPST

SEQ ID NO: 13781 - protein, 453 aa, Homo sapiens
MAGAAGRVQDRALRRFPITLPVGDLSNLHLKEEKIKPDTNGAVVKTNANAEKTDEEEKEDRAAQSLLNKLIRSNLVDNTNQVEVLQRDPNSPLYSVKSFEELRLPQNLIAQSQSGTGKTAAFVLAMLSQVEPANKYPQCLCLSPTYELALQTGKVIEQMGKFYPELKLAYAVRGNKLERGQKISEQIVIGTPGTVLDWCSKLKFIDPKKIKVFVLDEADVMIATQGHQDQSIRIQRMLPRNCQMLLFSATFEDSVWKFAQKVVPDPNVIKLKREEETLDTIKQYYVLCSSRDEKFQALCNLYGAITIAQAMIFCHTRKTASWLAAELSKEGHQVALLSGEMMVEQRAAVIERFREGKEKVLVTTNVCARGIDVEQVSVVINFDLPVDKDGNPDNETYLHRIGRTGRFGKRGLAVNMVDSKHSMNILNRIQEHFNKKIERLDTDDLDEIEKIAN

SEQ ID NO: 13782 - protein, 374 aa, Homo sapiens
MLLGSPAGSSSILSDGVYERHMDPLLLPGELASPSQALGAGEIPAPSETPWLSPDPLFLEQRRVREAKTEEDGPANTEQKLKSFPEDPQHLGEWGHLDPAEENLKSYRKLLLWGYQLSQPDAASRLDTEELRLVERDPQGSSLPGGRRQESAGCACEEAAPAGVLPELPTEAPPGDALADPPSGTTEEEEEQPGKAPDPQDPQDAESDSATGSQRQSVIQQPAPDRGTAKLGTKRPHPEDGDGQSLEGVSSSGDSAGLEAGQGPGADEPGLSRGKPYACGECGEAFAWLSHLMEHHSSHGGRKRYACQGCWKTFHFSLALAEHQKTHEKEKSYALGGARGPQPSTREAQAGARAGGPPESVEGEAPPAPPEAQR

SEQ ID NO: 13783 - protein, 708 aa, Homo sapiens
MAGGPGPGEPAAPGAQHFLYEVPPWVMCRFYKVMDALEPADWCQFGGWRRAAGGREARGLLAPTPDAPRPAAALIVRDQTELRLCERSGQRTASVLWPWINRNARVADLVHILTHLQLLRARDIITAWHPPAPLPSPGTTAPRPSSIPAPAEAEAWSPRKLPSSASTFLSPAFPGSQTHSGPELGLVPSPASLWPPPPSPAPSSTKPGPESSVSLLQGARPFPFCWPLCEISRGTHNFSEELKIGEGGFGCVYRAVMRNTVYAVKRLKENADLEWTAVKQSFLTEVEQLSRFRHPNIVDFAGYCAQNGFYCLVYGFLPNGSLEDRLHCQTQACPPLSWPQRLDILLGTARAIQFLHQDSPSLIHGDIKSSNVLLDERLTPKLGDFGLARFSRFAGSSPSQSSMVARTQTVRGTLAYLPEEYIKTGRLAVDTDTFSFGVVVLETLAGQRAVKTHGARTKYLKDLVEEEAEEAGVALRSTQSTLQAGLAADAWAAPIAMQIYKKHLDPRPGPCPPELGLGLGQLACCCLHRRAKRRPPMTQENSYVSSTGRAHSGAAPWQPLAAPSGASAQAAEQLQRGPNQPVESDESLGGLSAALRSWHLTPSCPLDPAPLREAGCPQGDTAGESSWGSGPGSRPTAVEGLALGSSASSSSEPPQIIINPARQKMVQKLALYEDGALDSLQLLSSSSLPGLGLEQDRQGPEESDEFQS

SEQ ID NO: 13784 - protein, 98 aa, Homo sapiens
MPFHHCHRDPLPPPGLTPERLHARRQLYAACAVCFVFMAGEVVGGYLAHSLAIMTDAAHLLADVGSMMGSLFSLWLSTRPATRTMTFGWHRSETLGAL

SEQ ID NO: 13785 - protein, 888 aa, Homo sapiens
MLTHRPQEAEQRGRTPGPSFEWNVLAKALYDNVAESPDELSFRKGDIMTVLEQDTQGLDGWWLCSLHGRQGIVPGNRLKILVGMYDKKPAGPGPGPPATPAQPQPGLHAPAPPASQYTPMLPNTYQPQPDSVYLVPTPSKAQQGLYQVPGPSPQFQSPPAKQTSTFSKQTPHHPFPSPATDLYQVPPGPGGPAQDIYQVPPSAGMGHDIYQVPPSMDTRSWEGTKPPAKVVVPTRVGQGYVYEAAQPEQDEYDIPRHLLAPGPQDIYDVPPVRGLLPSQYGQEVYDTPPMAVKGPNGRDPLLEVYDVPPSVEKGLPPSNHHAVYDVPPSVSKDVPDGPLLREETYDVPPAFAKAKPFDPARTPLVLAAPPPDSPPAEDVYDVPPPAPDLYDVPPGLRRPGPGTLYDVPRERVLPPEVADGGVVDSGVYAVPPPAEREAPAEGKRLSASSTGSTRSSQSASSLEVAGPGREPLELEVAVEALARLQQGVSATVAHLLDLAGSAGATGSWRSPSEPQEPLVQDLQAAVAAVQSAVHELLEFARSAVGNAAHTSDRALHAKLSRQLQKMEDVHQTLVAHGQALDAGRGGSGATLEDLDRLVACSRAVPEDAKQLASFLHGNASLLFRRTKATAPGPEGGGTLHPNPTDKTSSIQSRPLPSPPKFTSQDSPDGQYENSEGGWMEDYDYVHLQGKEEFEKTQKELLEKGSITRQGKSQLELQQLKQFERLEQEVSRPIDHDLANWTPAQPLAPGRTGGLGPSDRQLLLFYLEQCEANLTTLTNAVDAFFTAVATNQPPKIFVAHSKFVILSAHKLVFIGDTLSRQAKAADVRSQVTHYSNLLCDLLRGIVATTKAAALQYPSPSAAQDMVERVKELGHSTQQFRRVLGQLAAA

SEQ ID NO: 13786 - protein, 51 aa, Homo sapiens
MLPQIPFLLLVSLNLVHGVFYAERYQMPTGIKGPLPNTKTQFFIPYTIKSK

SEQ ID NO: 13787 - protein, 1035 aa, Homo sapiens
MGSFLSKLELSPSSPAQVRTDLPERPTKRRPPQPLHQVHRVQFVHRAHPAPRYRPVRRRPNLDPANPTTWLANEAWRRFPMKKSQNSPLGPLPSDWWESYLKRTIWSLRHPRPIWSPVTIRITPPDQRVPPSTSPEDVIALAGLPPSEELADPCSKETVLRALRECRKGKGRLEEPLFPESLDSKRRSPETRPSAFKPLMKNGTLTSFVPRPGPLKRSLHSWGSDHSLTKRPNCSSMSSLASIYRGGTLSSKRNAIGSSYSSCRNFSDPWKRSVPSVSFETPEWPIKKEKSCHRPSSPVPLVSDFESLGGSESSGQQNQKIPQLPSSPENLVSEIPPPQLGYAVSDENLTLGKKAELQVSNNAGEDTTEVNTDPFPETWLAIQPSLSLALPSSETDLTQGANPQLENLRKMQKSLGPLASPQSTGEATSVAHSPLKTPSLPTPPGCSQSELLPGTSPDSKPTATFILLTPTSPTLPVTDTTWPPSTSQADRSPMPPDPPAPPTIQSTLLGMVSSPTSHLSASAPPDATSAHLMLKPILGPLHNSEIGSSSYSRISVTAAASSISSLSTIQGTLTPTFKPIFGSIDPLKTTPMIAPFSSKQTPPPFTHASTHHFHGLVKATSVVMSTTLASTSKDSVFKPPLDFGVVNVTSAVGNTYSVPSTCDTFLLGTAQAFRADFTPATGFIFPPHHHPTIPTVHTVTMFTQVLSSVVQISPRSSTANFRGMGSPLPASALVSTNWLASTPSISNLTPAITSPLGSSSRPPFPLSQGANPQPAFGATNGQKQGPSQPALMPSVSSSFLFGSSAVALPTPMPTPAQPAFISTTQSALGCLTPSASTSQTPASTWSGIGGIPAGFPISQASTTGFRIVIQTHQSGAFGSVFGSRAPQPFTFGGFVTPMDCDESGIIMTGPDMSPTSGAFSIGALPSGTTNTMIPFGKGWSQNTEGLPSHRTAFSLGRGSISARKTMAPIAQNTPVPGQAKAGSSVGFGMPFPPAQGSVGRGPFRSSASSFSIGAKSKTPKNREKGHSRRHHAYKK

SEQ ID NO: 13788 - protein, 886 aa, Homo sapiens
MGRAAATAGGGGGARRWLPWLGLCFWAAGTAAARGTDNGEALPESIPSAPGTLPHFIEEPDDAYIIKSNPIALRCKARPAMQIFFKCNGEWVHQNEHVSEETLDESSGLKVREVFINVTRQQVEDFHGPEDYWCQCVAWSHLGTSKSRKASVRIAYLRKNFEQDPQGREVPIEGMIVLHCRPPEGVPAAEVEWLKNEEPIDSEQDENIDTRADHNLIIRQARLSDSGNYTCMAANIVAKRRSLSATVVVYVDGSWEVWSEWSVCSPECEHLRIRECTAPPPRNGGKFCEGLSQESENCTDGLCILGIENASDIALYSGLGAAVVAVAVLVIGVTLYRRSQSDYGVDVIDSSALTGGFQTFNFKTVRQGNSLLLNSAMQPDLTVSRTYSGPICLQDPLDKELMTESSLFNPLSDIKVKVQSSFMVSLGVSERAEYHGKNHSRTFPHGNNHSFSTMHPRNKMPYIQNLSSLPTRTELRTTGVFGHLGGRLVMPNTGVSLLIPHGAIPEENSWEIYMSINQGEPSLQSDGSEVLLSPEVTCGPPDMIVTTPFALTIPHCADVSSEHWNIHLKKRTQQGKWEEVMSVEDESTSCYCLLDPFACHVLLDSFGTYALTGEPITDCAVKQLKVAVFGCMSCNSLDYNLRVYCVDNTPCAFQEVVSDERHQGGQLLEEPKLLHFKGNTFSLQISVLDIPPFLWRIKPFTACQEVPFSRVWCSNRQPLHCAFSLERYTPTTTQLSCKICIRQLKGHEQILQVQTSILESERETITFFAQEDSTFPAQTGPKAFKIPYSIRQRICATFDTPNAKGKDWQMLAQKNSINRNLSYFATQSSPSAVILNLWEARHQHDGDLDSLACALEEIGRTHTKLSNISESQLDEADFNYSRQNGL

SEQ ID NO: 13789 - protein, 214 aa, Homo sapiens
MSDKSELKAELERKKQRLAQIREEKKRKEEERKKKETDQKKEAVAPVQEESDLEKKRREAEALLQSMGLTPESPIAEQPLRVVTADTCLFHYLVPPPMSPSSKSVSTPSEAGSQDSGDGAVGSRTLHWDTDPSVLQLHSDSDLGRGPIKLGMAKITQVDFPPREIVTYTKETQTPVMAQPKEDEEEDDDVVAPKPPIEPEEEKTLKKDEENDSK

SEQ ID NO: 13790 - protein, 552 aa, Homo sapiens
MSPLWWGFLLSCLGCKILPGAQGQFPRVCMTVDSLVNKECCPRLGAESANVCGSQQGRGQCTEVRADTRPWSGPYILRNQDDRELWPRKFFHRTCKCTGNFAGYNCGDCKFGWTGPNCERKKPPVIRQNIHSLSPQEREQFLGALDLAKKRVHPDYVITTQHWLGLLGPNGTQPQFANCSVYDFFVWLHYYSVRDTLLGPGRPYRAIDFSHQGPAFVTWHRYHLLCLERDLQRLIGNESFALPYWNFATGRNECDVCTDQLFGAARPDDPTLISRNSRFSSWETVCDSLDDYNHLVTLCNGTYEGLLRRNQMGRNSMKLPTLKDIRDCLSLQKFDNPPFFQNSTFSFRNALEGFDKADGTLDSQVMSLHNLVHSFLNGTNALPHSAANDPIFVVISNRLLYNATTNILEHVRKEKATKELPSLHVLVLHSFTDAIFDEWMKRFNPPADAWPQELAPIGHNRMYNMVPFFPPVTNEELFLTSDQLGYSYAIDLPVSVEETPGWPTTLLVVMGTLVALVGLFVLLAFLQYRRLRKGYTPLMETHLSSKRYTEEA

SEQ ID NO: 13791 - protein, 253 aa, Homo sapiens
MVLLKLLEVYRKGSAGTFHKSTIFGNTIMTSQPVPNETIIVLPSNVINFSQAEKPEPTNQGQDSLKKHLHAEIKVIGTIQILCGMMVLSLGIILASASFSPNFTQVTSTLLNSAYPFIGPFFFIISGSLSIATEKRLTKLLVHSSLVGSILSALSALVGFIILSVKQATLNPASLQCELDKNNIPTRSYVSYFYHDSLYTTDCYTAKASLAGTLSLMLICTLLEFCLAVLTAVLRWKQAYSDFPGVSVLAGFT

SEQ ID NO: 13792 - protein, 298 aa, Homo sapiens
SGRGHPSEPPASDGPAGCCSGSKDVVIKAQVLAGGRGKGTFESGLKGGVKIVFSPEEAKAVSSQMIGKKLFTKQTGEKGRICNQVLVCERKYPRREYYFAITMERSFQGPVLIGSSHGGVNIEDVAAESPEAIIKEPIDIEEGIKKEQALQLAQKMGFPPNIVESAAENMVKLYSLFLKYDATMIEINPMVEDSDGAVLCMDAKINFDSNSAYRQKKIFDLQDWTQEDERDKDAAKANLNYIGLDGNIGCLVNGAGLAMATMDIIKLHGGTPANFLDVGGGATVHQVTEAFKLITSDK

SEQ ID NO: 13793 - protein, 492 aa, Homo sapiens
MKAMPWNWTCLLSHLLMVGMGSSTLLTRQPAPLSQKQRSFVTFRGEPAEGFNHLVVDERTGHIYLGAVNRIYKLSSDLKVLVTHETGPDEDNPKCYPPRIVQTCNEPLTTTNNVNKMLLIDYKENRLIACGSLYQGICKLLRLEDLFKLGEPYHKKEHYLSGVNESGSVFGVIVSYSNLDDKLFIATAVDGKPEYFPTISSRKLTKNSEADGMFAYVFHDEFVASMIKIPSDTFTIIPDFDIYYVYGFSSGNFVYFLTLQPEMVSPPGSTTKEQVYTSKLVRLCKEDTAFNSYVEVPIGCERSGVEYRLLQAAYLSKAGAVLGRTLGVHPDDDLLFTVFSKGQKRKMKSLDESALCIFILKQINDRIKERLQSCYRGEGTLDLAWLKVKDIPCSSALLTIDDNFCGLDMNAPLGVSDMVRGIPVFTEDRDRMTSVIAYVYKNHSLAFVGTKSGKLKKMPGTSLCPTLELQTGPRSHRATVTLELLFSSCSSN

SEQ ID NO: 13794 - protein, 595 aa, Homo sapiens
MANQVNGNAVQLKEEEEPMDTSSVTHTEHYKTLIEAGLPQKVAERLDEIFQTGLVAYVDLDERAIDALREFNEEGALSVLQQFKESDLSHVQNKSAFLCGVMKTYRQREKQGSKVQESTKGPDEAKIKVFVGKIPRDLYEDELVPLFEKAGPIWDLRLMMDPLSGQNRGYAFITFCGKEAAQEAVKLCDSYEIRPGKHLGVCISVANNRLFVGSIPKNKTKENILEEFSKVTEGLVDVILYHQPDDKKKNRGFCFLEYEDHKSAAQARRRLMSGKVKVWGNVVTVEWADPVEEPDPEVMAKVKVLFVRNLATTVTEEILEKSFSEFGKLERVKKLKDYAFVHFEDRGAAVKAMDEMNGKEIEGEEIEIVLAKPPDKKRKERQAARQASRSTAYEDYYYHPPPRMPPPIRGRGRGGGRGGYGYPPDYYGYEDYYDDYYGYDYHDYRGGYEDPYYGYDDGYAVRGRGGGRGGRGAPPPPRGRGAPPPRGRAGYSQRGAPLGPPRGSRGGRGGPAQQQRGRGSRGSRGNRGGNVGGKRKADGYNQPDSKRRQTNNQQNWGSQPIAQQPLQQGGDYSGNYGYNNDNQEFYQDTYGQQWK

SEQ ID NO: 13795 - protein, 164 aa, Homo sapiens
MSTEAQRVDDSPSTSGGSSDGDQRESVQQEPEREQVQPKKKEGKISSKTAAKLSTSAKRIQKELAEITLDPPPNCSTNITLKGNAHSILNWIFGFWMPTSAGPKGDNIYEWRSTILGPPGSVYEGGVFFLDITFSPDYPFKPPKVTFRTRIYHCNINSQGVICL

SEQ ID NO: 13796 - protein, 594 aa, Homo sapiens
MAAATADPGAGNPQPGDSSGGGAGGGLPSPGEQELSRRLQRLYPAVNQQETPLPRSWSPKDKYNYIGLSQGNLRVHYKGHGKNHKDAASVRATHPIPAACGIYYFEVKIVSKGRDGYMGIGLSAQGVNMNRLPGIAFTDLPANLYPTVGLQTPGEIVDANFGQQPFLFDIEDYMREWRAKVQGTVHCFPISARLGEWQAVLQNMVSSYLVHHGYCATATAFARMTETPIQEEQASIKNRQKIQKLVLEGRVGEAIETTQRFYPGLLEHNPNLLFMLKCRQFVEMVNGTDSEVRSLSSRSPKSQDSYPGSPSLSPRHGPSSSHMHNTGADSPSCSNGVASTKSKQNHSKYPAPSSSSSSSSSSSSSSPSSVNYSESNSTDSTKSQHHSSTSNQETSNPWLQLERRPNQAAPTTPPGPTPTSTPPHSDSEMEMEAEHYPNGVLGSMSTRIVNGAYKHEDLQTDESSMDDRHPRRQLCGGNQAATERIILFGRELQALSEQLGREYGKNLAHTEMLQDAFSLLAYSDPWSCPVGQQLDPIQREPVCAALNSAILESQNLPKQPPLMLALGQASECLRLMARAGLGSCSFARVDDYLH

SEQ ID NO: 13797 - protein, 580 aa, Homo sapiens
MILQAHLHSLCLLMLYLATGYGQEGKFSGPLKPMTFSIYEGQEPSQIIFQFKANPPAVTFELTGETDNIFVIEREGLLYYNRALDRETRSTHNLQVAALDANGIIVEGPVPITIKVKDINDNRPTFLQSKYEGSVRQNSRPGNSIGTLTAHDRDEENTANSFLNYRIVEQTPKLPMDGLFLIQTYAGMLQLAKQSLKKQDTPQYNLTIEVSDKDFKTLCFVQINVIDINDQIPIFEKSDYGNLTLAEDTNIGSTILTIQATDADEPFTGSSKILYHIIKGDSEGRLGVDTDPHTNTGYVIIKKPLDFETAAVSNIVFKAENPEPLVFGVKYNASSFAKFTLIVTDVNEAPQFSQHVFQAKVSEDVAIGTKVGNVTAKDPEGLDISYSLRGDTRGWLKIDHVTGEIFSVAPLDREAGSPYRVQVVATEVGGSSLSSVSEFHLILMDVNDNPPRLAKDYTGLFFCHPLSAPGSLIFEATDDDQHLFRGPHFTFSLGSGSLQNDWEVSKINGTHARLSTRHTEFEEREYVVLIRINDGGRPPLEGIVSLPGIILAVVFIRIKKDKGKDNVESAQASEVKPLRS

SEQ ID NO: 13798 - protein, 880 aa, Homo sapiens
MQPGATTCTEDRIQHALERCLHGLSLSRRSTSWSAGLCLNCWSLQELVSRDPGHFLILLEQILQKTREVQEKGTYDLLTPLALLFYSTVLCTPHFPPDSDLLLKAASTYHRFLTWPVPYCSICQELLTFIDAELKAPGISYQRLVRAEQGLPIRSHRSSTVTVLLLNPVEVQAEFLAVANKLSTPGHSPHSAYTTLLLHAFQATFGAHCDVPGLHCRLQAKTLAELEDIFTETAEAQELASGIGDAAEARRWLRTKLQAVGEKAGFPGVLDTAKPGKLHTIPIPVARCYTYSWSQDSFDILQEILLKEQELLQPGILGDDEEEEEEEEEVEEDLETDGHCAERDSLLSTSSLASHDSTLSLASSQASGPALSRHLLTSFVSGLSDGMDSGYVEDSEESSSEWPWRRGSQERRGHRRPGQKFIRIYKLFKSTSQLVLRRDSRSLEGSSDTALPLRRAGSLCSPLDEPVSPPSRAQRSRSLPQPKLGTQLPSWLLAPASRPQRRRPFLSGDEDPKASTLRVVVFGSDRISGKVARAYSNLRRLENNRPLLTRFFKLQFFYVPVKRSHGTSPGACPPPRSQTPSPPTDSPRHASPGELGTTPWEESTNDISHYLGMLDPWYERNVLGLMHLPPEVLCQQSLKAEAQALEGSPTQLPILADMLLYYCRFAARPVLLQVYQTELTFITGEKTTEIFIHSLELGHSAATRAIKASGPGSKRLGIDGDREAVPLTLQIIYSKGAISGRSRWSNLEKVCTSVNLNKACRKQEELDSSMEALTLNLTEVVKRQNSKSKKGFNQISTSQIKVDKVQIIGSNSCPFAVCLDQDERKILQSVVRCEVSPCYKPEKSDLSSPPQTPPDLPAQAAPDLCSLLCLPIMTFSGALP

SEQ ID NO: 13799 - protein, 697 aa, Homo sapiens
KQSFPCICKNPGTQKSCVPLSVQPTEPRLNYLDLKYSDMFKEINSTANGPGIYEMFGTPVYCHVRETERDENTYYREICSAPSGRRITNKCRSSHSERKSNIRTRLSQKKTHMKCPKTSFGIKQEHKVLISKEKSSKAVHSNLHDIENGDGISEPDWQIKSSGNEFLSSKDEIHPMNLAQTPEQSMKQNEFPPVSDLSIVEEVSMEESTGDRDISNNQILTTSLRDLQELEELHHQIPFIPSEDSWAVPSEKNSNKYVQQEKQNTASLSKVNASRILTNDLEFDSVSDHSKTLTNFSFQAKQESASSQTYQYWVHYLDHDSLANKSITYQMFGKTLSGTNSISQEIMDSVNNEELTDELLGCLAAELLALDEKDNNSCQKMANETDPENLNLVLRWRGSTPKEMGRETTKVKIQRHSSGLRIYDREEKFLISNEKKIFSENSLKSEEPILWTKGEILGKGAYGTVYCGLTSQGQLIAVKQVALDTSNKLAAEKEYRKLQEEVDLLKALKHVNIVAYLGTCLQENTVSIFMEFVPGGSISSIINRFGPLPEMVFCKYTKQILQGVAYLHENCVVHRDIKGNNVMLMPTGIIKLIDFGCARRLAWAGLNGTHSDMLKSMHGTPYWMAPEVINESGYGRKSDIWSIGCTVFEMATGKPPLASMDRMAAMFYIGAHRGLMPPLPDHFSENAADFVRMCLTR

SEQ ID NO: 13800 - protein, 675 aa, Homo sapiens
MAGPAPPAADELPGPAARRLYSRMEASCLELALEGERLCKAGDFKTGVAFFEAAVQVGTEDLKTLSAIYSQLGNAYFYLKEHGRALEYHKHDLLLARTIGDRMGEAKASGNLGNTLKVLGRFDEAAVCCQRHLSIAQEQGDKVGEARALYNIGNVYHAKGKQLSWNAANATQDPGHLPPDVRETLCKASEFYERNLSLVKELGDRAAQGRAYGNLGNTHYLLGNFTEATTFHKERLAIAKEFGDKAAERRAYSNLGNAHVFLGRFDVAAEYYKKTLQLSRQLRDQAVEAQACYSLGNTYTLLQDYERAAEYHLRHLLIAQELADRVGEGRACWSLGNAYVSMGRPAQALTFAKKHLQISQEIGDRHGELTARMNVAQLQLVLGRLTSPAASEKPDLAGYEAQGARPKRTQRLSAETWDLLRLPLEREQNGDSHHSGDWRGPSRDSLPLPVRSRKYQEGPDAERRPREGSHSPLDSADVRVHVPRTSIPRAPSSDEECFFDLLTKFQSSRMDDQRCPLDDGQAGAAEATAAPTLEDRIAQPSMTASPQTEEFFDLIASSQSRRLDDQRASVGSLPGLRITHSNAGHLRGHGEPQEPGDDFFNMLIKYQSSRIDDQRCPPPDVLPRGPTMPDEDFFSLIQRVQAKRMDEQRVDLAGGPEQGAGGPPEPQQQCQPGAS

SEQ ID NO: 13801 - protein, 1272 aa, Homo sapiens
MANDSPAKSLVDIDLSSLRDPAGIFELVEVVGNGTYGQVYKGRHVKTGQLAAIKVMDVTEDEEEEIKLEINMLKKYSHHRNIATYYGAFIKKSPPGHDDQLWLVMEFCGAGSITDLVKNTKGNTLKEDWIAYISREILRGLAHLHIHHVIHRDIKGQNVLLTENAEVKLVDFGVSAQLDRTVGRRNTFIGTPYWMAPEVIACDENPDATYDYRSDLWSCGITAIEMAEGAPPLCDMHPMRALFLIPRNPPPRLKSKKWSKKFFSFIEGCLVKNYMQRPSTEQLLKHPFIRDQPNERQVRIQLKDHIDRTRKKRGEKDETEYEYSGSEEEEEEVPEQEGEPSSIVNVPGESTLRRDFLRLQQENKERSEALRRQQLLQEQQLREQEEYKRQLLAERQKRIEQQKEQRRRLEEQQRREREARRQQEREQRRREQEEKRRLEELERRRKEEEERRRAEEEKRRVEREQEYIRRQLEEEQRHLEVLQQQLLQEQAMLLHDHRRPHPQHSQQPPPPQQERSKPSFHAPEPKAHYEPADRAREVEDRFRKTNHSSPEAQSKQTGRVLEPPVPSRSESFSNGNSESVHPALQRPAEPQVPVRTTSRSPVLSRRDSPLQGSGQQNSQAGQRNSTSIEPRLLWERVEKLVPRPGSGSSSGSSNSGSQPGSHPGSQSGSGERFRVRSSSKSEGSPSQRLENAVKKPEDKKEVFRPLKPADLTALAKELRAVEDVRPPHKVTDYSSSSEESGTTDEEDDDVEQEGADESTSGPEDTRAASSLNLSNGETESVKTMIVHDDVESEPAMTPSKEGTLIVRQSTVDQKRASHHESNGFAGRIHLLPDLLQQSHSSSTSSTSSSPSSSQPTPTMSPQTPQDKLTANETQSASSTLQKHKSSSSFTPFIDPRLLQISPSSGTTVTSVVGFSCDGMRPEAIRQDPTRKGSVVNVNPTNTRPQSDTPEIRKYKKRFNSEILCAALWGVNLLVGTESGLMLLDRSGQGKVYPLINRRRFQQMDVLEGLNVLVTISGKKDKLRVYYLSWLRNKILHNDPEVEKKQGWTTVGDLEGCVHYKVVKYERIKFLVIALKSSVEVYAWAPKPYHKFMAFKSFGELVHKPLLVDLTVEEGQRLKVIYGSCAGFHAVDVDSGSVYDIYLPTHIQCSIKPHAIIILPNTDGMELLVCYEDEGVYVNTYGRITKDVVLQWGEMPTSVAYIRSNQTMGWGEKAIEIRSVETGHLDGVFMHKRAQRLKFLCERNDKVFFASVRSGGSSQVYFMTLGRTSLLSW

SEQ ID NO: 13802 - protein, 1613 aa, Homo sapiens
MSTPDPPLGGTPRPGPSPGPGPSPGAMLGPSPGPSPGSAHSMMGPSPGPPSAGHPIPTQGPGGYPQDNMHQMHKPMESMHEKGMSDDPRYNQMKGMGMRSGGHAGMGPPPSPMDQHSQGYPSPLGGSEHASSPVPASGPSSGPQMSSGPGGAPLDGADPQALGQQNRGPTPFNQNQLHQLRAQIMAYKMLARGQPLPDHLQMAVQGKRPMPGMQQQMPTLPPPSVSATGPGPGPGPGPGPGPGPAPPNYSRPHGMGGPNMPPPGPSGVPPGMPGQPPGGPPKPWPEGPMANAAAPTSTPQKLIPPQPTGRPSPAPPAVPPAASPVMPPQTQSPGQPAQPAPMVPLHQKQSRITPIQKPRGLDPVEILQEREYRLQARIAHRIQELENLPGSLAGDLRTKATIELKALRLLNFQRQLRQEVVVCMRRDTALETALNAKAYKRSKRQSLREARITEKLEKQQKIEQERKRRQKHQEYLNSILQHAKDFKEYHRSVTGKIQKLTKAVATYHANTEREQKKENERIEKERMRRLMAEDEEGYRKLIDQKKDKRLAYLLQQTDEYVANLTELVRQHKAAQVAKEKKKKKKKKKAENAEGQTPAIGPDGEPLDETSQMSDLPVKVIHVESGKILTGTDAPKAGQLEAWLEMNPGYEVAPRSDSEESGSEEEEEEEEEEQPQAAQPPTLPVEEKKKIPDPDSDDVSEVDARHIIENAKQDVDDEYGVSQALARGLQSYYAVAHAVTERVDKQSALMVNGVLKQYQIKGLEWLVSLYNNNLNGILADEMGLGKTIQTIALITYLMEHKRINGPFLIIVPLSTLSNWAYEFDKWAPSVVKVSYKGSPAARRAFVPQLRSGKFNVLLTTYEYIIKDKHILAKIRWKYMIVDEGHRMKNHHCKLTQVLNTHYVAPRRLLLTGTPLQNKLPELWALLNFLLPTIFKSCSTFEQWFNAPFAMTGEKVDLNEEETILIIRRLHKVLRPFLLRRLKKEVEAQLPEKVEYVIKCDMSALQRVLYRHMQAKGVLLTDGSEKDKKGKGGTKTLMNTIMQLRKICNHPYMFQHIEESFSEHLGFTGGIVQGLDLYRASGKFELLDRILPKLRATNHKVLLFCQMTSLMTIMEDYFAYRGFKYLRLDGTTKAEDRGMLLKTFNEPGSEYFIFLLSTRAGGLGLNLQSADTVIIFDSDWNPHQDLQAQDRAHRIGQQNEVRVLRLCTVNSVEEKILAAAKYKLNVDQKVIQAGMFDQKSSSHERRAFLQAILEHEEQDEEEDEVPDDETVNQMIARHEEEFDLFMRMDLDRRREEARNPKRKPRLMEEDELPSWIIKDDAEVERLTCEEEEEKMFGRGSRHRKEVDYSDSLTEKQWLKAIEEGTLEEIEEEVRQKKSSRKRKRDSDAGSSTPTTSTRSRDKDDESKKQKKRGRPPAEKLSPNPPNLTKKMKKIVDAVIKYKDSSGRQLSEVFIQLPSRKELPEYYELIRKPVDFKKIKERIRNHKYRSLNDLEKDVMLLCQNAQTFNLEGSLIYEDSIVLQSVFTSVRQKIEKEDDSEGEESEEEEEGEEEGSESESRSVKVKIKLGRKEKAQDRLKGGRRRPSRGSRAKPVVSDDDSEEEQEEDRSGSGSEED

SEQ ID NO: 13803 - protein, 756 aa, Homo sapiens
MWGRRRKLRRLNDVTISTCHASAKVGTRLMFDHNGKIIQKTPYPRPRGTTVSVQQLFSTLPVRHKEFQRNIKKEYAKMVQVLHAYCIISAGIRVSCTNQLGQGKRQPVVCTGGSPSIKENIGSVFGQKQLQSLIPFVQLPPSDSVCEEYGLSCSDALHNLFYISGFISQCTHGVGRSSTDRQFFFINRRPCDPAKVCRLVNEVYHMYNRHQYPFVVLNISVDSECVDINVTPDKRQILLQEEKLLLAVLKTSLIGMFDSDVNKLNVSQQPLLDVEGNLIKMHAADLEKPMVEKQDQSPSLRTGEEKKDVSISRLREAFSLRHTTENKPHSPKTPEPRRSPLGQKRGMLSSSTSGAISDKGVLRPQKEAVSSSHGPSDPTDRAEVEKDSGHGSTSVDSEGFSIPDTGSHCSSEYAASSPGDRGSQEHVDSQEKAPKTDDSFSDVDCHSNQEDTGCKFRVLPQPTNLATPNTKRFKKEEILSSSDICQKLVNTQDMSASQVDVAVKINKKVVPLDFSMSSLAKRIKQLHHEAQQSEGEQNYRKFRAKICPGENQAAEDELRKEISKTMFAEMEIIGQFNLGFIITKLNEDIFIVDQHATDEKYNFEMLQQHTVLQGQRLIAPQTLNLTAVNEAVLIENLEIFRKNGFDFVIDENAPVTERAKLISLPTSKNWTFGPQDVDELIFMLSDSPGVMCRPSRVKQMFASRACRKSVMIGTALNTSEMKKLITHMGEMDHPWNCPHGRPTMRHIANLGVISQN

SEQ ID NO: 13804 - protein, 594 aa, Homo sapiens
MEQLSDEEIDHGAEEDSDKEDQDLDKMFGAWLGELDKLTQSLDSDKPMEPVKRSPLRQETNMANFSYRFSIYNLNEALNQGETVDLDALMADLCSIEQELSSIGSGNSKRQITETKATQKLPVSRHTLKHGTLKGLSSSSNRIAKPSHASYSLDDVTAQLEQASLSMDEAAQQSVLEDTKPLVTNQHRRTASAGTVSDAEVHSISNSSHSSITSAASSMDSLDIDKVTRPQELDLTHQGQPITEEEQAAKLKAEKIRVALEKIKEAQVKKLVIRVHMSDDSSKTMMVDERQTVRQVLDNLMDKSHCGYSLDWSLVETVSELQMERIFEDHENLVENLLNWTRDSQNKLIFMERIEKYALFKNPQNYLLGKKETAEMADRNKEVLLEECFCGSSVTVPEIEGVLWLKDDGKKSWKKRYFLLRASGIYYVPKGKAKVSRDLVCFLQLDHVNVYYGQDYRNKYKAPTDYCLVLKHPQIQKKSQYIKYLCCDDVRTLHQWVNGIRIAKYGKQLYMNYQEALKRTESAYDWTSLSSSSIKSGSSSSSIPESQSNHSNQSDSGVSDTQPAGHVRSQSIVSSVFSEAWKRGTQLEESSKIN

SEQ ID NO: 13805 - protein, 568 aa, Homo sapiens
MLERPPALAMPMPTEGTPPPLSGTPIPVPAYFRHAEPGFSLKRPRGLSRSLPPPPPAKGSIPISRLFPPRTPGWHQLQPRRVSFRGEASETLQSPGYDPSRPESFFQQSFQRLSRLGHGSYGEVFKVRSKEDGRLYAVKRSMSPFRGPKDRARKLAEVGSHEKVGQHPCCVRLEQAWEEGGILYLQTELCGPSLQQHCEAWGASLPEAQVWGYLRDTLLALAHLHSQGLVHLDVKPANIFLGPRGRCKLGDFGLLVELGTAGAGEVQEGDPRYMAPELLQGSYGTAADVFSLGLTILEVACNMELPHGGEGWQQLRQGYLPPEFTAGLSSELRSVLVMMLEPDPKLRATAEALLALPVLRQPRAWGVLWCMAAEALSRGWALWQALLALLCWLWHGLAHPASWLQPLGPPATPPGSPPCSLLLDSSLSSNWDDDSLGPSLSPEAVLARTVGSTSTPRSRCTPRVLTPLRLSPAAEPSAPGLGPAAEAPCCVEQRGFLSRHIPRSFSAFQAAPPKSACNALHLHGHTQPSAFVWSLTCSSHHGRTFEARTKVDPLFKICGGFLTVFADL

SEQ ID NO: 13806 - protein, 366 aa, Homo sapiens
MTSCLPALRFIATPRLSAMPHIDNDVKLDFKDVLLRPKRSTLKSRSEVDLTRSFSFRNSKQTYSGVPIIAANMDTVGTFEMAKVLCKFSLFTAVHKHYSLVQWQEFAGQNPDCLEHLAASSGTGSSDFEQLEQILEAIPQVKYICLDVANGYSEHFVEFVKDVRKRFPQHTIMAGNVVTGEMVEELILSGADIIKVGIGPGSVCTTRKKTGVGYPQLSAVMECADAAHGLKGHIISDGGCSCPGDVAKAFGAGADFVMLGGMLAGHSESGGELIERDGKKYKLFYGMSSEMAMKKYAGGVAEYRASEGKTVEVPFKGDVEHTIRDILGGIRSTCTYVGAAKLKELSRRTTFIRVTQQVNPIFSEAC

SEQ ID NO: 13807 - protein, 706 aa, Homo sapiens
MVQSRLTATSASQDSPASGLQTPLQSGQPFKFSILEICDRIKEEFQFLQAQYHSLKLECEKLASEKTEMQRHYVMYYEMSYGLNIEMHKQAEIVKRLSGICAQIIPFLTQEHQQQVLQAVERAKQVTVGELNSLIGQQQLQPLSHHAPPVPLTPRPAGLVGGSATGLLALSGALAAQAQLAAAVKEDRAGVEAEGSRVERAPSRSASPSPPESLVEEERPSGPGGGGKQRADEKEPSGPYESDEDKSDYNLVVDEDQPSEPPSPATTPCGKVPICIPARRDLVDSPASLASSLGSPLPRAKELILNDLPASTPASKSCDSSPPQDASTPGPSSASHLCQLAAKPAPSTDSVALRSPLTLSSPFTTSFSLGSHSTLNGDLSVPSSYVSLHLSPQVSSSVVYGRSPVMAFESHPHLRGSSVSSSLPSIPGGKPAYSFHVSADGQMQPVPFPSDALVGAGIPRHARQLHTLAHGEVVCAVTISGSTQHVYTGGKGCVKVWDVGQPGAKTPVAQLDCLNRDNYIRSCKLLPDGRSLIVGGEASTLSIWDLAAPTPRIKAELTSSAPACYALAVSPDAKVCFSCCSDGNIVVWDLQNQTMVRQFQGHTDGASCIDISDYGTRLWTGGLDNTVRCWDLREGRQLQQHDFSSQIFSLGHCPNQDWLAVGMESSNVEILHVRKPEKYQLHLHESCVLSLKFASCVQGVVLSPEL

SEQ ID NO: 13808 - protein, 418 aa, Homo sapiens
MMEESGIETTPPGTPPPNPAGLAATAMSSTPVPLAATSSFSSPNVSSMESFPPLAYSTPQPPLPPVRPSAPLPFVPPPAVPSVPPLVTSMPPPVSPSTAAAFGNPPVSHFPPSTSAPNTLLPAPPSGPPISGFSVGSTYDITRGHAGRAPQTPLMPSFSAPSGTGLLPTPITQQASLTSLAQGTGTTSAITFPEEQEDPRITRGQDEASAGGIWGFIKGVAGNPMVKSVLDKTKHSVESMITTLDPGMAPYIKSGGELDIVVTSNKEVKVAAVRDAFQEVFGLAVVVGEAGQSNIAPQPVGYAAGLKGAQERIDSLRRTGVIHEKQTAVSVENFIAELLPDKWFDIGCLVVEDPVHGIHLETFTQATPVPLEFVQQVGFLLCFFIMLQRNLHYCFQNKNLFGFFVRNMFLILFQSFFF

SEQ ID NO: 13809 - protein, 853 aa, Homo sapiens
MIGCGACEPKVKMAGGQAAAALPTWKMAARRSLSARGRGILQAAAGRLLPLLLLSCCCGAGGCAAVGENEETVIIGLRLEDTNDVSFMEGGALRVSERTRVKLRVYGQNINNETWSRIAFTEHERRRHSPGERGLGGPAPPEPDSGPQRCGIRTSDIIILPHIILNRRTSGIIEIEIKPLRKMEKSKSYYLCTSLSTPALGAGGSGSTGGAVGGKGGSGVAGLPPPPWAETTWIYHDGEDTKMIVGEEKKFLLPFWLQVIFISLLLCLSGMFSGLNLGLMALDPMELRIVQNCGTEKEKNYAKRIEPVRRQGNYLLCSLLLGNVLVNTTLTILLDDIAGSGLVAVVVSTIGIVIFGEIVPQAICSRHGLAVGANTIFLTKFFMMMTFPASYPVSKLLDCVLGQEIGTVYNREKLLEMLRVTDPYNDLVKEELNIIQGALELRTKTVEDVMTPLRDCFMITGEAILDFNTMSEIMESGYTRIPVFEGERSNIVDLLFVKDLAFVDPDDCTPLKTITKFYNHPLHFVFNDTKLDAMLEEFKKGKSHLAIVQRVNNEGEGDPFYEVLGIVTLEDVIEEIIKSEILDETDLYTDNRTKKKVAHRERKQDFSAFKQTDSEMKVKISPQLLLAMHRFLATEVEAFSPSQMSEKILLRLLKHPNVIQELKYDEKNKKAPEYYLYQRNKPVDYFVLILQGKVEVEAGKEGMKFEASAFSYYGVMALTASPGENKSPPRPCGLNHSDSLSRSDRIDAVTPTLGSSNNQLNSSLLQVYIPDYSVRALSDLQFVKISRQQYQNALMASRMDKTPQSSDSENTKIELTLTELHDGLPDETANLLNEQNCVTHSKANHSLHNEGAI

SEQ ID NO: 13810 - protein, 1386 aa, Homo sapiens
MPEGAQGLSLSKPSPSLGCGRRGEVCDCGTVCETRTAPAAPTMASPRGSGSSTSLSTVGSEGDPAPGPTPACSASRPEPLPGPPIRLHLSPVGIPGSARPSRLERVAREIVETERAYVRDLRSIVEDYLGPLLDGGVLGLSVEQVGTLFANIEDIYEFSSELLEDLENSSSAGGIAECFVQRSEDFDIYTLYCMNYPSSLALLRELSLSPPAALWLQERQAQLRHSLPLQSFLLKPVQRILKYHLLLQELGKHWAEGPGTGGREMVEEAIVSMTAVAWYINDMKRKQEHAARLQEVQRRLGGWTGPELSAFGELVLEGAFRGGGGGGPRLRGGERLLFLFSRMLLVAKRRGLEYTYKGHIFCCNLSVSESPRDPLGFKVSDLTIPKHRHLLQAKNQEEKRLWIHCLQRLFFENHPASIPAKAKQVLLENSLHCAPKSKPVLEPLTPPLGSPRPRDARSFTPGRRNTAPSPGPSVIRRGRRQSEPVKDPYVMFPQNAKPGFKHAGSEGELYPPESQPPVSGSAPPEDLEDAGPPTLDPSGTSITEEILELLNQRGLRDPGPSTHDIPKFPGDSQVPGDSETLTFQALPSRDSSEEEEEEEEGLEMDERGPSPLHVLEGLESSIAAEMPSIPCLTKIPDVPNLPEIPSRCEIPEGSRLPSLSDISDVFEMPCLPAIPSVPNTPSLSSTPTLSCDSWLQGPLQEPAEAPATRRELFSGSNPGKLGEPPSGGKAGPEEDEEGVSFTDFQPQDVTQHQGFPDELAFRSCSEIRSAWQALEQGQLARPGFPEPLLILEDSDLGGDSGSGKAGAPSSERTASRVRELARLYSERIQQMQRAETRASANAPRRRPRVLAQPQPSPCLPQEQAEPGLLPAFGHVLVCELAFPLTCAQESVPLGPAVWVQAAIPLSKQGGSPDGQGLHVSNLPKQDLPGIHVSAATLLPEQGGSRHVQAPAATPLPKQEGPLHLQVPALTTFSDQGHPEIQVPATTPLPEHRSHMVIPAPSTAFCPEQGHCADIHVPTTPALPKEICSDFTVSVTTPVPKQEGHLDSESPTNIPLTKQGGSRDVQGPDPVCSQPIQPLSWHGSSLDPQGPGDTLPPLPCHLPDLQIPGTSPLPAHGSHLDHRIPANAPLSLSQELPDTQVPATTPLPLPQVLTDIWVQALPTSPKQGSLPDIQGPAAAPPLPEPSLTDTQVQKLTPSLEQKSLIDAHVPAATPLPERGGSLDIQGLSPTPVQTTMVLSKPGGSLASHVARLESSDLTPPHSPPPSSRQLLGPNAAALSRYLAASYISQSLARRQGPGGGAPAASRGSWSSAPTSRASSPPPQPQPPPPPARRLSYATTVNIHVGGGGRLRPAKAQVRLNHPALLASTQESMGLHRAQGAPDAPFHM

SEQ ID NO: 13811 - protein, 178 aa, Homo sapiens
MTSQPVPNETIIVLPSNVINFSQAEKPEPTNQGQDSLKKHLHAEIKVIGTIQILCGMMVLSLGIILASASFSPNFTQVTSTLLNSAYPFIGPFFFIISGSLSIATEKRLTKLLVHSSLVGSILSALSALVGFIILSVKQATLNPASLQWNSLSDADLHSAGILPSCAHCCAAVETGLL

SEQ ID NO: 13812 - protein, 939 aa, Homo sapiens
MSASSEGPRLALASPRPILAPLCTPEGQKTATAHRSSSLAPTSVGQLVMSASAGPKPPPATTGSVLAPTSLGLVMPASAGPRSPPVTLGPNLAPTSRDQKQEPPASVGPKPTLAASGLSLALASEEQPPELPSTPSPVPSPVLSPTQEQALAPASTASGAASVGQTSARKRDAPAPRPLPASEGHLQPPAQTSGPTGSPPCIQTSPDPRLSPSFRARPEALHSSPEDPVLPRPPQTLPLDVGQGPSEPGTHSPGLLSPTFRPGAPSGQTVPPPLPKPPRSPSRSPSHSPNRSPCVPPAPDMALPRLGTQSTGPGRCLSPNLQAQEAPAPVTTSSSTSTLSSSPWSAQPTWKSDPGFRITVVTWNVGTAMPPDDVTSLLHLGGGDDSDGADMIAIGLQEVNSMLNKRLKDALFTDQWSELFMDALGPFNFVLVSSVRMQGVILLLFAKYYHLPFLRDVQTDCTRTGLGGYWGNKGGVSVRLAAFGHMLCFLNCHLPAHMDKAEQRKDNFQTILSLQQFQGPGAQGILDHDLVFWFGDLNFRIESYDLHFVKFAIDSDQLHQLWEKDQLNMAKNTWPILKGFQEGPLNFAPTFKFDVGTNKYDTSAKKRKPAWTDRILWKVKAPGGGPSPSGRKSHRLQVTQHSYRSHMEYTVSDHKPVAAQFLLQFAFRDDMPLVRLEVADEWVRPEQAVVRYRMETVFARSSWDWIGLYRVGFRHCKDYVAYVWAKHEDVDGNTYQVTFSEESLPKGHGDFILGYYSHNHSILIGITEPFQISLPSSELASSSTDSSGTSSEGEDDSTLELLAPKSRSPSPGKSKRHRSRSPGLARFPGLALRPSSRERRGASRSPSPQSRRLSRVAPDRSSNGSSRGSSEEGPSGLPGPWAFPPAVPRSLGLLPALRLETVDPGGGGSWGPDREALAPNSLSPSPQGHRGLEEGGLGP

SEQ ID NO: 13813 - protein, 601 aa, Homo sapiens
MIQDKEVTLEYVSSLDFWYCKRCKANIGGHRSSCSFCKNPREVTEAKQELITYPQPQKTSIPAPLEKQPNQPLRPADKEPEPRKREEGQESRLGHQKREAERYLPPSRREGPTFRRDRERESWSGETRQDGESKTIMLKRIYRSTPPEVIVEVLEPYVRLTTANVRIIKNRTGPMGHTYGFIDLDSHAEALRVVKILQNLDPPFSIDGKMVAVNLATGKRRNDSGDHSDHMHYYQGKKYFRDRRGGGRNSDWSSDTNRQGQQSSSDCYIYDSATGYYYDPLAGTYYDPNTQQEVYVPQDPGLPEEEEIKEKKPTSQGKSSSKKEMSKRDGKEKKDRGVTRFQENASEGKAPAEDVFKKPLPPTVKKEESPPPPKVVNPLIGLLGEYGGDSDYEEEEEEEQTPPPQPRTAQPQKREEQTKKENEEDKLTDWNKLACLLCRRQFPNKEVLIKHQQLSDLHKQNLEIHRKIKQSEQELAYLERREREGKFKGRGNDRREKLQSFDSPERKRIKYSRETDSDRKLVDKEDIDTSSKGGCVQQATGWRKGTGLGYGHPGLASSEEAEGRMRGPSVGASGRTSKRQSNETYRDAVRRVMFARYKELD

SEQ ID NO: 13814 - protein, 321 aa, Homo sapiens
MGPWGEPELLVWRPEAVASEPPVPVGLEVKLGALVLLLVLTLLCSLVPICVLRRPGANHEGSASRQKALSLVSCFAGGVFLATCLLDLLPDYLAAIDEALAALHVTLQFPLQEFILAMGFFLVLVMEQITLAYKEQSGPSPLEETRALLGTVNGGPQHWHDGPGVPQASGAPATPSALRACVLVFSLALHSVFEGLAVGLQRDRARAMELCLALLLHKGILAVSLSLRLLQSHLRAQVVAGCGILFSCMTPLGIGLGAALAESAGPLHQLAQSVLEGMAAGTFLYITFLEILPQELASSEQRILKVILLLAGFALLTGLLF

SEQ ID NO: 13815 - protein, 373 aa, Homo sapiens
MYRLMSAVTARAAAPGGLASSCGRRGVHQRAGLPPLGHGWVGGLGLGLGLALGVKLAGGLRGAAPAQSPAAPDPEASPLAEPPQEQSLAPWSPQTPAPPCSRCFARAIESSRDLLHRIKDEVGAPGIVVGVSVDGKEVWSEGLGYADVENRVPCKPETVMRIASISKSLTMVALAKLWEAGKLDLDIPVQHYVPEFPEKEYEGEKVSVTTRLLISHLSGIRHYEKDIKKVKEEKAYKALKMMKENVAFEQEKEGKSNEKNDFTKFKTEQENEAKCRNSKPGKKKNDFEQGELYLREKFENSIESLRLFKNDPLFFKPGSQFLYSTFGYTLLAAIVERASGCKYLDYMQKIFHDLDMLTTVQEENEPVIYNRAR

SEQ ID NO: 13816 - protein, 1054 aa, Homo sapiens
MHPQSLAEEEIKTEQEVVEGMDISTRSKDPGSAERTAQKRKFPSPPHSSNGHSPQDTSTSPIKKKKKPGLLNSNNKEQDGRNDFYCWVCHREGQVLCCELCPRVYHAKCLRLTSEPEGDWFCPECEKITVAECIETQSKAMTMLTIEQLSYLLKFAIQKMKQPGTDAFQKPVPLEQHPDYAEYIFHPMDLCTLEKNAKKKMYGCTEAFLADAKWILHNCIIYNGGNHKLTQIAKVVIKICEHEMNEIEVCPECYLAACQKRDNWFCEPCSNPHPLVWAKLKGFPFWPAKALRDKDGQVDARFFGQHDRAWVPINNCYLMSKEIPFSVKKTKSIFNSAMQEMEVYVENIRRKFGVFNYSPFRTPYTPNSQYQMLLDPTNPSAGTAKIDKQEKVKLNFDMTASPKILMSKPVLSGGTGRRISLSDMPRSPMSTNSSVHTGSDVEQDAEKKATSSHFSASEESMDFLDKSTASPASTKTGQAGSLSGSPKPFSPQLSAPITTKTDKTSTTGSILNLNLDRSKAEMDLKELSESVQQQSTPVPLISPKRQIRSRFQLNLDKTIESCKAQLGINEISEDVYTAVEHSDSEDSEKSDSSDSEYISDDEQKSKNEPEDTEDKEGCQMDKEPSAVKKKPKPTNPVEIKEELKSTSPASEKADPGAVKDKASPEPEKDFSEKAKPSPHPIKDKLKGKDETDSPTVHLGLDSDSESELVIDLGEDHSGREGRKNKKEPKEPSPKQDAVQQKEITQSPSTSTITLVTSTQSSPLVTSSGSMSTLVSSVNADLPIATASADVAADIAKYTSKMMDAIKGTMTEIYNDLSKNTTGSTIAEIRRLRIEIEKLQWLHQQELSEMKHNLELTMAEMRQSLEQERDRLIAEVKKQLELEKQQAVDETKKKQWCANCKKEAIFYCCWNTSYCDYPCQQAHWPEHMKSCTQSATAPQQEADAEVNTETLNKSSQGSSSSTQSAPSETASASKEKETSAEKSKESGSTLDLSGSRETPSSILLGSNQGSDHSRSNKSSWSSSDEKRGSTRSDHNTSTSTKSLLPKESRLDTFWD

SEQ ID NO: 13817 - protein, 265 aa, Homo sapiens
MGKCLRYITANTDTEEQSFPVPKAFNTRVEELNLDVLLQKVDHLRMSESGKSESFELLRDHKEKFRDEIEFMWRFARAYGDMYELSTNTQEKKHYANIGKTLSERAINRAPMNGHCHLWYAVLCGYVSEFEGLQNKINYGHLFKEHLDIAIKLLPEEPFLYYLKGRYCYTVSKLSWIEKKMAATLFGKIPSSTVQEALHNFLKAEELCPGYSNPNYMYLAKCYTDLEENQNALKFCNLALLLPTVTKEDKEAQKEMQKIMTSLKR

SEQ ID NO: 13818 - protein, 327 aa, Homo sapiens
MAARDELGLGGDSLEAMPVPAARGRPRITNGPEELAAPSPAALADYEGKDVATRVGEAWQERPGAPRGGQGDPAVPAQQPADPSTPERQSSPSGSEQLVRRESCGSSVLTDFEGKDVATKVGEAWQDRPGAPRGGQGDPAVPTQQPADPSTPEQQNSPSGSEQFVRRESCTSRVRSPSSCMVTVTVTATSEQPHIYIPAPASELDSSSTTKGILFVKEYVNASEVSSGKPVSARYSNVSSIEDSFAMEKKPPCGSTPYSERTTGGICTYCNREIRDCPKITLEHLGICCHEYCFKCGICSKPMGDLLDQIFIHRDTIHCGKCYEKLF

SEQ ID NO: 13819 - protein, 244 aa, Homo sapiens
MWGAPLPRRPVWDVRSASAGPQPCLGGKMKLNLVQIFFMLLMLLLGLGMGLGLGLHMATAVLEESDQPLNEFWSSDSQDKAEATEEGDGTQTTETLVLSNKEVVQPGWPEDPILGEDEVGGNKMLRASALFQSNKDYLRLDQTDRECNDMMAHKMKEPSQSCIAQYAFIHEDLNTVKAVCNSPVIACELKGGKCHKSSRPFDLTLCELSQPDQVTPNCNYLTSVIKKHIIITCNDMKRQLPTGQ

SEQ ID NO: 13820 - protein, 241 aa, Homo sapiens
MAAPEAPPLDRVFRTTWLSTECDSHPLPPSYRKFLFETQAADLAGGTTVAAGNLLNESEKDCGQDRRAPGVQPCRLVTMTSVVKTVYSLQPPSALSGGQPADTQTRATSKSLLPVRSKEVDVSKQLHSGGPENDVTKITKLRRENGQMKATDTATRRNVRKGYKPLSKQKSEEELKDKNQLLEAVNKQLHQKLTETQGELKDLTQKVELLEKFRDNCLAILESKGLDPVAVRNFARGAEAF

SEQ ID NO: 13821 - protein, 657 aa, Homo sapiens
MDHFFIKRKRNSEVKYTEACSSSSVESGIVNSDNIEKNTDSNLQTSTSFEPHFKKKKVSARRYNEDYLKYGFIKCEKPFENDRPQCVICNNILANESLKPSKLKRHLETQHAELIDKPLEYFQRKKKDIKLSTQFLSCSTAVSEKALLSSYLVAYRVAKEKIANTAAEKIILPACLDMVRTIFDDKSADKLKTIPNDNTVSLRICTIAEHLETMLITRLQSGIDFAIQLDESTDIGSCTTLLVYVRYAWQDDFLEDFLCFLNLTSHLSGLDIFTELERRIVGQYKLNWKNCKGITSDGTATMTGKHSRVIKKLLEVTNNGAVWNHCFIHREGLASREIPQNLMEVLKNAVKVVNFIKGSSLNSRLLETFCSEIGTNHTHLLYHTKIRWLSQGKILSRVYELRNEIHFFLIEKKSHLASIFEDDTWVTKLAYLTDIFSILNELSLKLQGKNSDVFQHVERIQGFRKTLLLWQVRLKSNRPSYYMFPRFLQHIEENIINENILKEIKLEILLHLTSLSQTFNHFFPEEKFETLRENSWVKDPFAFRHPESIIELNLVPEEENELLQLSSSYTLKNDYETLSLSAFWMKVKEDFPLLSRKSVLLLLPFTTTSLCELGFSILTQLKTKERNGLNCAAVMRVALSSCVPDWNELMNRQAHPS

SEQ ID NO: 13822 - protein, 420 aa, Homo sapiens
AMLATLARVAALRRTCLFSGRGGGRGLWTGRPQSDMNNIKPLEGVKILDLTRVLAGPFATMNLGDLGAEVIKVERPGAGDDTRTWGPPFVGTESTYYLSVNRNKKSIAVNIKDPKGVKIIKELAAVCDVFVENYVPGKLSAMGLGYEDIDEIAPHIIYCSITGYGQTGPISQRAGYDAVASAVSGLMHITGPENGDPVRPGVAMTDLATGLYAYGAIMAGLIQKYKTGKGLFIDCNLLSSQVACLSHIAANYLIGQKEAKRWGTAHGSIVPYQAFKTKDGYIVVGAGNNQQFATVCKILDLPELIDNSKYKTNHLRVHNRKELIKILSERFEEELTSKWLYLFEGSGVPYGPINNMKNVFAEPQVSSLVLPLMSCRVSWRLVHGNGHFCSDVGTHHWRVWPTLHVRCASTAASSTGNCFG

SEQ ID NO: 13823 - protein, 511 aa, Homo sapiens
MFRKARRVNVRKRNDSEEEERERDEEQEPPPLLPPPGTGEEAGPGGGDRAPGGESLLGPGPSPPSALTPGLGAEAGGGFPGGAEPGNGLKPRKRPRENKEVPRASLLSFQDEEEENEEVFKVKKSSYSKKIVKLLKKEYKEDLEKSKIKTELNSSAESEQPLDKTGHVKDTNQEDGVIISEHGEDEMDMESEKEEEKPKTGGAFSNALSSLNVLRPGEIPDAAFIHAARKKRQMARELGDFTPHDNEPGKGRLVREDENDASDDEDDDEKRRIVFSVKEKSQRQKIAEEIGIEGSDDDALVTGEQDEELSRWEQEQIRKGINIPQVQASQPAEVNMYYQNTYQTMPYGSSYGIPYSYTAYGSSDAKSQKTDNTVPFKTPSNEMTPVTIDLVKKQLKDRLDSMKELHKTNRQQHEKHLQSRVDSTRAIERLEGSSGGIGERYKFLQEMRGYVQDLLECFSEKVPLINELESAIHQLYKQRASRLVQRRQDDIKDESSEFSSHSSQSILKTKL

SEQ ID NO: 13824 - protein, 403 aa, Homo sapiens
MQGTPGGGTRPGPSPVDRRTLLVFSFILAAALGQMNFTGDQVLRVLAKDEKQLSLLGDLEGLKPQKVDFWRGPARPSLPVDMRVPFSELKDIKAYLESHGLAYSIMIKDIQVLLDEERQAMAKSRRLERSTNSFSYSSYHTLEEIYSWIDNFVMEHSDIVSKIQIGNSFENQSILVLKFSTGGSRHPAIWIDTGIHSREWITHATGIWTANKIVSDYGKDRVLTDILNAMDIFIELVTNPDGFAFTHSMNRLWRKNKSIRPGIFCIGVDLNRNWKSGFGGNGSNSNPCSETYHGPSPQSEPEVAAIVNFITAHGNFKALISIHSYSQMLMYPYGRLLEPVSNQRELMWPVGSPSTGPMTVASSTPSALSSGTLGSMASCCRPHRSSPRPRRRGWRFGPSWSTP

SEQ ID NO: 13825 - protein, 1062 aa, Homo sapiens
MMGTSQGHVARKSRNWGLNPSRLSSIPLSSTPCHLSPSSLSPFSVAERKPPLFNMNAMSALYHIAQNESPVLQSGHWSEYFRNFVDSCLQKIPQDRPTSEVLLKHRFVLRERPPTVIMDLIQRTKDAVRELDNLQYRKMKKILFQEAPNGPGAEAPEEEEEAEPYMHRAGTLTSLESSHSVPSMSISASSQSSSVNSLADASDNEEEEEEEEEEEEEEEGPEAREMAMMQEGEHTVTSHSSIIHRLPGSDNLYDDPYQPEITPSPLQPPAAPAPTSTTSSARRRAYCRNRDHFATIRTASLVSRQIQEHEQDSALREQLSGYKRMRRQHQKQLLALESRLRGEREEHSARLQRELEAQRAGFGAEAEKLARRHQAIGEKEARAAQAEERKFQQHILGQQKKELAALLEAQKRTYKLRKEQLKEELQENPSTPKREKAEWLLRQKEQLQQCQAEEEAGLLRRQRQYFELQCRQYKRKMLLARHSLDQDLLREDLNKKQTQKDLECALLLRQHEATRELELRQLQAVQRTRAELTRLQHQTELGNQLEYNKRREQELRQKHAAQVRQQPKSLKVRAGQRPPGLPLPIPGALGPPNTGTPIEQQPCSPGQEAVLDQRMLGEEEEAVGERRILGKEGATLEPKQQRILGEESGAPSPSPQKHGSLVDEEVWGLPEEIEELRVPSLVPQERSIVGQEEAGTWSLWGKEDESLLDEEFELGWVQGPALTPVPEEEEEEEEGAPIGTPRDPGDGCPSPDIPPEPPPTHLRPCPASQLPGLLSHGLLAGLSFAVGSSSGLLPLLLLLLLPLLAAQGGGGLQAALLALEVGLVGLGASYLLLCTALHLPSSLFLLLAQGTALGAVLGLSWRRGLMGVPLGLGAAWLLAWPGLALPLVAMAAGGRWVRQQGPRVRRGISRLWLRVLLRLSPMAFRALQGCGAVGDRGLFALYPKTNKDGFRSRLPVPGPRRRNPRTTQHPLALLARVWVLCKGWNWRLARASQGLASHLPPWAIHTLASWGLLRGERPTRIPRLLPRSQRQLGPPASRQPLPGTLAGRRSRTRQSRALPPWR

SEQ ID NO: 13826 - protein, 334 aa, Homo sapiens
MMNHSMSSGSGSLRTNQKRSLYVRAMFDYDKSKDSGLPSQGLSFKYGDILHVINASDDEWWQARRVMLEGDSEEMGVIPSKRRVERKERARLKTVKFNAKPGVIDSKGDIPGLGDDGYGTKTLRGQEDLILSYEPVTRQEINYTRPVIILGPMKDRINDDLISEFPDKFGSCVPHTTRPKRDYEVDGRDYHFVISREQMEKDIQEHKFIEAGQYNDNLYGTSVQSVRFVAERGKHCILDVSGNAIKRLQVAQLYPIAIFIKPRSLEPLMEMNKRLTEEQAKKTYDRAIKLEQEFGEYFTAIVQGDTLEDIYNQCKLVIEEQSGPFIWIPSKEKL

SEQ ID NO: 13827 - protein, 271 aa, Homo sapiens
MASGILVNVKEEVTCPICLELLTQPLSLDCGHSFCQACLTANHKKSMLDKGESSCPVCRISYQPENIRPNRHVANIVEKLREVKLSPEGQKVDHCARHGEKLLLFCQEDGKVICWLCERSQEHRGHHTFLTEEVAREYQVKLQAALEMLRQKQQEAEELEADIREEKASWKTQIQYDKTNVLADFEQLRDILDWEESNELQNLEKEEEDILKSLTNSETEMVQQTQSLRELISDLEHRLQGSVMELLQDGERDLEEARNFSKKSKESVSSS

SEQ ID NO: 13828 - protein, 1353 aa, Homo sapiens
MDTKLMCLLFFFSLPPLLVSNHTGRIKVVFTPSICKVTCTKGSCQNSCEKGNTTTLISENGHAADTLTATNFRVVICHLPCMNGGQCSSRDKCQCPPNFTGKLCQIPVHGASVPKLYQHSQQPGKALGTHVIHSTHTLPLTVTSQQGVKVKFPPNIVNIHVKHPPEASVQIHQVSRIDGPTGQKTKEAQPGQSQVSYQGLPVQKTQTIHSTYSHQQVIPHVYPVAAKTQLGRCFQETIGSQCGKALPGLSKQEDCCGTVGTSWGFNKCQKCPKKPSYHGYNQMMECLPGYKRVNNTFCQDINECQLQGVCPNGECLNTMGSYRCTCKIGFGPDPTFSSCVPDPPVISEEKGPCYRLVSSGRQCMHPLSVHLTKQLCCCSVGKAWGPHCEKCPLPGTAAFKEICPGGMGYTVSGVHRRRPIHHHVGKGPVFVKPKNTQPVAKSTHPPPLPAKEEPVEALTFSREHGPGVAEPEVATAPPEKEIPSLDQEKTKLEPGQPQLSPGISTIHLHPQFPVVIEKTSPPVPVEVAPEASTSSASQVIAPTQVTEINECTVNPDICGAGHCINLPVRYTCICYEGYRFSEQQRKCVDIDECTQVQHLCSQGRCENTEGSFLCICPAGFMASEEGTNCIDVDECLRPDVCGEGHCVNTVGAFRCEYCDSGYRMTQRGRCEDIDECLNPSTCPDEQCVNSPGSYQCVPCTEGFRGWNGQCLDVDECLEPNVCANGDCSNLEGSYMCSCHKGYTRTPDHKHCRDIDECQQGNLCVNGQCKNTEGSFRCTCGQGYQLSAAKDQCEDIDECQHRHLCAHGQCRNTEGSFQCVCDQGYRASGLGDHCEDINECLEDKSVCQRGDCINTAGSYDCTCPDGFQLDDNKTCQDINECEHPGLCGPQGECLNTEGSFHCVCQQGFSISADGRTCEDVNECELLSGVCGEAFCENVEGSFLCVCADENQEYSPMTGQCRSRTSTDLDVDVDQPKEEKKECYYNLNDASLCDNVLAPNVTKQECCCTSGVGWGDNCEIFPCPVLGTAEFTEMCPKGKGFVPAGESSSEAGGENYKDADECLLFGQEICKNGFCLNTRPGYECYCKQGTYYDPVKLQCFDMDECQDPSSCIDGQCVNTEGSYNCFCTHPMVLDASEKRCIRPAESNEQIEETDVYQDLCWEHLSDEYVCSRPLVGKQTTYTECCCLYGEAWGMQCALCPLKDSDDYAQLCNIPVTGRRQPYGRDALVDFSEQYTPEADPYFIQDRFLNSFEELQAEECGILNGCENGRCVRVQEGYTCDCFDGYHLDTAKMTCVDVNECDELNNRMSLCKNAKCINTDGSYKCLCLPGYVPSDKPNYCTPLNTALNLEKDSDLE

SEQ ID NO: 13829 - protein, 1118 aa, Homo sapiens
MEIKDQGAQMEPLLPTRNDEEAVVDRGGTRSILKTHFEKEDLEGHRTLFIGVHVPLGGRKSHRRHRHRGHKHRKRDRERDSGLEDGRESPSFDTPSQRVQFILGTEDDDEEHIPHDLFTELDEICWREGEDAEWRETARWLKFEEDVEDGGERWSKPYVATLSLHSLFELRSCILNGTVLLDMHANTLEEIADMVLDQQVSSGQLNEDVRHRVHEALMKQHHHQNQKKLTNRIPIVRSFADIGKKQSEPNSMDKNAGQVVSPQSAPACVENKNDVSRENSTVDFSKGLGGQQKGHTSPCGMKQRHEKGPPHQQEREVDLHFMKKIPPGAEASNILVGELEFLDRTVVAFVRLSPAVLLQGLAEVPIPTRFLFILLGPLGKGQQYHEIGRSIATLMTDEVFHDVAYKAKDRNDLVSGIDEFLDQVTVLPPGEWDPSIRIEPPKNVPSQEKRKIPAVPNGTAAHGEAEPHGGHSGPELQRTGRIFGGLILDIKRKAPYFWSDFRDAFSLQCLASFLFLYCACMSPVITFGGLLGEATEGRISAIESLFGASMTGIAYSLFGGQPLTILGSTGPVLVFEKILFKFCKEYGLSYLSLRASIGLWTATLCIILVATDASSLVCYITRFTEEAFASLICIIFIYEALEKLFELSEAYPINMHNDLELLTQYSCNCVEPHNPSNGTLKEWRESNISASDIIWENLTVSECKSLHGEYVGRACGHDHPYVPDVLFWSVILFFSTVTLSATLKQFKTSRYFPTKVRSIVSDFAVFLTILCMVLIDYAIGIPSPKLQVPSVFKPTRDDRGWFVTPLGPNPWWTVIAAIIPALLCTILIFMDQQITAVIINRKEHKLKKGCGYHLDLLMVAVMLGVCSIMGLPWFVAATVLSITHVNSLKLESECSAPGEQPKFLGIREQRVTGLMIFILMGSSVFMTSILKFIPMPVLYGVFLYMGASSLKGIQFFDRIKLFWMPAKHQPDFIYLRHVPLRKVHLFTIIQMSCLGLLWIIKVSRAAIVFPMMVLALVFVRKLMDLLFTKRELSWLDDLMPESKKKKLEDAEKEEEQSMLAMEDEGTVQLPLEGHYRDDPSVINISDEMSKTALWRNLLITADNSKDKESSFPSKSSPS

SEQ ID NO: 13830 - protein, 56 aa, Homo sapiens
AEASPEEEIYPYIRTLLHFDTREFLNVLALTFEDFKNDKQAVEYQQRIVDILLKHA

SEQ ID NO: 13831 - protein, 210 aa, Homo sapiens
MLPGCIFLMILLIPQVKEKFILGVEGQQLVRPKKLPLIQKRDTGHTHDDDILKTYEEELLYEIKLNRKTLVLHLLRSREFLGSNYSETFYSMKGEAFTRHPQIMDHCFYQGSIVHEYDSAASISTCNGLRGFFRINDQRYLIEPVKYSDEGEHLVFKYNLRVPYGANYSCTELNFTRKTVPGDNESEEDSKIKVSTLLLSLPQMKHLLFS

SEQ ID NO: 13832 - protein, 288 aa, Homo sapiens
MLQDLSASVFFPPCSQHRTLVAFHGLPLKIKKEPHSPCSEISSACSQEQPFKFSYGEKCLYNVSAYDQKPQVGMRPSNPPTPSSTPVSPLHHASPNSTHTPKPDRAFPAHLPPSQSIPDSSYPMDHRFRRQLSEPCNSFPPLPTMPREGRPMYQRQMSEPNIPFPPQGFKQEYHDPVYEHNTMVGSAASQSFPPPLMIKQEPRDFAYDSEVPSCHSIYMRQEGFLAHPSRTEGCMFEKGPRQFYDDTCVVPEKFDGDIKQEPGMYREGPTYQRRGSLQLWQFLVALLD

SEQ ID NO: 13833 - protein, 689 aa, Homo sapiens
MIAAAFLVLLRPYSIQCALFLLLLLLGTIATIVFFCCWHRKLQKGRHPMKSVFSGRSRSRDAVLRSHHFRSEGFRASPRHLRRRVAAAAAARLEEVKPVVEVHHQSEQETSVRKRRIKKSSRVQPEFYHSVQGASIRRPSSGNASYRCSMSSSADFSDEDDFSQKSGSASPAPGDTLPWNLPKHERSKRKIQGGSVLDPAERAVLRIADERDKVQKKTFTKWINQHLMKVRKHVNDLYEDLRDGHNLISLLEVLSGDTLPREKGRMRFHRLQNVQIALDYLKRRQVKLVNIRNDDITDGNPKLTLGLIWTIILHFQISDIHVTGESEDMSAKERLLLWTQQATEGYAGIRCENFTTCWRDGKLFNAIIHKYRPDLIDMNTVAVQSNLANLEHAFYVAEKIGVIRLLDPEDVDVSSPDEKSVITYVSSLYDAFPKVPEGGEGIGANDVEVKWIEYQNMVNYLIQWIRHHVTTMSERTFPNNPVELKALYNQYLQFKETEIPPKETEKSKIKRLYKLLEIWIEFGRIKLLQGYHPNDIEKEWGKLIIAMLEREKALRPEVERLEMLQQIANRVQRDSVICEDKLILAGNALQSDSKRLESGVQFQNEAEIAGYILECENLLRQHVIDVQILIDGKYYQADQLVQRVAKLRDEIMALRNECSSVYSKGRILTTEQTKLMISGITQSLNSGFA

SEQ ID NO: 13834 - protein, 926 aa, Homo sapiens
MNESASQEELRPAQENRKEDKERKWNLTEVKELHETLQSVPDVPVKEDTNSVVEKAMDEIKSQELNLEGQRKISPGSIKDSKTEASGNIAIRKSAKVIFALDETELKSKPEHTWKKNLFERMEARAQAMQQKIIDKENLKKELEKKAEKKLPRDNLAKEWFNTDSMTLNNTAYLLDKLLPTLVPGVENMLTQVEKKKVLTEADTPSKFDPINYLGEYLIRNNPNYIKDPGMSGYQRLMKEVTEDLKIYVPDTICNRVSKMKENVKQNRKQRESIDKIIVKVANTRKQALQEQFDEWILDPKGMIPKSVIQNVLQEFFQNPDFKLGSHCKQLDITDSTEPRLNKMEFTEYISSHIKDLKSEMFEELLKHLCHSADEFREVIKADMRRQMFAELFLHCDHGKVGFLDRQRTLALLELFYDHSSQMLRSLLRNPRQWPFIEFEEINLTELWGDMDNQKHIYEGFDKVLLEMNTLLSANHASKTQSKLLESPDQPKLNEQRTSTPSPNPPEQQRGVTAEQGPQRISIEEQQQGKKPTAEQELYIESVIEPGTHTESTLEQGSSRRLLTEQETHRESTTEQGQHKGSIEGQGPRRVSVSEQGSSRESVAEQGSRRESIAEQDRHKGSVAEQGSRRMSAAEQGSLRESVIEEPYQKSEQGPYGEIISEEQEDIGSTSQSRKDSILKSTKYGEPITSEYIEVPLQEKRSWEQTYEEEIFLSSELQEEVPTLSRKDHFPETTKKEVQKDKPCEPKSQKIEGKSWSGEFFTCNWKMKYVTFEDEEQANLIYGNSRFTDLHSIIRNIQSCKEVKGRTAFNGVSFNLLQFVQLLETFVGEDAPLSVSETLTSFFKEGYVETEQEKMNALEQFSQNAFQVRQRLLLEAIFQKWDSDGSGFLDLKEVDELLYTYKEGMEKESMKKGLTLSPGWSAVAQL

SEQ ID NO: 13835 - protein, 1514 aa, Homo sapiens
MAVEGSTITSRIKNLLRSPSIKLRRSKAGNRREDLSSKVTLEKVLGITVSGGRGLACDPRSGLVAYPAGCVVVLFNPRKHKQHHILNSSRKTITALAFSPDGKYLVTGESGHMPAVRVWDVAEHSQVAELQEHKYGVACVAFSPSAKYIVSVGYQHDMIVNVWAWKKNIVVASNKVSSRVTAVSFSEDCSYFVTAGNRHIKFWYLDDSKTSKVNATVPLLGRSGLLGELRNNLFTDVACGRGKKADSTFCITSSGLLCEFSDRRLLDKWVELRNIDSFTTTVAHCISVSQDYIFCGCADGTVRLFNPSNLHFLSTLPRPHALGTDIASVTEASRLFSGVANARYPDTIALTFDPTNQWLSCVYNDHSIYVWDVRDPKKVGKVYSALYHSSCVWSVEVYPEVKDSNQACLPPSSFITCSSDNTIRLWNTESSGVHGSTLHRNILSSDLIKIIYVDGNTQALLDTELPGGDKADASLLDPRVGIRSVCVSPNGQHLASGDRMGTLRVHELQSLSEMLKVEAHDSEILCLEYSKPDTGLKLLASASRDRLIHVLDAGREYSLQQTLDEHSSSITAVKFAASDGQVRMISCGADKSIYFRTAQKSGDGVQFTRTHHVVRKTTLYDMDVEPSWKYTAIGCQDRNIRIFNISSGKQKKLFKGSQGEDGTLIKVQTDPSGIYIATSCSDKNLSIFDFSSGECVATMFGHSEIVTGMKFSNDCKHLISVSGDSCIFVWRLSSEMTISMRQRLAELRQRQRGGKQQGPSSPQRASGPNRHQAPSMLSPGPALSSDSDKEGEDEGTEEELPALPVLAKSTKKALASVPSPALPRSLSHWEMSRAQESVGFLDPAPAANPGPRRRGRWVQPGVELSVRSMLDLRQLETLAPSLQDPSQDSLAIIPSGPRKHGQEALETSLTSQNEKPPRPQASQPCSYPHIIRLLSQEEGVFAQDLEPAPIEDGIVYPEPSDNPTMDTSEFQVQAPARGTLGRVYPGSRSSEKHSPDSACSVDYSSSCLSSPEHPTEDSESTEPLSVDGISSDLEEPAEGDEEEEEEEGGMGPYGLQEGSPQTPDQEQFLKQHFETLASGAAPGAPVQVPERSESRSISSRFLLQVQTRPLREPSPSSSSLALMSRPAQVPQASGEQPRGNGANPPGAPPEVEPSSGNPSPQQAASVLLPRCRLNPDSSWAPKRVATASPFSGLQKAQSVHSLVPQERHEASLQAPSPGALLSREIEAQDGLGSLPPADGRPSRPHSYQNPTTSSMAKISRSISVGENLGLVAEPQAHAPIRVSPLSKLALPSRAHLVLDIPKPLPDRPTLAAFSPVTKGRAPGEAEKPGFPVGLGKAHSTTERWACLGEGTTPKPRTECQAHPGPSSPCAQQLPVSSLFQGPENLQPPPPEKTPNPMECTKPGAALSQDSEPAVSLEQCEQLVAELRGSVRQAVRLYHSVAGCKMPSAEQSRIAQLLRDTFSSVRQELEAVAGAVLSSPGSSPGAVGAEQTQALLEQYSELLLRAVERRMERKL

SEQ ID NO: 13836 - protein, 273 aa, Homo sapiens
DHIQQAKYQGRLHVSHKVPGDVSLQLSTLEMDDRSHYTCEVTWQTPDGNQVVRDKITELRVQKLSVSKPTVTTGSGYGFTVPQGMRISLQCQARGSPPISYIWYKQQTNNQEPIKVATLSTLLFKPAVIADSGSYFCTAKGQVGSEQHSDIVKFVVKDSSKLLKTKTEAPTTMTYPLKATSTVKQSWDWTTDMDGYLGETSAGPGKSLPVFAIILIISLCCMVVFTMAYIMLCRKTSQQEHVYEAASPKCPPTNTGAAGSHWLCPGICQMHLK

SEQ ID NO: 13837 - protein, 222 aa, Homo sapiens
MLPAQEAAKLYHTNYVRNSRAIGVLWAIFTICFAIVNVVCFIQPYWIGDGVDTPQAGYFGLFHYCIGNGFSRELTCRGSFTDFSTLPSGAFKAASFFIGLSMMLIIACIICFTLFFFCNTATVYKICAWMQLTSAACLVLGCMIFPDGWDSDEVKRMCGEKTDKYTLGACSVRWAYILAIIGILDALILSFLAFVLGNRQDSLMAEELKAENKVLLSQYSLE

SEQ ID NO: 13838 - protein, 495 aa, Homo sapiens
MNPPSGPRVPPSPTQEPSCMATPAPPSWWDSSQSSISSLGRLPSISPTAPGTWAAAWVPLPTVDVPDHAHYTLGTVILLVGLTGMLGNLTVIYTFCRAVLRGVTVMMQSRSLRTPANMFIINLAVSDFLMSFTQAPVFFTSSLYKQWLFGETGCEFYAFCGALFGISSMITLTAIALDRYLVITRPLATFGVASKRRAAFVLLGVWLYALAWSLPPFFGWSAYVPEGLLTSCSWDYMSFTPAVRAYTMLLCCFVFFLPLLIIIYCYIFIFRAIRETGRALQTFGACKGNGESLWQRQRLQSECKMAKIMLLVILLFVLSWAPYSAVALVAFAGYAHVLTPYMSSVPAVIAKASAIHNPIIYAITHPKYRVAIAQHLPCLGVLLGVSRRHSRPYPSYRSTHRSTLTSHTSNLSWISIRRRQESLGSESEVGWTHMEAAAVWGAAQQANGRSLYGQGLEDLEAKAPPRPQGHEAETPGKRRASSGRSQRPERQRAAP

SEQ ID NO: 13839 - protein, 67 aa, Homo sapiens
MKKKLVVLGLLAVVLVLVIVGLCLWLPSASKEPDNHVYTRAAVAADAKQCSKIGRDALRDGGSAVDA

SEQ ID NO: 13840 - protein, 378 aa, Homo sapiens
MAMLPPPGPQSFVHFTKQSLALIEQRIAERKSKEPKEEKKDDDEEAPKPSSDLEAGKQLPFIYGDIPPGMVSEPLEDLDPYYADKKTFIVLNKGKTIFRFNATPALYMLSPFSPLRRISIKILVHSLFSMLIMCTILTNCIFMTMNNPPDWTKNVEYTFTGIYTFESLVKILARGFCVGEFTFLRDPWNWLDFVVIVFAYLTEFVNLGNVSALRTFRVLRALKTISVIPGLKTIVGALIQSVKKLSDVMILTVFCLSVFALIGLQLFMGNLKHKCFRNSLENNETLESIMNTLESEEDFRKYFYYLEGSKDALLCGFSTDSGQCPEGYTCVKIGRNPDYGYTSFDTFSWAFLALFRLMTQDYWENLYQQTLRAAGKTY

SEQ ID NO: 13841 - protein, 369 aa, Homo sapiens
MKDTQDIQEASKAMQNKVHEQEDKNEKQKQREDKLGVYSLVHFSPKMLGSVATTLPLSSSNSSGMPLGYYLSSPQISRVTISTTGQLTSKATVGSCSRVENSLDASPFSVPKKQDESPMIGDGEDYFLSLFGDSKKLTAHSNYTQKTLKYFSMILEEVGQFTSSSLGDVEIAEVNVKGLFVKLINSSLDKEMAIGDHILQQNVNGQTISLYRFLPNIVMQANSTVTAIAWYTPIHWKQAWEKLDADVEFNRCSVVSPTFRKRVFQWTASTATITKEKQDQPKKDISNYQVEQAQVLLKREKEIPPTVFPNRSPWCQNPYVSAHPYCPLIEPHNTSTAGGRLDRQPRTRSTRPNRASGSKKKKTSESQKQ

SEQ ID NO: 13842 - protein, 510 aa, Homo sapiens
MATGRGRILQQHWLGLQTLRGPSRGGGAARGRARAFGCRKGPGVKLSAGSAALRCHAGGGQHWESSFSCCSGFLDGMPSEILLKIFSYLDAVSLLCTGCVSRRFYHLANDNFIWIGIYSTAFSPARSNWKFNSVEKIAMSMSFLSVQDKEAGYWKKEYITKQIASVKAALADILKPVNPYTGLPVKTKEALRIFGLGWAIILKEKGGKEYIMEHVDLSINDTSVTVIWYGKKWPCLASLSTLDLCGMTPVFTDWYKTPTKHRLRWHSLIAKYNLSHLTISTMIGCDRLIRIFCLHPGLLVGVWKKEEELAFVMANLHFHHLVERSTLGSATIPYELPPHSPFLDDSPEYGLHGYQLHVDLHSGGVFYLCGTFRNLFTKRGNIENGHVKLIVIHLKNNREHLPLIGKVGLSWKTDIFDGCIKSCSMMDVTLLDEHGKPFWCFSSPVCLRSPATPSDSSSFLGQTYNVDYVDAEGRVHVELVWIRETEEYLIVNLVLYLSIAKINHWFGTEY

SEQ ID NO: 13843 - protein, 1063 aa, Homo sapiens
NSSPIHLNRTPLSPPSVMLHGSPVQSSCAMAGRTNIPLSPTLTTKSPVMKKPMCNFSTNMEIPRAMFHHKPPQGPPPPPPPSCALQKKPLTSEKDPLGILDPIPSKPVNQNPVIINPTSFHSNVHSQVPMMNVSMPPAVVPLPSNLPLPTVKPGHMNHGSHVQRVQHSASTSLSPSPVTSPVHMMGTGIGRIEASPQRSRSSSTSSDHGNFMMPPVGPQATSSGIKVPPRSPRSTIGSPRPSMPSSPSTKSDGHHQYKDIPNPLIAGISNVLNTPSSAAFPTASAGSSSVKSQPGLLGMPLNQILNQHNAASFPASSLLSAAAKAQLANQNKLAGNNSSSSSNSGAVAGSGNTEGHSTLNTMFPPTANMLLPTGEGQSGRAALRDKLMSQQKDALRKRKQPPTTVLSLLRQSQMDSSAVPKPGPDLLRKQGQGSFPISSMSQLLQSMSCQSSHLSSNSTPGCGASNTALPCSANQLHFTDPSMNSSVLQNIPLRGEAVHCHNANTNFVHSNSPVPNHHLAGLINQIQASGNCGMLSQSGMALGNSLHPNPPQSRISTSSTPVIPNSIVSSYNQTSSEAGGSGPSSSIAIAGTNHPAITKTTSVLQDGVIVTTAAGNPLQSQLPIGSDFPFVGQEHALHFPSNSTSNNHLPHPLNPSLLSSLPISLPVNQQHLLNQNLLNILQPSAGEGKSEINLHPLGFLNPNVNAALAFLSSDMDGQVLQPVHFQLLAALLQNQAQAAAMLPLPSFNLTISDLLQQQNTPLPSLTQMTAPPDHLPSNQSDNSRAETLLTSPLGNPLPSFAGSDTTFNPLFLPAVNGASGLMTLNPQLLGGVLNSASANTANHPEVSIATSSQATTTTTTTSSAVAALTVSTLGGTAVVSMAETLLNISNNAGNTPGPAKLNSNSVVPQLLNPLLGTGLLGDMSSINNTLSNHQLTHLQSLLNNNQMFPPNQQQQQLLQGYQNLQAFQGQSTIPCPANNNPMACLFQNFQVEPEKLKTLTEGLEAYSRVRKRNRKSGKLNNHLEAAIHEAMSELDKMSGTVHQIPQGDRQMRPPKPKRRKISR

SEQ ID NO: 13844 - protein, 1507 aa, Homo sapiens
MTTVVVHVDSKAELTTLLEQWEKEHGSGQDMVPILTRMSQLIEKETEEYRKGDPDPFDDRHPGRADPECMLGHLLRILFKNDDFMNALVNAYVMTSREPPLNTAACRLLLDIMPGLETAVVFQEKEGIVENLFKWAREADQPLRTYSTGLLGGAMENQDIAANYRDENSQLVAIVLRRLRELQLQEVALRQENKRPSPRKLSSEPLLPLDEEAVDMDYGDMAVDVVDGDQEEASGDMEISFHLDSGHKTSSRVNSTTKPEDGGLKKNKSAKQGDRENFRKAKQKLGFSSSDPDRMFVELSNSSWSEMSPWVIGTNYTLYPMTPAIEQRLILQYLTPLGEYQELLPIFMQLGSRELMMFYIDLKQTNDVLLTFEALKHLASLLLHNKFATEFVAHGGVQKLLEIPRPSMAATGVSMCLYYLSYNQDAMERVCMHPHNVLSDVVNYTLWLMECSHASGCCHATMFFSICFSFRAVLELFDRYDGLRRLVNLISTLEILNLEDQGALLSDDEIFASRQTGKHTCMALRKYFEAHLAIKLEQVKQSLQRTEGGILVHPQPPYKACSYTHEQIVEMMEFLIEYGPAQLYWEPAEVFLKLSCVQLLLQLISIACNWKTYYARNDTVRFALDVLAILTVVPKIQLQLAESVDVLDEAGSTVSTVGISIILGVAEGEFFIHDAEIQKSALQIIINCVCGPDNRISSIGKFISGTPRRKLPQNPKSSEHTLAKMWNVVQSNNGIKVLLSLLSIKMPITDADQIRALACKALVGLSRSSTVRQIISKLPLFSSCQIQQLMKEPVLQDKRSDHVKFCKYAAELIERVSGKPLLIGTDVSLARLQKADVVAQSRISFPEKELLLLIRNHLISKGLGETATVLTKEADLPMTAASHSSAFTPVTAAASPVSLPRTPRIANGIATRLGSHAAVGASAPSAPTAHPQPRPPQGPLALPGPSYAGNSPLIGRISFIRERPSPCNGRKIRVLRQKSDHGAYSQSPAIKKQLDRHLPSPPTLDSIITEYLREQHARCKNPVATCPPFSLFTPHQCPEPKQRRQAPINFTSRLNRRASFPKYGGVDGGCFDRHLIFSRFRPISVFREANEDESGFTCCAFSARERFLMLGTCTGQLKLYNVFSGQEEASYNCHNSAITHLEPSRDGSLLLTSATWSQPLSALWGMKSVFDMKHSFTEDHYVEFSKHSQDRVIGTKGDIAHIYDIQTGNKLLTLFNPDLANNYKRNCATFNPTDDLVLNDGVLWDVRSAQAIHKFDKFNMNISGVFHPNGLEVIINTEIWDLRTFHLLHTVPALDQCRVVFNHTGTVMYGAMLQADDEDDLMEERMKSPFGSSFRTFNATDYKPIATIDVKRNIFDLCTDTKDCYLAVIENQGSMDALNMDTVCRLYEVGRQRLAEDEDEEEDQEEEEQEEEDDDEDDDDTDDLDELDTDQLLEAELEEDDNNENAGEDGDNDFSPSDEELANLLEEGEDGEDEDSDADEEVELILGDTDSSDNSDLEDDIILSLNE

SEQ ID NO: 13845 - protein, 758 aa, Homo sapiens
MGCRLHAPGEKAAHDPSRRRLQQYVPFARGSGQARGLSPMRLRDPEPEKRHGGHVGAGLLHSPKLKELTKAHELEVRLHTFSMFGMPRLPPEDRRHWEIGEGGDSGLTIEKSWRELVPGHKEMSQELCHQQEALWELLTTELIYVRKLKIMTDLLAAGLLNLQRVGLLMEVSAETLFGNVPSLIRTHRSFWDEVLGPTLEETRASGQPLDPIGLQSGFLTFGQRFHPYVQYCLRVKQTMAYAREQQETNPLFHAFVQWCEKHKRSGRQMLCDLLIKPHQRITKYPLLLHAVLKRSPEARAQEALNAMIEAVESFLRHINGQVRQGEEQESLAAAAQRIGPYEVLEPPSDEVEKNLRPFSTLDLTSPMLGVASEHTRQLLLEGPVRVKEGREGKLDVYLFLFSDVLLVTKPQRKADKAKVIRPPLMLEKLVCQPLRDPNSFLLIHLTEFQCVSSALLVHCPSPTDRAQWLEKTQQAQAALQKLKAEEYVQQKRELLTLYRDQDRESPSTRPSTPSLEGSQSSAEGRTPEFSTIIPHLVVTEDTDEDAPLVPDDTSDSGYGTLIPGTPTGSRSPLSRLRQRALRRDPRLTFSTLELRDIPLRPHPPDPQAPQRRSAPELPEGILKGGSLPQEDPPTWSEEEDGASERGNVVVETLHRARLRGQLPSSPTHADSAGESPWESSGEEEEEGPLFLKAGHTSLRPMRAEDMLREIREELASQRIEGAEEPRDSRPRKLTRAQLQRMRGPHIIQLDTPLSASEV

SEQ ID NO: 13846 - protein, 1215 aa, Homo sapiens
VQAGADVDAADNRKITPLMSAFRKGHVKVVQYLVKEVNQFPSDIECMRYIATITDKELLKKCHQCVETIVKAKDQQAAEANKNASILLKELDLEKSREESRKQALAAKREKRKEKRKKKKEEQKRKQEEDEENKPKENSELPEDEDEEENDEDVEQEVPIEPPSATTTTTIGISATSATFTNVFGKKRANVVTTPSTNRKNKKNKTKETPPTAHLILPEQHMSLAQQKADKNKINGEPRGGGAGGNSDSDNLDSTDCNSESSSGGKSQELNFVMDVNSSKYPSLLLHSQEEKTSTATSKTQTRLEGEVTPNSLSTSYKTVSLPLSSPNIKLNLTSPKRGQKREEGWKEVVRRSKKLSVPASVVSRIMGRGGCNITAIQDVTGAHIDVDKQKDKNGERMITIRGGTESTRYAVQLINALIQDPAKELEDLIPKNHIRTPASTKSIHANFSSGVGTTAASSKNAFPLGAPTLVTSQATTLSTFQPANKLNKNVPTNVRSSFPVSLPLAYPHPHFALLAAQTMQQIRHPRLPMAQFGGTFSPSPNTWGPFPVRPVNPGNTNSSPKHNNTSRLPNQNGTVLPSESAGLATASCPITVSSVVAASQQLCVTNTRTPSSVRKQLFACVPKTSPPATVISSVTSTCSSLPSVSSAPITSGQAPTTFLPASTSQAQLSSQKMESFSAVPPTKEKVSTQDQPMANLCTPSSTANSCSSSASNTPGAPETHPSSSPTPTSSNTQEEAQPSSVSDLSPMSMPFASNSEPAPLTLTSPRMVAADNQDTSNLPQLAVPAPRVSHRMQPRGSFYSMVPNATIHQDPQSIFVTNPVTLTPPQGPPAAVQLSSAVNIMNGSQMHINPANKSLPPTFGPATLFNHFSSLFDSSQVPANQGWGDGPLSSRVATDASFTVQSAFLGNSVLGHLENMHPDNSKAPGFRPPSQRVSTSPVGLPSIDPSGSSPSSSSAPLASFSGIPGTRVFLQGPAPVGTPSFNRQHFSPHPWTSASNSCDSPIPSVSSGSSSPLSATSAPPTLGQPKGVSASQDRKIPPPIGTERLARIRQGGSVAQAPAGTSFVAPVGHSGIWSFGVNAVSEGLSGWSQSVMGNHPMHQQLSDPSTFSQHQPMERDDSGMVAPSNIFHQPMASGFVDFSKGLPISMYGGTIIPSHPQLADVPGGPLFNGLHNPDPAWNPMIKVIQNSTECTDAQQIWPGTWAPHIGNMHLKYVN

SEQ ID NO: 13847 - protein, 637 aa, Homo sapiens
KSLLQAVANLPYKGGNTLTGMALNFIRQQNFRTQAGMRPRARKIGVLITDGKSQDDVEAPSKKLKDEGVELFAIGIKNADEVELKMIATDPDDTHAYNVADFESLSRIVDDLTINLCNSVKGPGDLEAPSNLVISERTHRSFRVSWTPPSDSVDRYKVEYYPVSGGKRQEFYVSRMETSTVLKDLKPETEYVVNVYSVVEDEYSEPLKGTEKTLPVPVVSLNIYDVGPTTMHVQWQPVGGATGYILSYKPVKDTEPTRPKEVRLGPTVNDMQLTDLVPNTEYAVTVQAVLHDLTSEPVTVREVTLPLPRPQDLKLRDVTHSTMNVFWEPVPGKVRKYIVRYKTPEEDVKEVEVDRSETSTSLKDLFSQTLYTVSVSAVHDEGESPPVTAQETTRPVPAPTNLKITEVTSEGFRGTWDHGASDVSLYRITWAPFGSSDKMETILNGDENTLVFENLNPNTIYEVSITAIYPDESESDDLIGSERTPPKSGPRNLQVYNATSNSLTVKWDPASGRVQKYRITYQPSTGEGNEQTTTIGGRQNSVVLQKLKPDTPYTITVSSLYPDGEGGRMTGRGKTKPLNTVRNLRVYDPSTSTLNVRWDHAEGNPRQYKLFYAPAAGGPEELVPIPGNTNYAILRNL

SEQ ID NO: 13848 - protein, 1637 aa, Homo sapiens
IDQLKSSLNKLETEGTLRICAVMGCIMTEALENKSVHFPLRSKYNRLTKVARFLQENPSCLLCNILHHYLHQANYSIIDDATMSDGLPALVTLKKGLVALARQWMKFIVVTPAFKGVSLHRPAQPLKPQIAMDHEHEDGLGLDNGGGLQSDTSADGAEFEFDAATVSEHTMLLEGTANRPPPGSSGPVTGAEIMRKLSKTHTHSDSALKIKGIHPYHSLSYTSGDTATDSPVHVGRAGMPVKDSPRKESLLSYLTGSFPSLHNLLEGTPQRSSAAVKSSSLTRTGNTVATDMLSEHPLLSEPSSVSFYNWMSNAVGNRGSVLQESPVTKSGHNSLPTGVAPNLPTIPSASDFNTVLSSDQNTLDGTHSQHSTSQDDVAGVEEANQGFPAVQLADAQVVFKPLLSHTGIQSQDTMPFCYRMYFGEHLSFSGTLDCLRADIVDSDTAKERKGKRARRQGHVNLPPLEFKPALMLGTFSISAVVMEKSVCTPQNSTSALSFHDLSKRYYNTFHCNFTISCQSISQHVDMALVRLIHQFSTMIDDIKATQTDIKLSRYTAGSASPTPTFKTRKHRDFRSSDFSRSSRGSLNGGNRVNNAKNKRTNNENNKKESRNKNSLGRSERRTSKVSRKGSKDVVDHMTIHMDDSDSITVSEQSEPSAECWQNMYKLLNFYSLISDPTGILEKSSETFGPAGVRSPTEPTCKVVFENEQDNSSLTKTQRKRSLVTSEPQHVTLIVFGIGMVNRTHLEADIGGLTMESELKRIHGSFTLKEKMKDVLHQKMTETCATAHIGGVNIVLLEGITPNIQLEDFPTSPTSTAKQEFLTVVKCSIAKSQALYSAQRGLKTNNAAVFKVGAISINIPQHPATLHSMMVRSSHQLSKQISDLIRQPSTAPQPVKEDIATPLPSEKTPTSVNQTPVETNEFPQLPEGLEKKPIVLKFSAMLDGIAIGAALLPSLKAEYKMGRMRSHGMTGAQTRFTFELPNHRLRFTSKVSATDMSTIPPSASLNLPPVTMSGKYIMEEHDSYSDQVWSIDELPSKQGYYLQGNYLRCVAEVGSFEHNLTTDLLNHLVFVQKVFMKEVNEVIQKVSGGEQPIPLWNEHDGTADGDKPKILLYSLNLQFKGIQVTATTPSMRAVRFETGLIELELSNRLQTKASPGSSSYLKLFGKCQVDLNLALGQIVKHQVYEEAGSDFHQVAYFKTRIGLRNALREEISGSSDREAVLITLNRPIVYAQPVAFDRAVLFWLNYKAAYDNWNEQRMALHKDIHMATKEVVDMLPGIQQTSAQAFGTLFLQLTVNDLGICLPITNTAQSNHTGDLDTGSALVLTIESTLITACSSESLVSKGHFKNFCIRFADGFETSWDDWKPEIHGDLVMNACVVPDGTYEVCSRTTGQAAAESSSAGTWTLNVLWKMCGIDVHMDPNIGKRLNALGNTLTTLTGEEDIDDIADLNSVNIADLSDEDEVDTMSPTIHTEATDYRRQAASASQPGELRGRKIMKRIVDIRELNEQAKVIDDLKKLGASEGTINQEIQRYQQLESVAVNDIRRDVRKKLRRSSMRAASLKDKWGLSYKPSYSRSKSISASGRPPLKRMERASSRVGETEELPEIRVDAASPGPRVTFNIQDTIAEIRRKKISFKVVF

SEQ ID NO: 13849 - protein, 840 aa, Homo sapiens
MAVVKTPSRGLKNAKEPFNNASPHLLKNLVEEPKKRKEVPNHLLESKVYAKLVNNKVIQARPGIIHFGGYQVEKQHQQILHLVNVSNEDTRVHILPPQTKYFEINYVRKEHHLVPGLSLTVTVTFSPDEWRYYYDCIRVHCKGDDTLLVPIHAYPVMNSLDFPSFINLSNVLLGESKTYVIPLQCSCPVDFEFYITLIQSHQAFAIEPTSGIIPANGKMTVTIKFTPFQYGTAQIKMQLWISQFNSQPYECVFTGTCYPNMALPLEEFERLNTLSKKVNVPPEKAMMHINFHRPPAKPKPQKVKEIEYQNLRFPVDLSNPFAVATVLNQEPGKLKIKELREVLDQGTEISKTRQMKEALFEQKVRQDIHEEMENHLKWQVHLGKDPMSFKLKKELTEEWQKACAKYKLDRGDPILDEEFQRLKTEVSHKRVVRNQEEKIKEFHPTFDPLINNTWLSRSRAQKRFQQVARKVMIQGRLFNMLSAVREMDKESILRKIGQAKQSIAQEANFFKFFLRRISQDDYTSRFSVSPKEVLPFAFPDCSPPQDSNELAPDGLGLVPIKSSEVQIKQSYSFFNLQVPQLYKIKRYQPFSVHKSSTSYRPQKLARALKQGAEDEVTTITALPKQDSTTQLSGKTSVLSMKPPEALAMSLDYDPLYVFNPNPGLFAVMHPLTYAETLIDYHLCSHPKYKFTKESRHGSSIPVTQKQFLHHTDIIPGIMHWKSFQSLVLSSLPDPSKMETTKSCDSFNSFMLPIDVPAILDALPEEDRLETVERELCEQNVEVMLTPEMIKVEFPMLNYKDIRKEKEVKDQAQPAEKAGEKLLEEMRNLRGKALNTYLILE

SEQ ID NO: 13850 - protein, 1026 aa, Homo sapiens
MASSWKLMLFLSVTMCLSESVDYGPVFVQEPDDIIFPTDSDEKKVALNCEVRGNPVPSYRWLRNGTEIDLESDYRYSLIDGTFIISNPSEAKDSGHYQCLATNTVGSILSREATLQFAYLGNFSGRTRSAVSVREGQGVVLMCSPPPHSPEIIYSWVFNEFPSFVAEDSRRFISQETGNLYISKVQTSDVGSYICLVKNTVTNARVLSPPTPLTLRNDGVMGEYEPKIEVHFPFTVTAAKGTTVKMECFALGNPVPTITWMKVNGYIPSKARLRKSQAVLEIPNVQLDDAGIYECRAENSRGKNSFRGQLQVYTYPHWVEKLNDTQLDSGSPLRWECKATGKPRPTYRWLKNGVPLSPQSRVEMVNGVLMIHNVNQSDAGMYQCLAENKYGAIYASAELKILASAPTFALNQLKKTIIVTKDQEVVIECKPQGSPKPTISWKKGDRAVRENKRIAILPDGSLRILNASKSDEGKYVCRGENVFGSAEIIASLSVKEPTRIELTPKRTELTVGESIVLNCKAIHDASLDVTFYWTLKGQPIDFEEEGGHFESIRAQASSADLMIRNILLMHAGRYGCRVQTTADSVSDEAELLVRGPPGPPGIVIVEEITESTATLSWSPAADNHSPISSYNLQARSPFSLGWQTVKTVPEIITGDMESAMAVDLNPWVEYEFRVVATNPIGTGDPSTPSRMIRTNEAVPKTAPTNVSGRSGRRHELVIAWEPVSEEFQNGEGFGYIVAFRPNGTRGWKEKMVTSSEASKFIYRDESVPPLTPFEVKVGVYNNKGDGPFSQIVVICSAEGEPSAAPTDVKATSVSVSEILVAWKHIKESLGRPQGFEVGYWKDMEQEDTAETVKTRGNESFVILTGLEGNTLYHFTVRAYNGAGYGPPSSEVSATTKKSPPSQAPSNLRWEQQGSQVSLGWEPVIPLANESEVVGYKVFYRQEGHSNSQVIETQKLQAVVPLPDAGVYIIEVRAYSEGGDGTASSQIRVPSYSGGKITSAQSTLHSLSTSSSSVTLLLALMIPSTSW

SEQ ID NO: 13851 - protein, 192 aa, Homo sapiens
MLQTLYDYFWWERLWLPVNLTWADLEDRDGRVYAKASDLYITLPLALLFLIVRYFFELYVATPLAALLNIKEKTRLRAPPNATLEHFYLTSGKQPKQVEVELLSRQSGLSGRQVERWFRRRRNQDRPSLLKKFREASWRFTFYLIAFIAGMAVIVDKPWFYDMKKVWEGYPIQSTIPSQYWYYMIELSFYWS

SEQ ID NO: 13852 - protein, 2080 aa, Homo sapiens
MSSSPSRSAADIYIREYFHSHVSGGHPEATPLRVMYTDRPLSQTDPVTLQYCCLTDDRQAFRPPTRAELARHRVVVTTTSQARELRVPVGFFSHILIDEAAQMLECEALTPLAYASHGTRLVLAGDHMQVTPRLFSVARARAAEHTLLHRLFLCYQQETHEVARQSRLVFHENYRCTDAIVSFISRHFYVAKGNPIHARGKVPPHPRHYPLMFCHVAGSPDRDMSMASWLNLAEIAQVVEKVQEAYNTWPSCWGGREQRCICVVSHGAQVSALRQELRRRDLGQVSVGSFEILPGRQFRVVVLSTVHTCQSLLSPGALAPEFFTDARVLNTVLTRAQSQLVVVGDAVALCSFGACGKLWESFIRECVERHSVCPEGLSMEQVEQGVAQRRRWPPRGTQAGAAGNWEAAPEPVGDLAEEQAAVVTAMVKAEPGDEALSPASRDITATTAQTEAAAAPAGDAVKEDVVPGACAAGAAAAAGVESTEAEDAEADFWPWDGELNADDAILRELLDESQKVMVTVGEDGLLDTVARPESLQQARLYENLPPAALRKLLHAEPERYRHCSFVPETFERASAIPLDDASSGPIQVRGRLDCGMAFAGDEVLVQLLSGDKAPEGRLRGRVLGVLKRKRHELAFVCRMDTWDPRIMVPINGSVTKIFVAELKDPSQVPIYSLRKGRLQRVGLERLTAEARHSRLFWVQIVLWRQGFYYPLGIVREVLPEASTWEQGLRILGLEYSLRVPPSDQATITKVLQKYHTELGRVAGRREDCRAFLTFTVDPQGACNLDDALSVRDLGPRCEVAVHITDVASFVPRDGVLDVEARRQGAAFYAPGREPVPMLPASLCQDVLSLLPGRDRLAISLFLTMEKASGQLKSLRFAPSVVQSDRQLSYEEAEEVIRQHPGAGRELPARLDSVDACVVAACYFSRLLRRHRLRSDCFYEQPDEDGTLGFRAAHIMVKEYMIQFNRLVAEFLVGSECTRTVTPLRWQPAPRSQQLKALCEKHGDRVPLSLHLGHHLHGGGGSPPDTRLHLLASLWKQVQFAARTQDYEQMVDLVTTDDMHPFLAPAGRDLRKALERSAFGRCARGHQQQGGHYSLQVDWYTWATSPIRRYLDVVLQRQILLALGHGGSAYSARDIDGLCQAFSLQHALAQSYQRRARSLHLAVQLKAQPLDKLGFVVDVEAGSRCFRLLFPSNRETLPDPCPVPYGSLQLAEHPHALAGRPGLRLLWRRRVYSAQGSSPPLPLPGTVPDPHTLAVETALWKQLLELVELQRWPEAAALIQEKGEASQRRELVQVQRSHCGHFLEVARELGSGDTLQVQLGTSLQHGFLVPSPQLWTVAPGFSLCLEHVERPGDCFSGRVYRAPRDRYRDVDEYACVWEPFCALESATGAVAENDSVTLQHLSVSWEASRTPQGQLQGAFRLEAAFLEENCADINFSCCYLCIRLEGLPAPTASPRPGPSSLGPGLNVDPGTYTWVAHGQTQDWDQERRADRQEAPRRVHLFVHHMGMEKVPEEVLRPGTLFTVELLPKQLPDLRKEEAVRGLEEASPLVTSIALGRPVPQPLCRVIPSRFLERQTYNIPGGRHKLNPSQNVAVREALEKPFTVIQGPPGTGKTIVGLHIVFWFHKSNQEQVQPGGPPRGEKRLGGPCILYCGPSNKSVDVLAGLLLRRMELKPLRVYSEQAEASEFPVPRVGSRKLLRKSPREGRPNQSLRSITLHHRIRQAPNPYSSEIKAFDTRLQRGELFSREDLVWYKKVLWEARKFELDRHEVILCTCSCAASASLKILDVRQILVDEAGMATEPETLIPLVQFPQAEKVVLLGDHKQLRPVVKNERLQNLGLDRSLFERYHEDAHMLDTQYRMHEGICAFPSVAFYKSKLKTWQGLRRPPSVLGHAGKESCPVIFGHVQGHERSLLVSTDEGNENSKANLEEVAEVVRITKQLTLGRTVEPQDIAVLTPYNAQASEISKALRREGIAGVAVSSITKSQGSEWRYVLVSTVRTCAKSDLDQRPTKSWLKKFLGFVVDPNQVNVAVTRAQEGLCLIGDHLLLRCCPLWRSLLDFCEAQQTLVPAGQVRVCRRPTMPS

SEQ ID NO: 13853 - protein, 697 aa, Homo sapiens
MGFLGCWCVSFQEVVTFGDVAVHFSREEWQCLDPGQRALYREVMLENHSSVAGLAGFLVFKPELISRLEQGEEPWVLDLQGAEGTEAPRTSKTDSTIRTENEQACEDMDILKSESYGTVVRISPQDFPQNPGFGDVSDSEVWLDSHLGSPGLKVTGFTFQNNCLNEETVVPKTFTKDAPQGCKELGSSGLDCQPLESQGESAEGMSQRCEECGKGIRATSDIALHWEINTQKISRCQECQKKLSDCLQGKHTNNCHGEKPYECAECGKVFRLCSQLNQHQRIHTGEKPFKCTECGKAFRLSSKLIQHQRIHTGEKPYRCEECGKAFGQSSSLIHHQRIHTGERPYGCRECGKAFSQQSQLVRHQRTHTGERPYPCKECGKAFSQSSTLAQHQRMHTGEKAQILKASDSPSLVAHQRIHAVEKPFKCDECGKAFRWISRLSQHQLIHTGEKPYKCNKCTKAFGCSSRLIRHQRTHTGEKPFKCDECGKGFVQGSHLIQHQRIHTGEKPYVCNDCGKAFSQSSSLIYHQRIHKGEKPYECLQCGKAFSMSTQLTIHQRVHTGERPYKCNECGKAFSQNSTLFQHQIIHAGVKPYECSECGKAFSRSSYLIEHQRIHTRAQWFYEYGNALEGSTFVSRKKVNTIKKLHQCEDCEKIFRWRSHLIIHQRIHTGEKPYKCNDCGKAFNRSSRLTQHQKIHMG

SEQ ID NO: 13854 - protein, 1388 aa, Homo sapiens
MDFSFSFMQGIMGNTIQQPPQLIDSANIRQEDAFDNNSDIAEDGGQTPYEATLQQGFQYPATTEDLPPLTNGYPSSISVYETQTKYQSYNQYPNGSANGFGAVRNFSPTDYYHSEIPNTRPHEILEKPSPPQPPPPPSVPQTVIPKKTGSPEIKLKITKTIQNGRELFESSLCGDLLNEVQASEHTKSKHESRKEKRKKSNKHDSSRSEERKSHKIPKLEPEEQNRPNERVDTVSEKPREEPVLKEEAPVQPILSSVPTTEVSTGVKFQVGDLVWSKVGTYPWWPCMVSSDPQLEVHTKINTRGAREYHVQFFSNQPERAWVHEKRVREYKGHKQYEELLAEATKQASNHSEKQKIRKPRPQRERAQWDIGIAHAEKALKMTREERIEQYTFIYIDKQPEEALSQAKKSVASKTEVKKTRRPRSVLNTQPEQTNAGEVASSLSSTEIRRHSQRRHTSAEEEEPPPVKIAWKTAAARKSLPASITMHKGSLDLQKCNMSPVVKIEQVFALQNATGDGKFIDQFVYSTKGIGNKTEISVRGQDRLIISTPNQRNEKPTQSVSSPEATSGSTGSVEKKQQRRSIRTRSESEKSTEVVPKKKIKKEQVETVPQATVKTGLQKGASEISDSCKPLKKRSRASTDVEMTSSAYRDTSDSDSRGLSDLQVGFGKQVDSPSATADADVSDVQSMDSSLSRRGTGMSKKDTVCQICESSGDSLIPCEGECCKHFHLECLGLASLPDSKFICMECKTGQHPCFSCKVSGKDVKRCSVGACGKFYHEACVRKFPTAIFESKGFRCPQHCCSACSMEKDIHKASKGRMMRCLRCPVAYHSGDACIAAGSMLVSSYILICSNHSKRSSNSSAVNVGFCFVCARGGRLLCCESCPASFHPECLSIEMPEGCWNCNDCKAGKKLHYKQIVWVKLGNYRWWPAEICNPRSVPLNIQGLKHDLGDFPVFFFGSHDYYWVHQGRVFPYVEGDKSFAEGQTSINKTFKKALEEAAKRFQELKAQRESKEALEIEKNSRKPPPYKHIKANKVIGKVQIQVADLSEIPRCNCKPADENPCGLESECLNRMLQYECHPQVCPAGDRCQNQCFTKRLYPDAEIIKTERRGWGLRTKRSIKKGEFVNEYVGELIDEEECRLRIKRAHENSVTNFYMLTVTKDRIIDAGPKGNYSRFMNHSCNPNCETQKWTVNGDVRVGLFALCDIPAGMELTFNYNLDCLGNGRTECHCGADNCSGFLGVRPKSACASTNEEKAKNAKLKQKRRKIKTEPKQMHEDYCFQCGDGGELVMCDKKDCPKAYHLLCLNLTQPPYGKWECPWHQCDECSSAAVSFCEFCPHSFCKDHEKGALVPSALEGRLCCSEHDPMAPVSPEYWSKIKCKWESQDHGEEVKE

SEQ ID NO: 13855 - protein, 284 aa, Homo sapiens
QSTLLGILLPLLLLVAALATALVFSYWWRRKQLVLPPNLNDLASLDQTAGATPLPILYSGSDYRSGLGHFGVVYHGEYIDQAQNRIQCAIKSLSRITEMQQVEAFLREGLLMRGLNHPNVLALIGIMLPPEGLPHVLLPYMCHGDLLQFIRSPQRNPTVKDLISFGLQVARGMEYLAEQKFVHRDLAARNCMLDESFTVKVADFGLARDILDREYYSVQQHRHARLPVKWMALESLQTYRFTTKSDVWSFGVLLWELLTRGAPPYRHIDPFDLTHFLAQGRRLP

SEQ ID NO: 13856 - protein, 421 aa, Homo sapiens
MSALRRSGYGPSDGPSYGRYYGPGGGDVPVHPPPPLYPLRPEPPQPPISWRVRGGGPAETTWLGEGGGGDGYYPSGGAWPEPGRAGGSHQSLNSYTNGAYGPTYPPGPGANTASYSGAYYAPGYTQTSYSTEVPSTYRSSGNSPTPVSRWIYPQQDCQTEAPPLRGQVPGYPPSQNPGMTLPHYPYGDGNRSVPQSGPTVRPQEDAWASPGAYGMGGRYPWPSSAPSAPPGNLYMTESTSPWPSSGSPQSPPSPPVQQPKDSSYPYSQSDQSMNRHNFPCSVHQYESSGTVNNDDSDLLDSQVQYSAEPQLYGNATSDHPNNQDQSSSLPEECVPSDESTPPSIKKIIHVLEKVQYLEQEVEEFVGKKTDKAYWLLEEMLTKELLELDSVETGGQDSVRQARKEAVCKIQAILEKLEKKGL

SEQ ID NO: 13857 - protein, 1001 aa, Homo sapiens
ITITEITSHSTLSYTTSITTTETPSHSTLSFTSSITTTETTSHSTPSFTSSITTSEMPSHSTPSFTSSITTTENATHSTPNFTSSITTTETTSHSTPSFTSLITTTETTSHRWGTTETTSYSTPSFTSSNTITETTSHSTPSYITSITTTETPSSSTPSFSSSITTTETTSHSTPGFTSSITTTETTSHSTPSFTSSITTTETTSHDTPSFTSSITTSETPSHSTPSSTSLITTTKTTSHSTPSFTSSITTTETTSHSAHSFTSSITTTETTSHNTRSFTSSITTTETNSHSTTSFTSSITTTETTSHSTPSFSSSITTTETPLHSTPGLTSWVTTTKTTSHITPGLTSSITTTETTSHSTPGFTSSITTTETTSESTPSLSSSTIYSTVSTSTTAITSHFTTSETAVTPTPVTPSSLSTDIPTTSLRTLTPSSVGTSTSLTTTTDFPSIPTDISTLPTRTHIISSSPSIQSTETSSLVGTTSPTMSTVRMTLRITENTPISSFSTSIVVIPETPTQTPPVLTSATGTQTSPAPTTVTFGSTDSSTSTLHTLTPSTALSTIVSTSQVPIPSTHSSTLQTTPSTPSLQTSLTSTSEFTTESFTRGSTSTNAILTSFSTIIWSSTPTIIMSSSPSSASITPVFSTTIHSVPSSPYIFSTENVGSASITGFPSLSSSATTSTSSTSSSLTTALTEITPFSYISLPSTTPCPGTITITIVPASPTDPCVEMDPSTEATSPPTTPLTVFPFTTEMVTCPTSISIQTTLTTYMDTSSMMPESESSISPNASSSTGTGTVPTNTVFTSTRLPTSETWLSNSSVIPLPLPGVSTIPLTMKPSSSLPTILRTSSKSTHPSPPTTRTSETPVATTQTPTTLTSRRTTRITSQMTTQSTLTTTAGTCDNGGTWEQGQCACLPGFSGDRCQLQTRCQNGGQWDGLKCQCPSTFYGSSCEFAVEQVDLDAEDFCRHAGLHLQGCGDPVPEEWQHRGGLPGPAGDALQPPAGERV

SEQ ID NO: 13858 - protein, 1498 aa, Homo sapiens [sequence omitted]

SEQ ID NO: 13859 - protein, 853 aa, Homo sapiens
MEARVSLKRRIELTVEYPWRCGALSPTSNCRTGMWSWKCLLFWAVLVTATLCTARPSPTLPEQAQPWGAPVEVESFLVHPGDLLQLRCRLRDDVQSINWLRDGVQLAESNRTRITGEEVEVQDSVPADSGLYACVTSSPSGSDTTYFSVNVSDALPSSEDDDDDDDSSSEEKETDNTKPNPVAPYWTSPEKMEKKLHAVPAAKTVKFKCPSSGTPNPTLRWLKNGKEFKPDHRIGGYKVRYATWSIIMDSVVPSDKGNYTCIVENEYGSINHTYQLDVVERSPHRPILQAGLPANKTVALGSNVEFMCKVYSDPQPHIQWLKHIEVNGSKIGPDNLPYVQILKTAGVNTTDKEMEVLHLRNVSFEDAGEYTCLAGNSIGLSHHSAWLTVLEALEERPAVMTSPLYLEIIIYCTGAFLISCMVGSVIVYKMKSGTKKSDFHSQMAVHKLAKSIPLRRQVTVSADSSASMNSGVLLVRPSRLSSSGTPMLAGVSEYELPEDPRWELPRDRLVLGKPLGEGCFGQVVLAEAIGLDKDKPNRVTKVAVKMLKSDATEKDLSDLISEMEMMKMIGKHKNIINLLGACTQDGPLYVIVEYASKGNLREYLQARRPPGLEYCYNPSHNPEEQLSSKDLVSCAYQVARGMEYLASKKCIHRDLAARNVLVTEDNVMKIADFGLARDIHHIDYYKKTTNGRLPVKWMAPEALFDRIYTHQSDVWSFGVLLWEIFTLGGSPYPGVPVEELFKLLKEGHRMDKPSNCTNELYMMMRDCWHAVPSQRPTFKQLVEDLDRIVALTSNQEYLDLSMPLDQYSPSFPDTRSSTCSSGEDSVFSHEPLPEEPCLPRHPAQLANGGLKRR

SEQ ID NO: 13860 - protein, 496 aa, Homo sapiens
MWGRFLAPEASGRDSPGGARSFPAGPDYSSAWLPANESLWQATTVPSNHRNNHIRRHSIASDSGDTGIGTSCSDSVEDHSTSSGTLSFKPSQSLITLPTAHVMPSNSSASISKLRESLTPDGSKWSTSLMQTLGNHSRGEQDSSLDMKDFRPLRKWSSLSKLTAPDNCGQGGTVCREESRNGLEKIGKAKALTSQLRTIGPSCLHDSMEMLRLEDKEINKKRSSTLDCKYKFESCSKEDFRASSSTLRRQPVDMTYSALPESKPIMTSSEAFEPPKYLMLGQQAVGGVPIQPSVRTQMWLTEQLRTNPLEGRNTEDSYSLAPWQQQQIEDFRQGSETPMQVLTGSSRQSYSPGYQDFSKWESMLKIKEGLLRQKEIVIDRQKQQITHLHERIRDNELRAQHAMLGHYVNCEDSYVASLQPQYENTSLQTPFSEESVSHSQQGEFEQKLASTEKEVLQLNEFLKQRLSLFSEEKKKLEEKVGFSNKVELGQQHFLSI

SEQ ID NO: 13861 - protein, 973 aa, Homo sapiens
MVFSMAQPMASSSTEPYLCLAAAGENPSGKSLASAISGKIPSPLSSSYKPMLNNNSFMWPNSTPVPLLQTTQGLKPVSPPKIQPVSWHHSGGTGDCAPQPVDHKVPKSIGTVPADASAHIALSTASSHDTSTTSVASSWYNRNNLAMRAEPLSCALDDSSDSQDPTKEIRFTEAVRKLTARGFEKMPRQGCQLEQSSFLNPSFQWNVLNRSRRWKPPAVNQQFPQEDAGSVRRVLPGASDTLGLDNTVFCTKRISIHLLASHASGLNHNPACESVIDSSAFGEGKAPGPPFPQTLGIANVATRLSSIQLGQSEKERPEEARELDSSDRDISSATDLQPDQAETEDTEEELVDGLEDCCSRDENEEEEGDSECSSLSAVSPSESVAMISRSCMEILTKPLSNHEKVVRPALIYSLFPNVPPTIYFGTRDERVEKLPWEQRKLLRWKMSTVTPNIVKQTIGRSHFKISKRNDDWLGCWGHHMKSPSFRSIREHQKLNHFPGSFQIGRKDRLWRNLSRMQSRFGKKEFSFFPQSFILPQDAKLLRKAWESSSRQKWIVKPPASARGIGIQVIHKWSQLPKRRPLLVQRYLHKPYLISGSKFDLRIYVYVTSYDPLRIYLFSDGLVRFASCKYSPSMKSLGNKFMHLTNYSVNKKNAEYQANADEMACQGHKWALKALWNYLSQKGVNSDAIWEKIKDVVVKTIISSEPYVTSLLKMYVRRPYSCHELFGFDIMLDENLKPWVLEVNISPSLHSSSPLDISIKGQMIRDLLNLAGFVLPNAEDIISSPSSCSSSTTSLPTSPGDKCRMAPEHVTAQKMKKAYYLTQKIPDQDFYASVLDVLTPDDVRILVEMEDEFSRRGQFERIFPSHISSRYLRFFEQPRYFNILTTQWEQKYHGNKLKGVDLLRSWCYKGFHMGVVSDSAPVWSLPTSLLTISKDDVILNAFSKSETSKLGNPVPQRTVRTPAKSPAFLPRRYL

SEQ ID NO: 13862 - protein, 407 aa, Homo sapiens
MWPNGSSLGPCFRPTNITLEERRLIASPWFAASFCVVGLASNLLALSVLAGARQGGSHTRSSFLTFLCGLVLTDFLGLLVTGTIVVSQHAALFEWHAVDPGCRLCRFMGVVMIFFGLSPLLLGAAMASERYLGITRPFSRPAVASQRRAWATVGLVWAAALALGLLPLLGVGRYTVQYPGSWCFLTLGAESGDVAFGLLFSMLGGLSVGLSFLLNTVSVATLCHVYHGQEAAQQRPRDSEVEMMAQLLGIMVVASVCWLPLLVFIAQTVLRNPPAMSPAGQLSRTTEKELLIYLRVATWNQILDPWVYILFRRAVLRRLQPRLSTRPRRSLTLWPSLEYSGTISAHCNLRLPGSSDSRASASRAAGITGVSHCARPCMLFDPEFDLLAGVQLLPFEPPTGKALSRKD

SEQ ID NO: 13863 - protein, 39 aa, Homo sapiens
MLKNPYTIKKQPLHQFVQRPLFPLPAAFYHPGSYLGLKE

SEQ ID NO: 13864 - protein, 1400 aa, Homo sapiens
MPEQERQITAREGASRKILSKLSLPTRAWEPAMKKSFAFDNVGYEGGLDGLGPSSQVATSTVRILGMTCQSCVKSIEDRISNLKGIISMKVSLEQGSATVKYVPSVVCLQQVCHQIGDMGFEASIAEGKAASWPSRSLPAQEAVVKLRVEGMTCQSCVSSIEGKVRKLQGVVRVKVSLSNQEAVITYQPYLIQPEDLRDHVNDMGFEAAIKSKVAPLSLGPIDIERLQSTNPKRPLSSANQNFNNSETLGHQGSHVVTLQLRIDGMHCKSCVLNIEENIGQLLGVQSIQVSLENKTAQVKYDPSCTSPVALQRAIEALPPGNFKVSLPDGAEGSGTDHRSSSSHSPGSPPRNQVQGTCSTTLIAIAGMTCASCVHSIEGMISQLEGVQQISVSLAEGTATVLYNPSVISPEELRAAIEDMGFEASVVSESCSTNPLGNHSAGNSMVQTTDGTPTSVQEVAPHTGRLPANHAPDILAKSPQSTRAVAPQKCFLQIKGMTCASCVSNIERNLQKEAGVLSVLVALMAGKAEIKYDPEVIQPLEIAQFIQDLGFEAAVMEDYAGSDGNIELTITGMTCASCVHNIESKLTRTNGITYASVALATSKALVKFDPEIIGPRDIIKIIEEIGFHASLAQRNPNAHHLDHKMEIKQWKKSFLCSLVFGIPVMALMIYMLIPSNEPHQSMVLDHNIIPGLSILNLIFFILCTFVQLLGGWYFYVQAYKSLRHRSANMDVLIVLATSIAYVYSLVILVVAVAEKAERSPVTFFDTPPMLFVFIALGRWLEHLAKSKTSEALAKLMSLQATEATVVTLGEDNLIIREEQVPMELVQRGDIVKVVPGGKFPVDGKVLEGNTMADESLITGEAMPVTKKPGSTVIAGSINAHGSVLIKATHVGNDTTLAQIVKLVEEAQMSKAPIQQLADRFSGYFVPFIIIMSTLTLVVWIVIGFIDFGVVQRYFPIKTVMFDKTGTITHGVPRVMRVLLLGDVATLPLRKVLAVVGTAEASSEHPLGVAVTKYCKEELGTETLGYCTDFQAVPGCGIGCKVSNVEGILAHSERPLSAPASHLNEAGSLPAEKDAVPQTFSVLIGNREWLRRNGLTISSDVSDAMTDHEMKGQTAILVAIDGVLCGMIAIADAVKQEAALAVHTLQSMGVDVVLITGDNRKTARAIATQVGINKVFAEVLPSHKVAKVQELQNKGKKVAMVGDGVNDSPALAQADMGVAIGTGTDVAIEAADVVLIRNDLLDVVASIHLSKRTVRRIRINLVLALIYNLVGIPIAAGVFMPIGIVLQPWMGSAAMAASSVSVVLSSLQLKCYKKPDLERYEAQAHGHMKPLTASQVSVHIGMDDRWRDSPRATPWDQVSYVSQVSLSSLTSDKPSRHSAAADDDGDKWSLLLNGRDEEQYI

SEQ ID NO: 13865 - protein, 957 aa, Homo sapiens
MADPAECSIKVMCRFRPLNEAEILRGDKFIPKFKGDETVVIGQGKPYVFDRVLPPNTTQEQVYNACAKQIVKDVLEGYNGTIFAYGQTSSGKTHTMEGKLHDPQLMGIIPRIAHDIFDHIYSMDENLEFHIKVSYFEIYLDKIRDLLDVSKTNLAVHEDKNRVPYVKGCTERFVSSPEEVMDVIDEGKANRHVAVTNMNEHSSRSHSIFLINIKQENVETEKKLSGKLYLVDLAGSEKVSKTGAEGAVLDEAKNINKSLSALGNVISALAEGTKTHVPYRDSKMTRILQDSLGGNCRTTIVICCSPSVFNEAETKSTLMFGQRAKTIKNTVSVNLELTAEEWKKKYEKEKEKNKTLKNVIQHLEMELNRWRNGEAVPEDEQISAKDQKNLEPCDNTPIIDNIAPVVAGISTEEKEKYDEEISSLYRQLDDKDDEINQQSQLAEKLKQQMLDQDELLASTRRDYEKIQEELTRLQIENEAAKDEVKEVLQALEELAVNYDQKSQEVEDKTRANEQLTDELAQKTTTLTTTQRELSQLQELSNHQKKRATEILNLLLKDLGEIGGIIGTNDVKTLADVNGVIEEEFTMARLYISKMKSEVKSLVNRSKQLESAQMDSNRKMNASERELAACQLLISQHEAKIKSLTDYMQNMEQKRRQLEESQDSLSEELAKLRAQEKMHEVSFQDKEKEHLTRLQDAEEMKKALEQQMESHREAHQKQLSRLRDEIEEKQKIIDEIRDLNQKLQLEQEKLSSDYNKLKIEDQEREMKLEKLLLLNDKREQAREDLKGLEETVSRELQTLHNLRKLFVQDLTTRVKKSVELDNDDGGGSAAQKQKISFLENNLEQLTKVHKQLVRDNADLRCELPKLEKRLRATAERVKALESALKEAKENAMRDRKRYQQEVDRIKEAVRAKNMARRAHSAQIAKPIRPGHYPASSPTAVHAIRGGGGSSSNSTHYQK

SEQ ID NO: 13866 - protein, 382 aa, Homo sapiens
MGLYGQACPSVTSLRMTSELESSLTSMDWLPQLTMRAAIQKSDATQNAHGTGISKKNALLDPNTTLDQEEVQQHKDGKPPYSYASLITFAINSSPKKKMTLSEIYQWICDNFPYYREAGSGWKNSIRHNLSLNKCFLKVPRSKDDPGKGSYWAIDTNPKEDVLPTRPKKRARSVERVTLYNTDQDGSDSPRSSLNNSLSDQSLASVNLNSVGSVHSYTPVTSHPESVSQSLTPQQQPQYNLPERDKQLLFSEYNFEDLSASFRSLYKSVFEQSLSQQGLMNIPSESSQQSHTSCTYQHSPSSTVSTHPHSNQSSLSNSHGSGLNTTGSNSVAQVSLSHPQMHTQPSPHPPHRPHGLPQHPQRSPHPAPHPQQHSQLQSPHPQ

SEQ ID NO: 13867 - protein, 480 aa, Homo sapiens
MFPNSILGRPPFTPNHQQHNNFFTLSPTVYSHQQLIDAQFNFQNADLSRAVSLQQLTYGNVSPIQTSASPLFRGRKRLSDEKNLPLDGKRQRFHSPHQEPTVVNQIVPLSGERRYSMPPLFHTHYVPDIVRCVPPFREIAFLEPREITLPEAKDKLSQQILELFETCQQQISDLKKKELCRTQLQREIQLLFPQSRLFLVGSSLNGFGTRSSDGDLCLVVKEEPVNQKTEARHILTLVHKHFCTRLSGYIERPQLIRAKVPIVKFRDKVSCVEFDLNVNNIVGIRNTFLLRTYAYLENRVRPLVLVIKKWASHHQINDASRGTLSSYSLVLMVLHYLQTLPEPILPSLQKIYPESFSPAIQLHLVHQAPCNVPPYLSKNESNLGDLLLGFLKYYATEFDWNSQMISVREAKAIPRPDGIEWRNKYICVEEPFDGTNTARAVHEKQKFDMIKDQFLKSWHRLKNKRDLNSILPVRAAVLKR

SEQ ID NO: 13868 - protein, 638 aa, Homo sapiens
MQETFRNLASIGKKWKPQNIYVEYENLRRNLRIVGERLFESKEGHQHGEILTQVPDDMLKKTTTGVKSCESSVYGEVGSAHSSLNRHIRDDTGHKAYEYQEYGQKPYKCKYCKKPFNCLSSVQTHERAHSGRKLYVCEECGKTFISHSNLQRHRIMHRGDGPYKCKFCGKALMFLSLYLIHKRTHTGEKPYQCKQCGKAFSHSSSLRIHERTHTGEKPYKCNECGKAFHSSTCLHAHKRTHTGEKPYECKQCGKAFSSSHSFQIHERTHTGEKPYECKECGKAFKCPSSVRRHERTHSRKKPYECKHCGKVLSYLTSFQNHLGMHTGEISHKCKICGKAFYSPSSLQTHEKTHTGEKPYKCNQCGKAFNSSSSFRYHERTHTGEKPYECKQCGKAFRSASLLQTHGRTHTGEKPYACKECGKPFSNFSFFQIHERMHREEKPYECKGYGKTFSLPSLFHRHERTHTGGKTYECKQCGRSFNCSSSFRYHGRTHTGEKPYECKQCGKAFRSASQLQIHGRTHTGEKPYECKQCGKAFGSASHLQMHGRTHTGEKPYECKQCGKSFGCASRLQMHGRTHTGEKPYKCKQCGKAFGCPSNLRRHGRTHTGEKPYKCNQCGKVFRCSSQLQVHGRAHCIDTP

SEQ ID NO: 13869 - protein, 242 aa, Homo sapiens
MSNPRSLEEEKYDMSGARLALILCVTKAREGSEEDLDALEHMFRQLRFESTMKRDPTAEQFQEELEKFQQAIDSREDPVSCAFVVLMAHGREGFLKGEDGEMVKLENLFEALNNKNCQALRAKPKVYIIQACRGEQRDPGETVGGDEIVMVIKDSPQTIPTYTDALHVYSTVEGYIAYRHDQKGSCFIQTLVDVFTKRKGHILELLTEVTRRMAEAELVQEGKARKTNPEIQSTLRKRLYLQ

SEQ ID NO: 13870 - protein, 705 aa, Homo sapiens
MTPALREATAKGISFSSLPSTMESDKMLYMESPRTVDEKLKGDTFSQMLGFPTPEPTLNTNFVNLKHFGSPQSSKHYQTVFLMRSNSTLNKHNENYKQKKLGEPSCNKLKNILYNGSNIQLSKICLSHSEEFIKKEPLSDTTSQCMKDVQIILDSNITKDTNVDKVQLQNCKWYQENALLDKVTDAEIKKGLLHCTQKKIVPGHSNVPVSSSAAEKEEEVHARLLHCVSKQKILLSQARRTQKHLQMLLAKHVVKHYGQQMKLSMKHQLPKMKTFHEPTTILGNSLPKCTEIKPEVNTLTAENKLWDDAKNGFARCTAAEIQRFAFSATGLLSHVEEGLDSDATDSSSDDDLDEYTLRKNVAVNCSTEWKWLVDRARVGSRWTWLQAQISDLECKIQQLTDIHRQIRASKGIVVLEECQLPKDILKKQMQFADQAASLNILGNPQVPQECQDPVPEQDFEMSPSSPTLLLRNIEKQSAQLTEIINSLIAPLNLSPTSSPLSSKSCSHKCLANGIYRSASENLDELSSSSSWLLNQKHSKKKRKDRTRLKSSSLTFMSTSARTRPLQSFHKRKLYRLSPTFYWTPQTLPSKETAFLNTTQMPCLQSASTWSSYEHNSESYLLREHVSELDSSFHSVLSLPSDVPLHFHFETLLKKTEIKGNLAENKFVDEYIISPSPGMSHLQFLYSICLFMSLYLLFLHSKKNKI

SEQ ID NO: 13871 - protein, 889 aa, Homo sapiens
MADRGCPLEAAPLPAEVRESLAELELELSEGDITQKGYEKKRAKLLARYIPLIQGIDPSLQAENRIPGPSQTTAAAPKQQKSRPTASRDERFRSDVHTEAVQAALAKYKERKMPMPSKRRSVLVHSSVETYTPPDTSSASEDEGSLRRPGRLTSTPLQSHSSVEPWLDRVIQGSSTSSSASSTSSHPGGRPTTAPSAAATPGAAATTALAGLEAHTHIDLHSAPPDVTTGLVEHSYFERPQVASVRSVPRGCSGSMLETADGVPVNSRVSSKIQQLLNTLKRPKRPPLKEFFVDDFEELLEVQQPDPNQPKPEGSETSVLRGEPLTAGVPRPPSLLATLQRWGTTQPKSPCLTALDTTGKAVYTLTYGKLWSRSLKLAYTLLNKLTSKNEPLLKPGDRVALVFPNSDPVMFMVAFYGCLLAELVPVPIEVPLTRKDAGSQQVGFLLGSCGVFLALTTDACQKGLPKAQTGEVAAFKGWPPLSWLVIDGKHLAKPPKDWHPLAQDTGTGTAYIEYKTSKEGSTVGVTVSHASLLAQCRALTQACGYSEAETLTNVLDFKRDAGLWHGVLTSVMNRMHVVSVPYALMKANPLSWIQKVCFYKARAALVKSRDMHWSLLAQRGQRDVSLSSLRMLIVADGANPWSISSCDAFLNVFQSRGLRPEVICPCASSPEALTVAIRRPPDLGGPPPRKAVLSMNGLSYGVIRVDTEEKLSVLTVQDVGQVMPGANVCVVKLEGTPYLCKTDEVGEICVSSSATGTAYYGLLGITKNVFEAVPVTTGGAPIFDRPFTRTGLLGFIGPDNLVFIVGKLDGLMVTGVRRHNADDVVATALAVEPMKFVYRGRIAVFSVTVLHDDRIVLVAEQRPDASEEDSFQWMSRVLQVGAPARPMVR

SEQ ID NO: 13872 - protein, 430 aa, Homo sapiens
MAANMYRVGDYVYFENSSSNPYLIRRIEELNKTANGNVEAKVVCFYRRRDISSTLIALADKHATLSVCYKAGPGADNGEEGEIEEEMENPEMVDLPEKLKHQLRHRELFLSRQLESLPATHIRGKCSVTLLNETESLKSYLEREDFFFYSLVYDPQQKTLLADKGEIRVGNRYQADITDLLKEGEEDGRDQSRLETQVWEAHNPLTDKQIDQFLVVARSVGTFARALDCSSSVRQPSLHMSAAAASRDITLFHAMDTLHKNIYDISKAISALVPQGGPVLCRDEMEEWSASEANLFEEALEKYGKDFTDIQQDFLPWKSLTSIIEYYYMWKTTDRYVQQKRLKAAEAESKLKQVYIPNYNKPNPNQISVNNVKAGVVNGTGAPGQSPGAGRACESCYMSSLRILLDILEEIWWLENANPVRWREARTKPQ

SEQ ID NO: 13873 - protein, 181 aa, Homo sapiens
MRGPSGALWLLLALRTVLGGMEVRWCATSDPEQHKCGNMSEAFREAGIQPSLLCVRGTSADHCVQLIAAQEADAITLDGGAIYEAGKEHGLKPVVGEVYDQEVGTSYYAVAVVRRSSHVTIDTLKGVKSCHTGINRTVGWNVPVGYLVESGRLSVMGCDVLKGPKRGADLHPESSQVAHQP

SEQ ID NO: 13874 - protein, 55 aa, Homo sapiens
LWNNYFHLAVAFITQDSLQLEQFSHAKYNKILNKSEQNLLHPRHGRTYIRDDTYP

SEQ ID NO: 13875 - protein, 1463 aa, Homo sapiens
MMLPQNSWHIDFGRCCCHQNLFSAVVTCILLLNSCFLISSFNGTDLELRLVNGDGPCSGTVEVKFQGQWGTVCDDGWNTTASTVVCKQLGCPFSFAMFRFGQAVTRHGKIWLDDVSCYGNESALWECQHREWGSHNCYHGEDVGVNCYGKSLTRVGRQGEANLGLRLVDGNNSCSGRVEVKFQERWGTICDDGWNLNTAAVVCRQLGCPSSFISSGVVNSPAVLRPIWLDDILCQGNELALWNCRHRGWGNHDCSHNEDVTLTCYDSSDLELRLVGGTNRCMGRVELKIQGRWGTVCHHKWNNAAADVVCKQLGCGTALHFAGLPHLQSGSDVVWLDGVSCSGNESFLWDCRHSGTVNFDCLHQNDVSVICSDGADLELRLADGSNNCSGRVEVRIHEQWWTICDQNWKNEQALVVCKQLGCPFSVFGSRRAKPSNEARDIWINSISCTGNESALWDCTYDGKAKRTCFRRSDAGVICSDKADLDLRLVGAHSPCYGRLEVKYQGEWGTVCHDRWSTRNAAVVCKQLGCGKPLHVFGMTYFKEASGPIWLDDVSCIGNESNIWDCEHSGWGKHNCVHREDVIVTCSGDATWGLRLVGGSNRCSGRLEVYFQGRWGTVCDDGWNSKAAAVVCSQLDCPSSIIGMGLGNASTGYGKIWLDDVSCDGDESDLWSCRNSGWGNNDCSHSEDVGVICSDASDMELRLVGGSSRCAGKVEVNVQGAVGILCANGWGMNIAEVVCRQLECGSAIRVSREPHFTERTLHILMSNSGCTGGEASLWDCIRWEWKQTACHLNMEASLICSAHRQPRLVGADMPCSGRVEVKHADTWRSVCDSDFSLHAANVLCRELNCGDAISLSVGDHFGKGNGLTWAEKFQCEGSETHLALCPIVQHPEDTCIHSREVGVVCSRYTDVRLVNGKSQCDGQVEINVLGHWGSLCDTHWDPEDARVLCRQLSCGTALSTTGGKYIGERSVRVWGHRFHCLGNESLLDNCQMTVLGAPPCIHGNTVSVICTGSLTQPLFPCLANVSDPYLSAVPEGSALICLEDKRLRLVDGDSRCAGRVEIYHDGFWGTICDDGWDLSDAHVVCQKLGCGVAFNATVSAHFGEGSGPIWLDDLNCTGMESHLWQCPSRGWGQHDCRHKEDAGVICSEFTALRLYSETETESCAGRLEVFYNGTWGSVGRRNITTAIAGIVCRQLGCGENGVVSLAPLSKTGSGFMWVDDIQCPKTHISIWQCLSAPWERRISSPAEETWITCEDRIRVRGGDTECSGRVEIWHAGSWGTVCDDSWDLAEAEVVCQQLGCGSALAALRDASFGQGTGTIWLDDMRCKGNESFLWDCHAKPWGQSDCGHKEDAGVRCSGQSLKSLNASSGHLALILSSIFGLLLLVLFILFLTWCRVQKQKHLPLRVSTRRRGSLEENLFHEMETCLKREDPHGTRTSDDTPNHGCEDASDTSLLGVLPASEATK

SEQ ID NO: 13876 - protein, 234 aa, Homo sapiens
METAIWRRSYISLISSERPVHNWRGKSVQKKQAESKSQIKLHTQSAPFGLCPKDMMLTQAPSSVVRSRNSRNHTVNSGGSCLSASTVAIPAINDSSAAMSACSTISAQPASSMDTQMHSPKKQERVNKRVIWGIEVAEELHWKGWELGKETTRNLVLKNRSLKLQKMKYRPPKTKFFFTVIPQPIFLSPGITLTLPIVFRPLEAPLTAVIYEVQATCWYGAGSRQRSSIQLQAV

SEQ ID NO: 13877 - protein, 233 aa, Homo sapiens
MNRSVMPEGKLVEPVLEKRGRFADLLDAKYLRTTLQIWVIWLGISFAYYGVILASAELLERDLVCGSKSDSAVVVTGGDSGESQSPCYCHMFAPSDYRTMIISTIGEIALNPLNILGINFLGRRLSLSITMGCTALFFLLLNICTSSAGLIGFLFMLRALVAANFNTVYIYTAEVYPTTMRALGMGTSGSLCRIGAMVAPFISQRALLLVNHFILYCRCEINGELSRTQTKRN

SEQ ID NO: 13878 - protein, 1975 aa, Homo sapiens
MPGEQMDPTGSQLDSDFSQQDTPCLIIEDSQPESQVLEDDSGSHFSMLSRHLPNLQTHKENPVLDVVSNPEQTAGEERGDGNSGFNEHLKENKVADPVDSSNLDTCGSISQVIEQLPQPNRTSSVLGMSVESAPAVEEEKGEELEQKEKEKEEDTSGNTTHSLGAEDTASSQLGFGVLELSQSQDVEENTVPYEVDKEQLQSVTTNSGYTRLSDVDANTAIKHEEQSNEDIPIAEQSSKDIPVTAQPSKDVHVVKEQNPPPARSEDMPFSPKASVAAMEAKEQLSAQELMESGLQIQKSPEPEVLSTQEDLFDQSNKTVSSDGCSTPSREEGGCSLASTPATTLHLLQLSGQRSLVQDSLSTNSSDLVAPSPDAFRSTPFIVPSSPTEQEGRQDKPMDTSVLSEEGGEPFQKKLQSGEPVELENPPLLPESTVSPQASTPISQSTPVFPPGSLPIPSQPQFSHDIFIPSPSLEEQSNDGKKDGDMHSSSLTVECSKTSEIEPKNSPEDLGLSLTGDSCKLMLSTSEYSQSPKMESLSSHRIDEDGENTQIEDTEPMSPVLNSKFVPAENDSILMNPAQDGEVQLSQNDDKTKGDDTDTRDDISILATGCKGREETVAEDVCIDLTCDSGSQAVPSPATRSEALSSVLDQEEAMEIKEHHPEEGSSGSEVEEIPETPCESQGEELKEENMESVPLHLSLTETQSQGLCLQKEMPKKECSEAMEVETSVISIDSPQKLAILDQELEHKEQEAWEEATSEDSSVVIVDVKEPSPRVDVSCEPLEGVEKCSDSQSWEDIAPEIEPCAENRLDTKEEKSVEYEGDLKSGTAETEPVEQDSSQPSLPLVRADDPLRLDQELQQPQTQEKTSNSLTEDSKMANAKQLSSDAEAQKLGKPSAHASQSFCESSSETPFHFTLPKEGDIIPPLTGATPPLIGHLKLEPKRHSTPIGISNYPESTIATSDVMSESMVETHDPILGSGKGDSGAAPDVDDKLCLRMKLVSPETEASEESLQFNLEKPATGERKNGSTAVAESVASPQKTMSVLSCICEARQENEARSEDPPTTPIRGNLLHFPSSQGEEEKEKLEGDHTIRQSQQPMKPISPVKDPVSPASQKMVIQGPSSPQGEAMVTDVLEDQKEGRSTNKENPSKALIERPSQNNIGIQTMECSLRVPETVSAATQTIKNVCEQGTSTVDQNFGKQDATVQTERGSGEKPVSAPGDDTESLHSQGEEEFDMPQPPHGHVLHRHMRTIREVRTLVTRVITDVYYVDGTEVERKVTEETEEPIVECQECETEVSPSQTGGSSGDLGDISSFSSKASSLHRTSSGTSLSAMHSSGSSGKGAGPLRGKTSGTEPADFALPSSRGGPGKLSPRKGVSQTGTPVCEEDGDAGLGIRQGGKAPVTPRGRGRRGRPPSRTTGTRETAVPGPLGIEDISPNLSPDDKSFSRVVPRVPDSTRRTDVGAGALRRSDSPEIPFQAAAGPSDGLDASSPGNSFVGLRVVAKWSSNGYFYSGKITRDVGAGKYKLLFDDGYECDVLGKDILLCDPIPLDTEVTALSEDEYFSAGVVKGHRKESGELYYSIEKEGQRKWYKRMAVILSLEQGNRLREQYGLGPYEAVTPLTKAADISLDNLVEGKRKRRSNVSSPATPTASSSSSTTPTRKITESPRASMGVLSGKRKLITSEEERSPAKRGRKSATVKPVGAGEFVSPCESGDNTGEPSALEEQRGPLPLNKTLFLGYAFLLTMATTSDKLASRSKLPDGPTGSSEEEEEFLEIPPFNKQYTESQLRAGAGYILEDFNEAQCNTAYQCLLIADQHCRTRKYFLCLASGIPCVSHVWVHDSCHANQLQNYRNYLLPAGYSLEEQRILDWQPRENPFQNLKVLLVSDQQQNFLELWSEILMTGGAASVKQHHSSAHNKDIALGVFDVVVTDPSCPASVLKCAEALQLPVVSQEWVIQCLIVGERIGFKQHPKYKHDYVSH

SEQ ID NO: 13879 - protein, 266 aa, Homo sapiens
RAILFLGEKEAALQLQTLPDVQKLDPFLADLHQASSLLQASIEEFEKADPPGGMQEATRCLSKSKELMEAVLRDPGLLGLQREGGATLARLQHDASRLDFSPDVRSHLAAATALYSLVDEQLHVLVTASNSLLGKLELRVRLGRLEAAIHQVSDWMEQEGRRCLQSLTPKDGSLETVEKAHAEFENFFLQAAAQYRRGLELSKQAAQLGATARGAGEAERAEFPELAAFASTQRAFQAELTHFYMAAERQRTDLETLLHLHRFCKR

SEQ ID NO: 13880 - protein, 645 aa, Homo sapiens
MSAVSQPQAAPSPLEKSPSTAILCNTCGNVCKGEVLRVQDKYFHIKCFVCKACGCDLAEGGFFVRQGEYICTLDYQRLYGTRCFSCDQFIEGEVVSALGKTYHPDCFVCAVCRLPFPPGDRVTFNGKECMCQKCSLPVSVGSSAHLSQGLRSCGGCGTEIKNGQALVALDKHWHLGCFKCKSCGKLLNAEYISKDGLPYCEADYHAKFGIRCDSCEKYITGRVLEAGEKHYHPSCALCVRCGQMFAEGEEMYLQGSSIWHPACRQAARTEDRNKETRTSSESIISVPASSTSGSPSRVIYAKLGGEILDYRDLAALPKSKAIYDIDRPDMISYSPYISHSAGDRQSYGEGDQDDRSYKQCRTSSPSSTGSVSLGRYTPTSRSPQHYSRPAGTVSVGTSSCLSLSQHPSPTSVFRHHYIPYFRGSESGRSTPSLSVLSDSKPPPSTYQQAPRHFHVPDTGVKDNIYRKPPIYRQHAARRSDGEDGSLDQDNRKQKSSWLMLKGDADTRTNSPDLDTQSLSHSSGTDRDPLQRMAGDSFHSRFPYSKSDPLPGHGKNGLDQRNANLAPCGADPDASWGMREYKIYPYDSLIVTNRIRVKLPKDVDRTRLERHLSPEEFQEVFGMSIEEFDRLALWKRNDLKKKALLF

SEQ ID NO: 13881 - protein, 724 aa, Homo sapiens
TDMILFSLIVGLLTYWFLFRKKKEEVPEFTKIQTLTSSVRESSFVEKMKKTGRNIIVFYGSQTGTAEEFANRLSKDAHRYGMRGMSADPEEYDLADLSSLPEIDNALVVFCMATYGEGDPTDNAQDFYDWLQETDVDLSGVKFAVSHPETAMGSRWPAVPPWGLQIHVSERQPSRPPPCPQQPGQATCETLSSAPDPSTTRMSPPCPQPQSAPGGIGCWRLKVFGLGNKTYEHFNAMGKYVDKRLEQLGAQRIFELGLGDDDGNLEEDFITWREQFWPAVCEHFGVEATGEESSIRQYELVVHTDIDAAKVYMGEMGRLKSYENQKPPFDAKNPFLAAVTTNRKLNQGTERHLMHLELDISDSKIRYESGDHVAVYPANDSALVNQLGKILGADLDVVMSLNNLDEESNKKHPFPCPTSYRTALTYYLDITNPPRTNVLYELAQYASEPSEQELLRKMASSSGEGKELYLSWVVEARRHILAILQDCPSLRPPIDHLCELLPRLQARYYSIASSSKVHPNSVHICAVVVEYETKAGRINKGVATNWLRAKEPAGENGGRALVPMFVRKSQFRLPFKATTPVIMVGPGTGVAPFIGFIQERAWLRQQGKEVGETLLYYGCRRSDEDYLYREELAQFHRDGALTQLNVAFSREQSHKVYVQHLLKQDREHLWKLIEGGAHIYVCGTPSSCPGMHGTWPGMCRTPSTTSWLSSGPWSTRRRWTTSRN

SEQ ID NO: 13882 - protein, 463 aa, Homo sapiens
MKKKLVVLGLLAVVLVLVIVGLCLWLPSASKEPDNHVYTRAAVAADAKQCSKIGRDALRDGGSAVDAAIAALLCVGLMNAHSMGIGGGLFLTIYNSTTRKAEVINAREVAPRLAFATMFNSSEQSQKGGLSVAVPGEIRGYELAHQRHGRLPWARLFQPSIQLARQGFPVGKGLAAALENKRTVIEQQPVLCEVFCRDRKVLREGERLTLPQLADTYETLAIEGAQAFYNGSLTAQIVKDIQAAGGIVTAEDLNNYRAELIEHPLNISLGDVVLYMPSAPLSGPVLALILNILKGYNFSRESVESPEQKGLTYHRIVEAFRFAYAKRTLLGDPKFVDVTEVVRNMTSEFFAAQLRAQISDDTTHPISYYKPEFYTPDDGGTAHLSVVAEDGSAVSATSTINLYFGSKVRSPVSGILFNNEMDDFSSPSITNEFGVPPSPANFIQPGKQPLSSMCPTIMVGQDG

SEQ ID NO: 13883 - protein, 230 aa, Homo sapiens
MAQLTPGNTMGLLTVADESLFTEPSEPLPEESKPVEMPFHHCHRDPLPPPGLTPERLHARRQLYAACAVCFVFMAGEVVGGYLAHSLAIMTDAAHLLADVGSMMGSLFSLWLSTRPATRTMTFGWHRSETLGALASVVSLWMVTGILLYLAFVRLLHSDYHIEGGAMLLTASIAVCANLLMAFVLHQAGPPHSHGSRGAEYAPLEEGPEEPLPLGNTSVRAAFVHVLGDL

SEQ ID NO: 13884 - protein, 1094 aa, Homo sapiens
MEDEAVLDRGASFLKHVCDEEEVEGHHTIYIGVHVPKSYRRRRRHKRKTGHKEKKEKERISENYSDKSDIENADESSSSILKPLISPAAERIRFILGEEDDSPAPPQLFTELDELLAVDGQEMEWKETARWIKFEEKVEQGGERWSKPHVATLSLHSLFELRTCMEKGSIMLDREASSLPQLVEMIVDHQIETGLLKPELKDKVTYTLLRKHRHQTKKSNLRSLADIGKTVSSASRMFTNPDNGSPAMTHRNLTSSSLNDISDKPEKDQLKNKFMKKLPRDAEASNVLVGEVDFLDTPFIAFVRLQQAVMLGALTEVPVPTRFLFILLGPKGKAKSYHEIGRAIATLMSDEVFHDIAYKAKDRHDLIAGIDEFLDEVIVLPPGEWDPAIRIEPPKSLPSSDKRKNMYSGGENVQMNGDTPHDGGHGGGGHGDCEELQRTGRFCGGLIKDIKRKAPFFASDFYDALNIQALSAILFIYLATVTNAITFGGLLGDATDNMQGVLESFLGTAVSGAIFCLFAGQPLTILSSTGPVLVFERLLFNFSKDNNFDYLEFRLWIGLWSAFLCLILVATDASFLVQYFTRFTEEGFSSLISFIFIYDAFKKMIKLADYYPINSNFKVGYNTLFSCTCVPPDPANISISNDTTLAPEYLPTMSSTDMYHNTTFDWAFLSKKECSKYGGNLVGNNCNFVPDITLMSFILFLGTYTSSMALKKFKTSPYFPTTARKLISDFAIILSILIFCVIDALVGVDTPKLIVPSEFKPTSPNRGWFVPPFGENPWWVCLAAAIPALLVTILIFMDQQITAVIVNRKEHKLKKGAGYHLDLFWVAILMVICSLMALPWYVAATVISIAHIDSLKMETETSAPGEQPKFLGVREQRVTGTLVFILTGLSVFMAPILKFIPMPVLYGVFLYMGVASLNGVQFMDRLKLLLMPLKHQPDFIYLRHVPLRRVHLFTFLQVLCLALLWILKSTVAAIIFPVMILALVAVRKGMDYLFSQHDLSFLDDVIPEKDKKKKEDEKKKKKKKGSLDSDNDDEKDHQHSLNATHHADKIPFLQSLGMPSPPRTPVKVVPQIRIELEPEDNDYFWRSKGTETTL

SEQ ID NO: 13885 - protein, 203 aa, Homo sapiens
MRTVVLTMKASVIEMFLVLLVTGVHSNKETAKKIKRPKFTVPQINCDVKAGKIIDPEFIVKCPAGCQDPKYHVYGTDVYASYSSVCGAAVHSGVLDNSGGKILVRKVAGQSGYKGSYSNGVQSLSLPRWRESFIVLESKPKKGVTYPSALTYSSSKSPAAQAGKCSRVIESKPSESMNTRRVLGDSGEINILTGQAPLALAIF

SEQ ID NO: 13886 - protein, 777 aa, Homo sapiens
MAAAGLVAVAAAAEYSGTVASGGNLPGVHCGPSSGAGPGFGPGSWSRSLDRALEEAAVTGVLSLSGRKLREFPRGAANHDLTDTTRADLSRNRLSEIPIEACHFVSLENLNLYQNCIRYIPEAILNLQALTFLNISRNQLSTLPVHLCNLPLKVLIASNNKLVSLPEEIGHLRHLMELDVSCNEIQTIPSQIGNLEALRDLNVRRNHLVHLPEELAELPLIRLDFSCNKITTIPVCYRNLRHLQTITLDNNPLQSPPAQICIKGKVHIFKYLNIQACKIAPDLPDYDRRPLGFGSCHEELYSSRPYGALDSGFNSVDSGDKRWSGNEPTDEFSDLPLRVAEITKEQRLRRESQYQENRGSLVVTNGGVEHDLDQIDYIDSCTAEEEEAEVRQPKGPDPDSLSSQFMAYIEQRRISHEGSPVKPVAIREFQKTEDMRRYLHQNRVPAEPSSLLSLSASHNQLSHTDLELHQRREQLVERTRREAQLAALQYEEEKIRTKQIQRDAVLDFVKQKASQSPQKQHPLLDGVDGECPFPSRRSQHTDDSALCMSLSGLNQVGCAATLPHSSAFTPLKSDDRPNALLSSPATETVHHSPAYSFPAAIQRNQPQRPESFLFRAGVRAETNKGHASPLPPSAAPTTDSTDSITGQNSRQREEELELIDQLRKHIEYRLKVSLPCDLGAALTDGVVLCHLANHVRPRSVPSIHVPSPAVPKLTMAKCRRNVENFLEACRKIGVPQEQLCLPLHILEEKGLSQVAVTVQALLELAPPKQQQHQLSAV

SEQ ID NO: 13887 - protein, 1080 aa, Homo sapiens
MKGTRAIGSVPERSPAGVDLSLTGLPPPVSRRPGSAATTKPIVRSVSVVTGSEQKRKVLEATGPGGSQAINNLRRSNSTTQVSQPRSGSPRPTEPTDFLMLFEGSPSGKKRPASLSTAPSEKGATWNVLDDQPRGFTLPSNARSSSALDSPAGPRRKECTVALAPNFTANNRSNKGAVGNCVTTMVHNRYTPSERAPPLKSSNQTAPSLNNIIKAATCEGSESSGFGKLPKNVSSATHSARNNTGGSTGLPRRKEVTEEEAERFIHQVNQATVTIQRWYRHQVQRRGAGAARLEHLLQAKREEQRQRSGEGTLLDLHQQKEAARRKAREEKARQARRAAIQELQQKRALRAQKASTAERGPPENPRETRVPGMRQPAQELSPTPGGTAHQALKANNTGGGLPAAGPGDRCLPTSDSSPEPQQPPEDRTQDVLAQDAAGDNLEMMAPSRGSAKSRGPLEELLHTLQLLEKEPDVLPRPRTHHRGRYAWASEEDDASSLTADNLEKFGKLSAFPEPPEDGTLLSEAKLQSIMSFLDEMEKSGQDQLDSQQEGWVPEAGPGPLELGSEVSTSVMRLKLEVEEKKQAMLLLQRALAQQRDLTARRVKETEKALSRQLQRQREHYEATIQRHLAFIDQLIEDKKVLSEKCEAVVAELKQEDQRCTERVAQAQAQHELEIKKLKELMSATEKARREKWISEKTKKIKEVTVRGLEPEIQKLIARHKQEVRRLKSLHEAELLQSDERASQRCLRQAEELREQLEREKEALGQQERERARQRFQQHLEQEQWALQQQRQRLYSEVAEERERLGQQAARQRAELEELRQQLEESSSALTRALRAEFEKGREEQERRHQMELNTLKQQLELERQAWEAGRTRKEEAWLLNREQELREEIRKGRDKEIELVIHRLEADMALAKEESEKAAESRIKRLRDKYEAELSELEQSERKLQERCSELKGQLGEAEGENLRLQGLVRQKERALEDAQAVNEQLSSERSNLAQVIRQEFEDRLAASEEETRQAKAELATLQARQQLELEEVHRRVKTALARKEEAVSSLRTQHEAAVKRADHLEELLEQHRRPTPSTK

SEQ ID NO: 13888 - protein, 4857 aa, Homo sapiens
MVTGGGAAPPGTVTEPLPSVIVLSAGRKMAAAAAAASGPGCSSAAGAGAAGVSEWLVLRDGCMHCDADGLHSLSYHPALNAILAVTSRGTIKVIDGTSGATLQASALSAKPGGQVKCQYISAVDKVIFVDDYAVGCRKDLNGILLLDTALQTPVSKQDDVVQLELPVTEAQQLLSACLEKVDISSTEGYDLFITQLKDGLKNTSHETAANHKVAKWATVTFHLPHHVLKSIASAIVNELKKINQNVAALPVASSVMDRLSYLLPSARPELGVGPGRSVDRSLMYSEANRRETFTSWPHVGYRWAQPDPMAQAGFYHQPASSGDDRAMCFTCSVCLVCWEPTDEPWSEHERHSPNCPFVKGEHTQNVPLSVTLATSPAQFPCTDGTDRISCFGSGSCPHFLAAATKRGKICIWDVSKLMKVHLKFEINAYDPAIVQQLILSGDPSSGVDSRRPTLAWLEDSSSCSDIPKLEGDSDDLLEDSDSEEHSRSDSVTGHTSQKEAMEVSLDITALSILQQPEKLQWEIVANVLEDTVKDLEELGANPCLTNSKSEKTKEKHQEQHNIPFPCLLAGGLLTYKSPATSPISSNSHRSLDGLSRTQGESISEQGSTDNESCTNSELNSPLVRRTLPVLLLYSIKESDEKAGKIFSQMNNIMSKSLHDDGFTVPQIIEMELDSQEQLLLQDPPVTYIQQFADAAANLTSPDSEKWNSVFPKPGTLVQCLRLPKFAEEENLCIDSITPCADGIHLLVGLRTCPVESLSAINQVEALNNLNKLNSALCNRRKGELESNLAVVNGANISVIQHESPADVQTPLIIQPEQRNVSGGYLVLYKMNYATRIVTLEEEPIKIQHIKDPQDTITSLILLPPDILDNREDDCEEPIEDMQLTSKNGFEREKTSDISTLGHLVITTQGGYVKILDLSNFEILAKVEPPKKEGTEEQDTFVSVIYCSGTDRLCACTKGGELHFLQIGGTCDDIDEADILVDGSLSKGIEPSSEGSKPLSNPSSPGISGVDLLVDQPFTLEILTSLVELTRFETLTPRFSATVPPCWVEVQQEQQQRRHPQHLHQQHHGDAAQHTRTWKLQTDSNSWDEHVFELVLPKACMVGHVDFKFVLNSNITNIPQIQVTLLKNKAPGLGKVNALNIEVEQNGKPSLVDLNEEMQHMDVEESQCLRLCPFLEDHKEDILCGPVWLASGLDLSGHAGMLTLTSPKLVKGMAGGKYRSFLIHVKAVNERGTEEICNGGMRPVVRLPSLKHQSNKGYSLASLLAKVAAGKEKSSNVKNENTSGTRKSENLRGCDLLQEVSVTIRRFKKTSISKERVQRCAMLQFSEFHEKLLNTLCRKTDDGQITEHAQSLVLDTLCWLAGVHSNGPGSSKEGNENLLSKTRKFLSDIVRVCFFEAGRSIAHKCARFLALCISNGKCDPCQPAFGPVLLKALLDNMSFLPAATTGGSVYWYFVLLNYVKDEDLAGCSTACASLLTAVSRQLQDRLTPMEALLQTRYGLYSSPFDPVLFDLEMSGSSCKNVYNSSIGVQSDEIDLSDVLSGNGKVSSCTAAEGSFTSLTGLLEVEPLHFTCVSTSDGTRIERDDAMSSFGVTPAVGGLSSGTVGEASTALSSAAQVALQSLSHAMASAEQQLQVLQEKQQQLLKLQQQKAKLEAKLHQTTAAAAAAASAVGPVHNSVPSNPVAAPGFFIHPSDVIPPTPKTTPLFMTPPLTPPNEAVSVVINAELAQLFPGSVIDPPAVNLAAHNKNSNKSRMNPLGSGLALAISHASHFLQPPPHQSIIIERMHSGARRFVTLDFGRPILLTDVLIPTCGDLASLSIDIWTLGEEVDGRRLVVATDISTHSLILHDLIPPPVCRFMKITVIGRYGSTNARAKIPLGFYYGHTYILPWESELKLMHDPLKGEGESANQPEIDQHLAMMVALQEDIQCRYNLACHRLETLLQSIDLPPLNSANNAQYFLRKPDKAVEEDSRVFSAYQDCIQLQLQLNLAHNAVQRLKVALGASRKMLSETSNPEDLIQTSSTEQLRTIIRYLLDTLLSLLHASNGHSVPAVLQSTFHAQACEELFKHLCISGTPKIRLHTGLLLVQLCGGERWWGQFLSNVLQELYNSEQLLIFPQDRVFMLLSCIGQRSLSNSGVLESLLNLLDNLLSPLQPQLPMHRRTEGVLDIPMISWVVMLVSRLLDYVATVEDEAAAAKKPLNGNQWSFINNNLHTQSLNRSSKGSSSLDRLYSRKIRKQLVHHKQQLNLLKAKQKALVEQMEKEKIQSNKGSSYKLLVEQAKLKQATSKHFKDLIRLRRTAEWSRSNLDTEVTTAKESPEIEPLPFTLAHERCISVVQKLVLFLLSMDFTCHADLLLFVCKVLARIANATRPTIHLCEIVNEPQLERLLLLLVGTDFNRGDISWGGAWAQYSLTCMLQDILAGELLAPVAAEAMEEGTVGDDVGATAGDSDDSLQQSSVQLLETIDEPLTHDITGAPPLSSLEKDKEIDLELLQDLMEVDIDPLDIDLEKDPLAAKVFKPISSTWYDYWGADYGTYNYNPYIGGLGIPVAKPPANTEKNGSQTVSVSVSQALDARLEVGLEQQAELMLKMMSTLEADSILQALTNTSPTLSQSPTGTDDSLLGGLQAANQTSQLIIQLSSVPMLNVCFNKLFSMLQVHHVQLESLLQLWLTLSLNSSSTGNKENGADIFLYNANRIPVISLNQASITSFLTVLAWYPNTLLRTWCLVLHSLTLMTNMQLNSGSSSAIGTQESTAHLLVSDPNLIHVLVKFLSGTSPHGTNQHSPQVGPTATQAMQEFLTRLQVHLSSTCPQIFSEFLLKLIHILSTERGAFQTGQGPLDAQVKLLEFTLEQNFEVVSVSTISAVIESVTFLVHHYITCSDKVMSRSGSDSSVGARACFGGLFANLIRPGDAKAVCGEMTRDQLMFDLLKLVNILVQLPLSGNREYSARVSVTTNTTDSVSDEEKVSGGKDGNGSSTSVQGSPAYVADLVLANQQIMSQILSALGLCNSSAMAMIIGASGLHLTKHENFHGGLDAISVGDGLFTILTTLSKKASTVHMMLQPILTYMACGYMGRQGSLATCQLSEPLLWFILRVLDTSDALKAFHDMGGVQLICNNMVTSTRAIVNTARSMVSTIMKFLDSGPNKAVDSTLKTRILASEPDNAEGIHNFAPLGTITSSSPTAQPAEVLLQATPPHRRARSAAWSYIFLPEEAWCDLTIHLPAAVLLKEIHIQPHLASLATCPSSVSVEVSADGVNMLPLSTPVVTSGLTYIKIQLVKAEVASAVCLRLHRPRDASTLGLSQIKLLGLTAFGTTSSATVNNPFLPSEDQVSKTSIGWLRLLHHCLTHISDLEGMMASAAAPTANLLQTCAALLMSPYCGMHSPNIEVVLVKIGLQSTRIGLKLIDILLRNCAASGSDPTDLNSPLLFGRLNGLSSDSTIDILYQLGTTQDPGTKDRIQALLKWVSDSARVAAMKRSGRMNYMCPNSSTVEYGLLMPSPSHLHCVAAILWHSYELLVEYDLPALLDQELFELLFNWSMSLPCNMVLKKAVDSLLCSMCHVHPNYFSLLMGWMGITPPPVQCHHRLSMTDDSKKQDLSSSLTDDSKNAQAPLALTESHLATLASSSQSPEAIKQLLDSGLPSLLVRSLASFCFSHISSSESIAQSIDISQDKLRRHHVPQQCNKMPITADLVAPILRFLTEVGNSHIMKDWLGGSEVNPLWTALLFLLCHSGSTSGSHNLGAQQTSARSASLSSAATTGLTTQQRTAIENATVAFFLQCISCHPNNQKLMAQVLCELFQTSPQRGNLPTSGNISGFIRRLFLQLMLEDEKVTMFLQSPCPLYKGRINATSHVIQHPMYGAGHKFRTLHLPVSTTLSDVLDRVSDTPSITAKLISEQKDDKEKKNHEEKEKVKAENGFQDNYSVVVASGLKSQSKRAVSATPPRPPSRRGRTIPDKIGSTSGAEAANKIITVPVFHLFHKLLAGQPLPAEMTLAQLLTLLYDRKLPQGYRSIDLTVKLGSRVITDPSLSKTDSYKRLHPEKDHGDLLASCPEDEALTPGDECMDGILDESLLETCPIQSPLQVFAGMGGLALIAERLPMLYPEVIQQVSAPVVTSTTQEKPKDSDQFEWVTIEQSGELVYEAPETVAAEPPPIKSAVQTMSPIPAHSLAAFGLFLRLPGYAEVLLKERKHAQCLLRLVLGVTDDGEGSHILQSPSANVLPTLPFHVLRSLFSTTPLTTDDGVLLRRMALEIGALHLILVCLSALSHHSPRVPNSSVNQTEPQVSSSHNPTSTEEQQLYWAKGTGFGTGSTASGWDVEQALTKQRLEEEHVTCLLQVLASYINPVSSAVNGEAQSSHETRGQNSNALPSVLLELLSQSCLIPAMSSYLRNDSVLDMARHVPLYRALLELLRAIASCAAMVPLLLPLSTENGEEEEEQSECQTSVGTLLAKMKTCVDTYTNRLRSKRENVKTGVKPDASDQEPEGLTLLVPDIQKTAEIVYAATTSLRQANQEKKLGEYSKKAAMKPKPLSVLKSLEEKYVAVMKKLQFDTFEMVSEDEDGKLGFKVNYHYMSQVKNANDANSAARARRLAQEAVTLSTSLPLSSSSSVFVRCDEERLDIMKVLITGPADTPYANGCFEFDVYFPQDYPSSPPLVNLETTGGHSVRFNPNLYNDGKVCLSILNTWHGRPEEKWNPQTSSFLQVLVSVQSLILVAEPYFNEPGYERSRGTPSGTQSSREYDGNIRQATVKWAMLEQIRNPSPCFKEVIHKHFYLKRVEIMAQCEEWIADIQQYSSDKRVGRTMSHHAAALKRHTAQLREELLKLPCPEGLDPDTDDAPEVCRATTGAEETLMHDQVKPSSSKELPSDFQL

SEQ ID NO: 13889 - protein, 861 aa, Homo sapiens
MRELVNIPLVHILTLVAFSGTEKLPKAPVITTPLETVDALVEEVATFMCAVESYPQPEISWTRNKILIKLFDTRYSIRENGQLLTILSVEDSDDGIYCCTANNGVGGAVESCGALQVKMKPKITRPPINVKIIEGLKAVLPCTTMGNPKPSVSWIKGDSPLRENSRIAVLESGSLRIHNVQKEDAGQYRCVAKNSLGTAYSKVVKLEVEVFARILRAPESHNVTFGSFVTLHCTATGIPVPTITWIENGNAVSSGSIQESVKDRVIDSRLQLFITKPGLYTCIATNKHGEKFSTAKAAATISIAEWSKPQKDNKGYCAQYRGEVCNAVLAKDALVFLNTSYADPEEAQELLVHTAWNELKVVSPVCRPAAEALLCNHIFQECSPGVVPTPIPICREYCLAVKELFCAKEWLVMEEKTHRGLYRSEMHLLSVPECSKLPSMHWDPTACARLPHLAFPPMTSSKPSVDIPNLPSSSSSSFSVSPTYSMTVIISIMSSFAIFVLLTITTLYCCRRRKQWKNKKRESAAVTLTTLPSELLLDRLHPNPMYQRMPLLLNPKLLSLEYPRNNIEYVRDIGEGAFGRVFQARAPGLLPYEPFTMVAVKMLKEEASADMQADFQREAALMAEFDNPNIVKLLGVCAVGKPMCLLFEYMAYGDLNEFLRSMSPHTVCSLSHSDLSMRAQVSSPGPPPLSCAEQLCIARQVAAGMAYLSERKFVHRDLATRNCLVGENMVVKIADFGLSRNIYSADYYKANENDAIPIRWMPPESIFYNRYTTESDVWAYGVVLWEIFSYGLQPYYGMAHEEVIYYVRDGNILSCPENCPVELYNLMRLCWSKLPADRPSFTSIHRILERMCERAEGTVSV

SEQ ID NO: 13890 - protein, 212 aa, Homo sapiens
MGLHLRPYRVGLLPDGLLFLLLLLMLLADPALPAGRHPPVVLGDNNRIPVIGPLKIREQQRSAVSTSWLLPYNYTWSPEKVFVQTPTINYTLRDYRKFFQDIGFEDGWLMRQDTEGLVEATMPPGVQLHCLYGTGVPTPDSFYYESFPDRDPKICFGDGDGTVNLKSALQCQAWQSRQEHQVLLQELPGSEHIEMLANATTLAYLKRVLLGP

SEQ ID NO: 13891 - protein, 197 aa, Homo sapiens
PAASSPSSNNTAATTAAIVPGSQLMPSKSPSTGTTEISSHESSHGTPSQTTAKNWELTASASHQPPGVYPQGHSDTTVAISTSTVLLCGLSAVSLLACYLKSSSQRKVTYLRLSVNYKAPPGVGDVYREDTSVWAPPNDPVSSCAARTDREPEKVEEMLSPVNPLHRRIQEEENSSQRHFTYICIYTSLSVISTHYI

SEQ ID NO: 13892 - protein, 753 aa, Homo sapiens
MAQQGQQGQMASGDSNLNFRMVAEIQNVEGQNLQEQVCPEPIFRFFRENKVEIASAITRPFPFLMGLRDRSFISEQMYEHFQEAFRNLVPVTRVMYCVLSELEKTFGWSHLEALFSRINLMAYPDLNEIYRSFQNVCYEHSPLQMNNVNDLEDRPRLLPYGKQENSNACHEMDDIAVPQEALSSSPRCEPGFSSESCEQLALPKAGGGDAEDAPSLLPVSCKLAIQIDEGESEEMPKLLPYDTEETFDLKTPQVTNEGEPEKGLCLLPGEGEEGSDDCSEMCDGEERQEASSSLARRGSVSSELENHPMNEEGESEELASSLLYDNVPGAEQSAYENEKCSCVMCFSEEVPGSPEARTESDQACGTMDTVDIANNSTLGKPKRKRRKKRGHGWSRMRMRRQENSQQNDNSKADGQVVSSEKKANVNLKDLSKIRGRKRGKPGTRFTQSDRAAQKRVRSRASRKHKDETVDFKAPLLPVTCGGVKGILHKKKLQQGILVKCIQTEDGKWFTPTEFEIKGGHARSKNWRLSVRCGGWPLRWLMENGFLPDPPRIRYRKKKRILKSQNNSSVDPCMRNLDECEVCRDGGELFCCDTCSRVFHEDCHIPPVEAERTPWNCIFCRMKESPGSQQCCQESEVLERQMCPEEQLKCEFLLLKVYCCSESSFFAKIPYYYYIREACQGLKEPMWLDKIKKRLNEHGYPQVEGFVQDMRLIFQNHRASYKYKDFGQMGFRLEAEFEKNFKEVFAIQETNGNN

SEQ ID NO: 13893 - protein, 532 aa, Homo sapiens
MLGGSGSHGRRSLAALSQIAYQRNDDDEEEAARERRRRARQERLRQKQEEESLGQVTDQVEVNAQNSVPDEEAKTTTTNTQVEGDDEAAFLERLARREERRQKRLQEALERQKEFDPTITDASLSLPSRRMQNDTAENETTEKEEKSESRQERYEIEETETVTKSYQKNDWRDAEENKKEDKEKEEEEEEKPKRGSIGENQIKDEKIKKDKEPKEEVKSFMDRKKGFTEVKSQNGEFMTHKLKHTENTFSRPGGRASVDTKEAEGAPQVEAGKRLEELRRRRGETESEEFEKLKQKQQEAALELEELKKKREERRKVLEEEEQRRKQEEADRKLREEEEKRRLKEEIERRRAEAAEKRQKMPEDGLSDDKKPFKCFTPKGSSLKIEERAEFLNKSVQKSSGVKSTHQAAIVSKIDSRLEQYTSAIEGTKSAKPTKPAASDLPVPAEGVRNIKSMWEKGNVFSSPTAAGTPNKETAGLKVGVSSRINEWLTKTPDGNKSPAPKPSDLRPGDVSSKRNLWEKQSVDKVTSPTKV

SEQ ID NO: 13894 - protein, 728 aa, Homo sapiens
MEVNCLTLKDLISPRQPRLDFAVEDGENAQKENIFVDRSRMAPKTPIKNEPIDLSKQKKFTPERNPITPVKFVDRQQAEPWTPTANLKMLISAASPDIRDREKKKGLFRPIENKDDAFTDSLQLDVVGDSAVDEFEKQRPSRKQKSLGLLCQKFLARYPSYPLSTEKTTISLDEVAVSLGVERRRIYDIVNVLESLHLVSRVAKNQYGWHGRHSLPKTLRNLQRLGEEQKYEEQMAYLQQKELDLIDYKFGERKKDGDPDSQEQQLLDFSEPDCPSSSANSRKDKSLRIMSQKFVMLFLVSKTKIVTLDVAAKILIEESQDAPDHSKFKTKVRRLYDIANVLTSLALIKKVHVTEERGRKPAFKWIGPVDFSSSDEELVDVSASVLPELKRETYGQIQVCAKQKLARHGSFNTVQASERIQRKVNSEPSSPYREEQGSGGYSLEIGSLAAVYRQKIEDNSQGKAFASKRVVPPSSSLDPVAPFPVLSVDPEYCVNPLAHPVFSVAQTDLQAFSMQNGLNGQVDVSLASAASAVESLKPALLAGQPLVYVPSASLFMLYGSLQEGPASGSGSERDDRSSEAPATVELSSAPSAQKRLCEERKPQEEDEPATKRQSREYEDGPLSLVMPKKPSDSTDLASPKTMGNRASIPLKDIHVNGQLPAAEEISGKATANSLVSSEWGNPSRNTDVEKPSKENESTKEPSLLQYLCVQSPAVTSSSDPQEHPTHTS

SEQ ID NO: 13895 - protein, 626 aa, Homo sapiens
MISSVCVSSYRGRKSGNKPPSKTCLKEEMAKGEASEKIIINVGGTRHETYRSTLRTLPGTRLAWLADPDGGGRPETDGGGVGSSGSSGGGGCEFFFDRHPGVFAYVLNYYRTGKLHCPADVCGPLFEEELTFWGIDETDVEPCCWMTYRQHRDAEEALDIFESPDGGGSGAGPSDEAGDDERELALQRLGPHEGGAGHGAGSGGCRGWQPRMWALFEDPYSSRAARVVAFASLFFILVSITTFCLETHEAFNIDRNVTEILRVGNITSVHFRREVETEPILTYIEGVCVLWFTLEFLVRIVCCPDTLDFVKNLLNIIDFVAILPFYLEVGLSGLSSKAARDVLGFLRVVRFVRILRIFKLTRHFVGLRVLGHTLRASTNEFLLLIIFLALGVLIFATMIYYAERIGARPSDPRGNDHTDFKNIPIGFWWAVVTMTTLGYGDMYPKTWSGMLVGALCALAGVLTIAMPVPVIVNNFGMYYSLAMAKQKLPKKRKKHVPRPAQLESPMYCKSEETSPRDSTCSDTSPPAREEGMIERKRADSKQNGDANAVLSDEEGAGLTQPLASSPTPEERRALRRSTTRDRNKKAAACFLLSTGDYACADGSVRKETCQDALSSNYAQAEVLTLS

SEQ ID NO: 13896 - protein, 130 aa, Homo sapiens
MDISKGLPGMQGGLHIWISENRKMVPVPEGAYGNFFEEHCYVILHVPQSPKATQGASSDLHYWVGKQAGAEAQGAAEAFQQRLQDELGGQTVLHREAQGHESDCFCSYFRPGIIYRKGGLASDLKHVETN

SEQ ID NO: 13897 - protein, 633 aa, Homo sapiens
MSDCCSAPGISWEAGVGRPAVPGLELQIRRGAMSEETVSESQFSLKTAALRVFDLPLTWYYSLSQIKFSPVAKKLFVVTAVSAISVIFLAHHFKRKRGKKKGKILPWEPEHLILEYTKRAASDKGSSCSSSRQNLTLSLSSTKDKGSQVCNYANGGLFSKYSGSAQSLASVQSVNSCHSCACGNSNSWDKADEDDIKLVNIPVTTPENLYLMGMELFEEALRRWEQALTFRNRQAEDEACGSIKLGAGDAIAEENVDDIISTEFIHKLEALLQRAYRLQEEFEATLGASDPNSLADDIDKDTDITMKGNVEDFGLRDTLSIASTDSFASAAELAEHREVRHTYSLESLCHCPFYEEAMHLVEEGKIYSRVLRTEMLECLGDSDFLAKLHCIRQAFQVILSESANRIFLAESGRKILSALIVKARKNPKKFEDVFDEMIYFLEQTDHWGSTEMELAARGVKNLNFYDVVLDFILMDSFEDLENPPTSIQNVVNNRWLNSSFKETAVASSCWSVLKQKRQQMKQIPDGFFAHFYAICEHISPVLAWGFLGPRNSLYDLCCFFKNQVLLFLKDIFDFEKVRYSSTETLAEDLMQLLIRRTELLMAYLEADALRHTSSCLSSHGHVMSTGLLEAKVQ

SEQ ID NO: 13898 - protein, 685 aa, Homo sapiens
MASKTKASEALKVVARCRPLSRKEEAAGHEQILTMDVKLGQVTLRNPRAAPGELPKTFTFDAVYDASSKQADLYDETVRPLIDSVLQGFNGTVFAYGQTGTGKTYTMQGTWVEPELRGVIPNAFEHIFTHISRSQNQQYLVRASYLEIYQEEIRDLLSKEPGKRLELKENPETGVYIKDLSSFVTKNVKEIEHVMNLGNQTRAVGSTHMNEVSSRSHAIFIITVECSERGSDGQDHIRVGKLNLVDLAGSERQNKAGPNTAGGAATPSSGGGGGGGGSGGGAGGERPKEASKINLSLSALGNVIAALAGNRSTHIPYRDSKLTRLLQDSLGGNAKTIMVATLGPASHSYDESLSTLRFANRAKNIKNKPRVNEDPKDTLLREFQEEIARLKAQLEKRGMLGKRPRRKSSRRKKAVSAPPGYPEGPVIEAWVAEEEDDNNNNHRPPQPILESALEKNMENYLQEQKERLEEEKAAIQDDRSLVSEEKQKLLEEKEKMLEDLRREQQATELLAAKYKAMESKLLIGGRNIMDHTNEQQKMLELKRQEIAEQKRREREMQQEMMLRDEETMELRGTYTSLQQEVEVKTKKLKKLYAKLQAVKAEIQDQHDEYIRVRQDLEEAQNEQTRELKLKYLIIENFIPPEEKNKIMNRLFLDCEEEQWKFQPLVPAGVLTLSPRLKCSGTISAH

SEQ ID NO: 13899 - protein, 1031 aa, Homo sapiens
MLRKIQRWWQLGRLRQLHPWCSGNMVQGKELPLLHRVAFLDHLCKQKSEVEEEGEEEEEGEDEASLDPLKPCSPTKEAPTGEQATPAPPQPSCGSEGLLKAIGIPEQTVMQPVSPSRSFPIFQILTSFPVRHKIASGNRQQQRKSQLFWGLPSLHSESLEAIFLSSGGPSPLKWSVCSSVFFNKLAFLPRSNLLLPQYHSSAQFSTHGAHTMEDLEGMAPDPQLLPPPSSPSVSSLLLHLRPFPVDHKGVLSGAEAPTQSPGTSPLEVLPGYETHLETTGHKKMPQAFEPPMPPPCQSPASLSEPRKVSPEGGLAISKDFWGTVGYREKPQASESSMPVPCPPLDSLPELQRESSLEDPSRYKPQWECRENSGNLWAFESPVLDLNPELSGTSPECVPPASETPWKGMQSRENIWVPADPVSPPSLPSVPLLESLVMGPQGVLSESKALWETMGQKENLWASDSPDPVHSTPPTTLMEPHRINPGECLATSEATWKDTEHSRNSSASRSPSLALSPPPALAPELLRVRSMGVLSDSEARCGDIQKTKNSWASKHPACNLPQDLHGASPLGVLSDSQSIVGEMEQKENCVPVFPGRGSSPSSNSVSKSHVSEPIADQSNYKPDGEAVEQRKNHWATELPAPSSLSTPLPEPHIDLELVWRNVQQREVPQGPSPLAVDPLHPVPQPPTLAEAVKIERTHPGLPKGVTCPGVKAEAPLSQRWTVPELLTHPGIHAWQWSRELKLRLKKLRQSPASRAPGPSQSFCSSPILSSTIPDFWGLPSCPPQQIYPPNPCPHSSSCHPQEVQRTVPQPVQSSHCHHFQSSSQLQPQESGRAEQGSQRGEKMKGKMVSQVPSQGPCVHMEAGVDYLSPGPGEPSNSKVLVSGKRKDKASASSSAKKREHPRKPKAGDHRRGTARLGLSTVTGKNHPAQARSLVEAPVSTFPQRSQHRGQSSQHTALPQLLLPKASGPQDQPEAGRRASDILTPRHCKHCPWAHMEKYLSFPTLKASLTRGLQKVLAKCLDNHRPLPTKSSQ

SEQ ID NO: 13900 - protein, 181 aa, Homo sapiens
MESKEPQLKGIVTRLFSQQGYFLQMHPDGTIDGTKDENSDYTLFNLIPVGLRVVAIQGVKASLYVAMNGEGYLYSSDVFTPECKFKESVFENYYVIYSSTLYRQQESGRAWFLGLNKEGQIMKGNRVKKTKPSSHFVPKPIEVCMYREPSLHEIGEKQGRSRKSSGTPTMNGGKVVNQDST

SEQ ID NO: 13901 - protein, 415 aa, Homo sapiens
MASPGSDSYIVRVKAVVMTRDDSSGGWFPQEGGGISRVGVCKVMHPEGNGRSGFLIHGERQKDKLVVLECYVRKDLVYTKANPTFHHWKVDNRKFGLTFQSPADARAFDRGVRKAIEDLIEGSTTSSSTIHNEAELGDDDVFTTATDSSSNSSQKREQPTRTISSPTSCEHRRIYTLGHLHDSYPTDHYHLDQPMPRPYRQVSFPDDDEEIVRINPREKIWMTGYEDYRHAPVRGKYPDPSEDADSSYVRFAKGEVPKHDYNYPYVDSSDFGLGEDPKGRGGSVIKTQPSRGKSRRRKEDGERSRCVYCRDMFNHEENRRGHCQDAPDSVRTCIRRVSCMWCADSMLYHCMSDPEGDYTDPCSCDTSDEKFCLRWMALIALSFLAPCMCCYLPLRACYHCGVMCRCCGGKHKAAA

SEQ ID NO: 13902 - protein, 540 aa, Homo sapiens
MLQGLLPVSLLLSVAVSAIKELPGVKKYEVVYPIRLHPLHKREAKEPEQQEQFETELKYKMTINGKIAVLYLKKNKNLLAPGYTETYYNSTGKEITTSPQIMDDCYYQGHILNEKVSDASISTCRGLRGYFSQGDQRYFIEPLSPIHRDGQEHALFKYNPDEKNYDSTCGMDGVLWAHDLQQNIALPATKLVKLKDRKVQEHEKYIEYYLVLDNGEFKRYNENQDEIRKRVFEMANYVNMLYKKLNTHVALVGMEIWTDKDKIKITPNASFTLENFSKWRGSVLSRRKRHDIAQLITATELAGTTVGLAFMSTMCSPYSVGVVQDHSDNLLRVAGTMAHEMGHNFGMFHDDYSCKCPSTICVMDKALSFYIPTDFSSCSRLSYDKFFEDKLSNCLFNAPLPTDIISTPICGNQLVEMGEDCDCGTSEECTNICCDAKTCKIKATFQCALGECCEKCQFKKAGMVCRPAKDECDLPEMCNGKSGNCPDDRFQVNGFPCHHGKGHCLMGTCPTLQEQCTELWGPGRRTNPFPCACAKENHFR

SEQ ID NO: 13903 - protein, 341 aa, Homo sapiens
MIPPSSPREDGVDGLPKEAVGAEQPPSPASTSSQESKLQKLKRSLSFKTKSLRSKSADNFFQRTNSEDMKLQAHMVAEISPSSSPLPAPGSLTSTPARAGLHPGGKAHAFQEYIFKKPTFCDVCNHMIVACGNKVDPVYETLRFGTSLAQRTKKGSSGSGSDSPHRTSTSDLVEVPEEANGPGGGYDLRKRSNSVFTYPENGTDDFRDPAKNINHQGSLSKDPLQMNTYVALYKFVPQENEDLEMRPGDIITLLEDSNEDWWKGKIQDRIGFFPANFVQRLQQNEKIFRCVRTFIGCKEQGQITLKENQICVSSEEEQDGFIRVLSGKKKGLIPLDVLENI

SEQ ID NO: 13904 - protein, 334 aa, Homo sapiens
MDFLLGNPFSSPVGQRIEKATDGSLQSEDWALNMEICDIINETEEGPKDALRAVKKRIVGNKNFHEVLETCVKNCGHRFHVLVASQDFVESVLVRTILPKNNPPTIVHDKVLNLIQSWADAFRSSPDLTGVVTIYEDLRRKGLEFPMTDLDMLSPIHTPQRTVFNSETQSGQDSVGTDSSQQEDSGQHAAPLPAPPILSGDTPIAPTPEQIGKLRSELEMVSGNVRVMSEMLTELVPTQAEPADLELLQELNRTCRAMQQRVLELIPQIANEQLTEELLIVNDNLNNVFLRHERFERFRTGQTTKAPSEAEPAADLIDMGPDPAATGNLSSQLA

SEQ ID NO: 13905 - protein, 378 aa, Homo sapiens
MHNLYSITGYPDPPGTMEEEEEDDDYENSTPPYKDLPPKPGTMEEEEEDDDYENSTPPYKDLPPKPGTMEEEEEDDDYENSTPPYKDLPPKPGSSAPPRPPRAAKETEKPPLPCKPRNMTGLDLAAVTCPPPQLAVNLEPSPLQPSLAATPVPWLNQRSGGPGCCQKRWMVYLCLLVVTSLFLGCLGLTVTLIKYQELMEELRMLSFQQMTWRTNMTGMAGLAGLKHDIARVRADTNQSLVELWGLLDCRRITCPEGWLPFEGKCYYFSPSTKSWDEARMFCQENYSHLVIINSFAEHNFVAKAHGSPRVYWLGLNDRAQEGDWRWLDGSPVTLSFWEPEEPNNIHDEDCATMNKGGTWNDLSCYKTTYWICERKCSC

SEQ ID NO: 13906 - protein, 307 aa, Homo sapiens
EHPLSADIAMATRADEDGDTPLHIAVVQGNLPAVHRLVNLFQQGGRELDIYNNLRQTPLHLAVITTLPSVVRLLVTAGASPMALDRHGQTAAHLACEHRSPTCLRALLDSAAPGTLDLEARNYDGLTALHVAVNTECQETVQLLLERGADIDAVDIKSGRSPLIHAVENNSLSMVQLLLQHGANVNAQMYSGSSALHSASGRGLLPLVRTLVRSGADSSLKNCHNDTPLMVARSRRVSRGSCGHAPCTRVSAGWLQVIDILRGKATRPASTSQPDPSPDRSANTSPESSSRLSSNGLLSASPSSSPS

SEQ ID NO: 13907 - protein, 103 aa, Homo sapiens
MDSFDLALLQEWDLESLWGEDILNQRNDSLVVEFQSSASRCRSVYEPDRNALRRKERERRNQETQQDDGTFNSSYSLFSEPYKTNKGDELSNRIQNTLGNYDE

SEQ ID NO: 13908 - protein, 1217 aa, Homo sapiens
MRQETLAQQQLQLEQIQQLQQQLHQQLEEQKIRQIYQYNYDPSGTASPQTTTEQAILEGQYAALEGSQFWATEDATTTASAVVAIEIPQSQGWYTVQSDGVTQYIAPPGILSTVSEIPLTDVVVKEEKQPKKRSSGAKVRGQYDDMGENMTDDPRSFKKIVDSGVQTDDEDATDRSYVSRRRRTKKSVDTSVQTDDEDQDEWDMPTRSRRKARVGKYGDSMTEADKTKPLSKVSSIAVQTVAEISVQTEPVGTIRTPSIRARVDAKVEIIKHISAPEKTYKGGSLGCQTEADSDTQSPQYLSATSPPKDKKRPTPLEIGYSSHLRADSTVQLAPSPPKSPKVLYSPISPLSPGKALESAFVPYEKPLPDDISPQKVLHPDMAKVPPASPKTAKMMQRSMSDPKPLSPTADESSRAPFQYTEGYTTKGSQTMTSSGAQKKVKRTLPNPPPEEISTGTQSTFSTMGTVSRRRICRTNTMARAKILQDIDRELDLVERESAKLRKKQAELDEEEKEIDAKLRYLEMGINRRKEALLKEREKRERAYLQGVAEDRDYMSDSEVSSTRPTRIESQHGIERPRTAPQTEFSQFIPPQTQTESQLVPPTSPYTQYQYSSPALPTQAPTSYTQQSHFEQQTLYHQQVSPYQTQPTFQAVATMSFTPQVQPTPTPQPSYQLPSQMMVIQQKPRQTTLYLEPKITSNYEVIRNQPLMIAPVSTDNTFAVSHLGSKYNSLDLRIGLEERSSMASSPISSISADSFYADIDHHTPRNYVLIDDIGEITKGTAALSTAFSLHEKDLSKTDRLLRTTETRRSQEVTDFLAPLQSSSRLHSYVKAEEDPMEDPYELKLLKHQIKQEFRRGTESLDHLAGLSHYYHADTSYRHFPKSEKYSISRLTLEKQAAKQLPAAILYQKQSKHKKSLIDPKMSKFSPIQESRDLEPDYSSYMTSSTSSIGGISSRARLLQDDITFGLRKNITDQQKFMGSSLGTGLGTLGNTIRSALQDEADKPYSSGSRSRPSSRPSSVYGLDLSIKRDSSSSSLRLKAQEAEALDVSFSHASSSARTKPTSLPISQSRGRIPIVAQNSEEESPLSPVGQPMGMARAAAGPLPPISADTRDQFGSSHSLPEVQQHMREESRTRGYDRDIAFIMDDFQHAMSDSEGKLGLKLPCYSQNSNSYFSACLISLLQRCILLFLVCLLHVYFNFISCKWKFYHVYRFCSMLFFI

SEQ ID NO: 13909 - protein, 331 aa, Homo sapiens
AKICLEIMQRTGAHLELSLAKDQGLSIMVSGKLDAVMKARKDIVARLQTQASATVAIPKEHHRFVIGKNGEKLQDLELKTATKIQIPRPDDPSNQIKITGTKEGIEKARHEVLLISAEQDKRAVERLEVEKAFHPFIAGPYNRLVGEIMQETGTRINIPPPSVNRTEIVFTGEKEQLAQAVARIKKIYEEKGNSLQEILERTGVSVEIPPSDSISETVILRGEPEKLGQALTEVYAKANSFTVSSVAAPSWLHRFIIGKKGQNLAKITQQMPKVHIEFTEGEDKITLEGPTEDVNVAQEQIEGMVKDLINRMDYVEINIDHKFHRHLIGKS

SEQ ID NO: 13910 - protein, 724 aa, Homo sapiens
MATMLEGRCQTQPRSSPSGREASLWSSGFGMKLEAVTPFLGKYRPFVGRCCQTCTPKSWESLFHRSITDLGFCNVILVKEENTRFRGWLVRRLCYFLWSLEQHIPPCQDVPQKIMESTGVQNLLSGRVPGGTGEGQVPDLVKKEVQRILGHIQAPPRPFLVRLFSWALLRFLNCLFLNVQLHKGQMKMVQKAAQAGLPLVLLSTHKTLLDGILLPFMLLSQGLGVLRVAWDSRACSPALRALLRKLGGLFLPPEASLSLDSSEGLLARAVVQAASAPLGLWTGALAVLRSLWSRWGCSHRICSRVHLAQPFSLQEYIVSARSCWGGRQTLEQLLQPIVLGQCTAVPDTEKEQEWTPITGPLLALKEEDQLLVRRLSCHVLSASVGSSAVMSTAIMATLLLFKHQKLLGEFSWLTEEILLRGFDVGFSGQLRSLLQHSLSLLRAHVALLRIRQGDLLVVPQPGPGLTHLAQLSAELLPVFLSEAVGACAVRGLLAGRVPPQGPWELQGILLLSQNELYRQILLLMHLLPQDLLLLKPCQSSYCYCQEVLDRLIQCGLLVAEETPGSRPACDTGRQRLSRKLLWKPSGDFTDSDSDDFGEADGRYFRLSQQSHCPDFFLFLCRLLSPLLKAFAQAAAFLRQGQLPDTELGYTEQLFQFLQATAQEEGIFECADPKLAISAVWTFRDLGVLQQTPSPAGPRLHLSPTFASLDNQEKLEQFIRQFICS

SEQ ID NO: 13911 - protein, 551 aa, Homo sapiens
MPVRKQDTQRALHLLEEYRSKLSQTEDRQLRSSIERVINIFQSNLFQALIDIQEFYEVTLLDNPKCIDRSKPSEPIQPVNTWEISSLPSSTVTSETLPSSLSPSVEKYRYQDEDTPPQEHISPQITNEVIGPELVHVSEKNLSEIENVHGFVSHSHISPIKVNSVDLRAASHEQAAAALKNAGQAVTIVAQYRPEEYSRFEAKIHDLREQMMNSSISSGSGSLRTSQKRSLYVRALFDYDKTKDSGLPSQGLNFKFGDILHVINASDDEWWQARQVTPDGESDEVGVIPSKRRVEKKERARLKTVKFNSKTRDKGEIPDDMGSKGLKHVTSNASDSESSYRGQEEYVLSYEPVNQQEVNYTRPVIILGPMKDRINDDLISEFPDKFGSCVPHTTRPKRDYEVDGRDYHFVTSREQMEKDIQEHKFIEAGQYNNHLYGTSVQSVREVAEKGKHCILDVSGNAIKRLQIAQLYPISIFIKPKSMENIMEMNKRLTEEQARKTFERAMKLEQEFTEHFTAIVQGDTLEDIYNQVKQIIEEQSGSYIWVPAKEKL

SEQ ID NO: 13912 - protein, 810 aa, Homo sapiens
MVMAYFVENFWGEKNSGFDVLYHNMKHGQISTKELADFVRERATIEEAYSRSMTKLAKSASNYSQLGTFAPVWDVFKTSTEKLANCHLDLVRKLQELIKEVQKYGEEQVKSHKKTKEEVAGTLEAVQTIQSITQALQKSKENYNAKCVEQERLKKEGATQREIEKAAVKSKKATDTYKLYVEKYALAKADFEQKMTETAQKFQDIEETHLIHIKEIIGSLSNAIKEIHLQIGQVHEEFINNMANTTVESLIQKFAESKGTGKERPGLIEFEECDTASAVEGIKPRKRKTFALPGIIKKEKDAESVECPDADSLNIPDVDEEGYSIKPETNQNDTKENHFYSSSDSDSEDEEPKKYRIEIKPMHPNNSHHTMASLDELKVSIGNITLSPAISRHSPVQMNRNLSNEELTKSKPSAPPNEKGTSDLLAWDPLFGPSLDSSSSSSLTSSSSARPTTPLSVGTIVPPPRPASRPKLTSGKLSGINEIPRPFSPPVTSNTSPPPAAPLARAESSSSISSSASLSAANTPTVGVSRGPSPVSLGNQDTLPVAVALTESVNAYFKGADPTKCIVKITGDMTMSFPSGIIKVFTSNPTPAVLCFRVKNISRLEQILPNAQLVFSDPSQCDSNTKDFWMNMQAVTVYLKKLSEQNPAASYYNVDVLKYQVSSNGIQSTPLNLATYWKCSASTTDLRVDYKYNPEAMVAPSVLSNIQVVVPVDGGVTNMQSLPPAIWNAEQMKAFWKLSSISEKSENGGSGSLRAKFDLSEGPSKPTTLAVQFLSEGSTLSGVDFELVGTGYRLSLIKKRFATGRYLADC

SEQ ID NO: 13913 - protein, 453 aa, Homo sapiens
RLLKHPNIVRLHDSISEEGFHYLVFDLVTGGELFEDIVAREYYSEADASHCIHQILESVNHIHQHDIVHRDLKPENLLLASKCKGAAVKLADFGLAIEVQGEQQAWFGFAGTPGYLSPEVLRKDPYGKPVDIWACGVILYILLVGYPPFWDEDQHKLYQQIKAGAYDFPSPEWDTVTPEAKNLINQMLTINPAKRITADQALKHPWVCQRSTVASMMHRQETVECLRKFNARRKLKGAILTTMLVSRNFSAAKSLLNKKSDGGVKPQSNNKNSLVSPAQEPAPLQTAMEPQTTVVHNATDGIKGSTESCNTTTEDEDLKVRKQEIIKITEQLIEAINNGDFEAYTKICDPGLTSFEPEALGNLVEGMDFHKFYFENLLSKNSKPIHTTILNPHVHVIGEDAACIAYIRLTQYIDGQGRPRTSQSEETRVWHRRDGKWLNVHYHCSGAPAAPLQ

SEQ ID NO: 13914 - protein, 104 aa, Homo sapiens
MVHLTPEEKTAVNALWGKVNVDAVGGEALGRLLVVYPWTQRFFESFGDLSSPDAVMGNPKVKAHGKKVLGAFSDGLAHLDNLKGTFSQLSELHCDKLHVDPENF

SEQ ID NO: 13915 - protein, 601 aa, Homo sapiens
MERAAPSRRVPLPLLLLGGLALLAAGVDADVLLEACCADGHRMATHQKDCSLPYATESKECRMVQEQCCHSQLEELHCATGISLANEQDRCATPHGDNASLEATFVKRCCHCCLLGRAAQAQGQSCEYSLMVGYQCGQVFQACCVKSQETGDLDVGGLQETDKIIEVEEEQEDPYLNDRCRGGGPCKQQCRDTGDEVVCSCFVGYQLLSDGVSCEDVNECITGSHSCRLGESCINTVGSFRCQRDSSCGTGYELTEDNSCKDIDECESGIHNCLPDFICQNTLGSFRCRPKLQCKSGFIQDALGNCIDINECLSISAPCPIGHTCINTEGSYTCQKNVPNCGRGYHLNEEGTRCVDVDECAPPAEPCGKGHRCVNSPGSFRCECKTGYYFDGISRMCVDVNECQRYPGRLCGHKCENTLGSYLCSCSVGFRLSVDGRSCEDINECSSSPCSQECANVYGSYQCYCRRGYQLSDVDGVTCEDIDECALPTGGHICSYRCINIPGSFQCSCPSSGYRLAPNGRNCQDIDECVTGIHNCSINETCFNIQGGFRCLAFECPENYRRSAATQKSKKGRQNTPAGSSKEDCRVLPWKQGLEDTHLDA

SEQ ID NO: 13916 - protein, 358 aa, Homo sapiens
MEPIGARLSLEAPGPAPFREAPPAEELPAPVVPCVQGGGDGGGASETPSPDAQLGDRPLSPKEEAAPQEQEELLECRRRCRARSFSLPADPILQAAKFLQQQQQQAVALGGEGAEDAQLGPGGCCAKCKKRVQFADTLGLSLASVKHFSEAEEPQVPPAVLSRLRSFPMRAEDLEQLGGLLAAAAVAAPLSAPPSRLRPLFQLPGPSAAAERLQRQRVCLERVQCSTASGAEVKGSGRVLSCPGPRAVTVRYTFTEWRSFLDVPAELQPEPLEPQQPEAPSGASEPGSGDAKKEPGAECFHFSLCLPPGLQPEDEEDADERGVAVHFAVCYRCAQGEYWDNNAGANYTLRYARPADAL

SEQ ID NO: 13917 - protein, 3062 aa, Homo sapiens
MEEFLQRAKSKLNRSKRLEKVHVVIGPKSCDLDSLISTFTYAYFLDKVSPPGVLCLPVLNIPRTEFNYFTETRFILEELNISESFHIFRDEINLHQLNDEGKLSITLVGSSVLASEDKTLESAVVKVINPVEQSDANVEFRESSSSLVLKEILQEAPELITEQLAHRLRGSILFKWMTMESEKISEKQEEILSILEEKFPNLPPREDIINVLQETQFSAQGLSIEQTMLKDLKELSDGEIKVAISTVSMNLENCLFHSNITSDLKAFTDKFGFDVLILFSSYLSEEQQPRRQIAVYSENMELCSQICCELEECQNPCLELEPFDCGCDEILVYQQEDPSVTCDQVVLVVKEVINRRCPEMVSNSRTSSTEAVAGSAPLSQGSSGIMELYGSDIEPQPSSVNFIENPPDLNDSNQAQVDANVDLVSPDSGLATIRSSRSSKESSVFLSDDSPVGEGAGPHHTLLPGLDSYSPIPEGAVAEEHAWSGEHGEHFDLFNFDPAPMASGQSQQSSHSADYSPADDFFPNSDLSEGQLPAGPEGLDGMGTNMSNYSSSSLLSGAGKDSLVEHDEEFVQRQDSPRDNSERNLSLTDFVGDESPSPERLKNTGKRIPPTPMNSLVESSPSTEEPASLYTEDMTQKATDTGHMGPPQTHARCSSWWGGLEIDSKNIADAWSSSEQESVFQSPESWKEHKPSSIDRRASDSVFQPKSLEFTKSGPWESEFGQPELGSNDIQDKNEESLPFQNLPMEKSPLPNTSPQGTNHLIEDFASLWHSGRSPTAMPEPWGNPTDDGEPAAVAPFPAWSAFGKEDHDEALKNTWNLHPTSSKTPSVRDPNEWAMAKSGFAFSSSELLDNSPSEINNEAAPEIWGKKNNDSRDHIFAPGNPSSDLDHTWTNSKPPKEDQNGLVDPKTRGKVYEKVDSWNLFEENMKKGGSDVLVPWEDSFLSYKCSDYSASNLGEDSVPSPLDTNYSTSDSYTSPTFAGDEKETEHKPFAKEEGFESKDGNSTAEETDIPPQSLQQSSRNRISSGPGNLDMWASPHTDNSSEINTTHNLDENELKTEHTDGKNISMEDDVGESSQSSYDDPSMMQLYNETNRQLTLLHSSTNSRQTAPDSLDLWNRVILEDTQSTATISDMDNDLDWDDCSGGAAIPSDGQTEGYMAEGSEPETRFTVRQLEPWGLEYQEANQVDWELPASDEHTKDSAPSEHHTLNEKSGQLIANSIWDSVMRDKDMSSFMLPGSSHITDSEQRELPPEIPSHSANVKDTHSPDAPAASGTSESEALISHLDKQDTERETLQSDAASLATRLENPGYFPHPDPWKGHGDGQSESEKEAQGATDRGHLDEEEVIASGVENASGISEKGQSDQELSSLVASEHQEICIKSGKISSLAVTFSPQTEEPEEVLEYEEGSYNLDSRDVQTGMSADNLQPKDTHEKHLMSQRNSGETTETSDGMNFTKYVSVPEKDLEKTEECNFLEPENVGGGPPHRVPRSLDFGDVPIDSDVHVSSTCSEITKNLDVKGSENSLPGAGSSGNFDRDTISSEYTHSSASSPELNDSSVALSSWGQQPSSGYQEENQGNWSEQNHQESELITTDGQVEIVTKVKDLEKNRINEFEKSFDRKTPTFLEIWNDSVDGDSFSSLSSPETGKYSEHSGTHQESNLIASYQEKNEHDISATVQPEDARVISTSSGSDDDSVGGEESIEEEIQVANCHVAEDESRAWDSLNESNKFLVTADPKSENIYDYLDSSEPAENENKSNPFCDNQQSSPDPWTFSPLTETEMQITAVEKEKRSSPETGTTGDVAWQISPKASFPKNEDNSQLEMLGFSADSTEWWKASPQEGRLIESPFERELSDSSGVLEINSSVHQNASPWGVPVQGDIEPVETHYTNPFSDNHQSPFLEGNGKNSHEQLWNIQPRQPDPDADKFSQLVKLDQIKEKDSREQTFVSAAGDELTPETPTQEQCQDTMLPVCDHPDTAFTHAEENSCVTSNVSTNEGQETNQWEQEKSYLGEMTNSSIATENFPAVSSPTQLIMKPGSEWDGSTPSEDSRGTFVPDILHGNFQEGGQLASAAPDLWIDAKKPFSLKADGENPDILTHCEHDSNSQASDSPDICHDSEAKQETEKHLSACMGPEVESSELCLTEPEIDEEPIYEPGREFVPSNAELDSENATVLPPIGYQADIKGSSQPASHKGSPEPSEINGDNSTGLQVSEKGASPDMAPILEPVDRRIPRIENVATSIFVTHQEPTPEGDGSWISDSFSPESQPGARALFDGDPHLSTENPALVPDALLASDTCLDISEAAFDHSFSDASGLNTSTGTIDDMSKLTLSEGHPETPVDGDLGKQDICSSEASWGDFEYDVMGQNIDEDLLREPEHFLYGGDPPLEEDSLKQSLAPYTPPFDLSYLTEPAQSAETIEEAGSPEDESLGCRAAEIVLSALPDRRSEGNQAETKNRLPGSQLAVLHIREDPESVYLPVGAGSNILSPSNVDWEVETDNSDLPAGGDIGPPNGASKEISELEEEKTIPTKEPEQIKSEYKEERCTEKNEDRHALHMDYILVNREENSHSKPETCEERESIAELELYVGSKETGLQGTQLASFPDTCQPASLNERKGLSAEKMSSKSDTRSSFESPAQDQSWMFLGHSEVGDPSLDARDSGPGWSGKTVEPFSELGLGEGPQLQILEEMKPLESLALEEASGPVSQSQKSKSRGRAGPDAVTLQAVTHDNEWEMLSPQPVQKNMIPDTEMEEETEFLELGTRISRPNGLLSEDVGMDIPFEEGVLSPSAADMRPEPPNSLDLNDTHPRRIKLTAPNINLSLDQSEGSILSDDNLDSPDEIDINVDELDTPDEADSFEYTGHDPTANKDSGQESESIPEYTAEEEREDNRLWRTVVIGEQEQRIDMKVIEPYRRVISHGGDSGYYGDGLNAIIVFAACFLPDSSRADYHYVMENLFLYVISTLELMVAEDYMIVYLNGATPRRRMPGLGWMKKCYQMIDRRLRKNLKSFIIVHPSWFIRTILAVTRPFISSKFSSKIKYVNSLSELSGLIPMDCIHIPESIINIDLKLKEKP

SEQ ID NO: 13918 - protein, 1044 aa, Homo sapiens
MAPFATPMVQALTTTRIQRQAEGFQCWRECGTRRSPFEGKETCAHRYEARQRVDQILETRDMIGRCFVLSQDLAIRDELDGGEWKFCEGRPQGHEQFGFCQQGTAAAFSPDSHYLLFGAPGTYNWKGTARVELCAQGSADLAHLDDGPYEAGGEKEQDPRLIPVPANSYFGFSIDSGKGLVRAEELSFVAGAPRANHKGAVVILRKDSASRLVPEVMLSGERLTSGFGYSLAVADLNSDGWPDLIVGAPYFFERQEELGGAVYVYLNQGGHWAGISPLRLCGSPDSMFGISLAVLGDLNQDGFPDIAVGAPFDGDGKVFIYHGSSLGVVAKPSQVLEGEAVGIKSFGYSLSGSLDMDGNQYPDLLVGSLADTAVLFRARPILHVSHEVSIAPRSIDLEQPNCAGGHSVCVDLRVCFSYIAVPSSYSPTVALDYVLDADTDRRLRGQVPRVTFLSRNLEEPKHQASGTVWLKHQHDRVCGDAMFQLQENVKDKLRAIVVTLSYSLQTPRLRRQAPGQGLPPVAPILNAHQPSTQRAEIHFLKQGCGEDKICQSNLQLVRARFCTRVSDTEFQPLPMDVDGTTALFALSGQPVIGLELMVTNLPSDPAQPQADGDDAHEAQLLVMLPDSLHYSGVRALDPAEKPLCLSNENASHVECELGNPMKRGAQVTFYLILSTSGISIETTELEVELLLATISEQELHPVSARARVFIELPLSIAGMAIPQQLFFSGVVRGERAMQSERDVGSKVKYEVTVSNQGQSLRTLGSAFLNIMWPHEIANGKWLLYPMQVELEGGQGPGQKGLCSPRPNILHLDVDSRDRRRRELEPPEQQEPGERQEPSMSWWPVSSAEKKKNITLDCARGTANCVVFSCPLYSFDRAAVLHVWGRLWNSTFLEEYSAVKSLEVIVRANITVKSSIKNLMLRDASTVIPVMVYLDPMAVVAEGVPWWVILLAVLAGLLVLALLVLLLWKMGFFKRAKHPEATVPQYHAVKIPREDRQQFKEEKTGTILRNNWGSPRREGPDAHPILAADGHPELGPDGHPGPGTA

SEQ ID NO: 13919 - protein, 119 aa, Homo sapiens
MGLLLPLALCILVLCCGAMSPPQLALNPSALLSRGCNDSDVLAVAGFALRDINKDRKDGYVLRLNRVNDAQEYRRGGLGSLFYLTLDVLETDCHVLRKKAWQDCGMRIFFESFQKKRFT

SEQ ID NO: 13920 - protein, 704 aa, Homo sapiens
MKQTHADTPVDHCLSGIRKCSSTFKLKSEVNKHETALEMQNPNLNNKECCFTFTLNGNSRKLDRSVFTAYGKPSESIYSALSANDYFSERIKNQFNKNIIVYEEKTIDGHINLGMPLKCLPSDSHFKITFGQRKSSKEDGHILRQCENPNMECILFHVVAIGRTRKKIVKINELHEKGSKLCIYALKGETIEGALCKDGRFRSDIGEFEWKLKEGHKKIYGKQSMVDEVSGKVLEMDISKKKALQQKDIHKKIKQNESATDEINHQSLIQSKKKVHKPKKDGETKDVEHSREQILPPQDLSHYIKDKTRQTIPRIRNYYFCSLPRKYRQINSQVRRRPHLGRRYAINLDVQKEAINLLKNYQTLNEAIMHQYPNFKEEAQWVRKYFREEQKRMNLSPAKQFNIYKKDFGKMTANSVSVATCEQLTYYSKSVGFMQWDNNGNTGNATCFVFNGGYIFTCRHVVHLMVGKNTHPSLWPDIISKCAKVTFTYTEFCPTPDNWFSIEPWLKVSNENLDYAILKLKENGNAFPPGLWRQISPQPSTGLIYLIGHPEGQIKKIDGCTVIPLNERLKKYPNDCQDGLVDLYDTTSNVYCMFTQRSFLSEVWNTHTLSYDTCFSDGSSGSPVFNASGKLVALHTFGLFYQRGFNVHALIEFGYSMDSILCDIKKTNESLYKSLNDEKLETYDEEKGKQESSLQDHQIEPMEC

SEQ ID NO: 13921 - protein, 687 aa, Homo sapiens
MLSFFRRTLGRRSMRKHAEKERLREAQRAATHIPAAGDSKSIITCRVSLLDGTDVSVDLPKKAKGQELFDQIMYHLDLIESDYFGLRFMDSAQVAHWLDGTKSIKKQVKIGSPYCLHLRVKFYSSEPNNLREELTRYLFVLQLKQDILSGKLDCPFDTAVQLAAYNLQAELGDYDLAEHSPELVSEFRFVPIQTEEMELAIFEKWKEYRGQTPAQAETNYLNKAKWLEMYGVDMHVVKARDGNDYSLGLTPTGVLVFEGDTKIGLFFWPKITRLDFKKNKLTLVVVEDDDQGKEQEHTFVFRLDHPKACKHLWKCAVEHHAFFRLRGPVQKSSHRSGFIRLGSRFRYSGKTEYQTTKTNKARRSTSFERRPSKRYSRRTLQMKACATKPEELSVHNNVSTQSNGSQQAWGMRSALPVSPSISSAPVPVEIENLPQSPGTDQHDRKCIPLNIDLLNSPDLLEATIGDVIGASDTMETSQALNDVNVATRLPGLGEPEVEYETLKDTSEKLKQLEMENSPLLSPRSNIDVNINSQEEVVKLTEKCLNNVIESPGLNVMRVPPDFKSNILKAQVEAVHKVTKEDSLLSHKNANVQDAATNSAVLNENNVPLPKESLETLMLITPADSGSVLKEATDELDALLASLTENLIDHTVAPQVSSTSMITPRWIVPLWSHFGRRSCPEAEVFTDH

SEQ ID NO: 13922 - protein, 172 aa, Homo sapiens
MGSSGLGKAATLDELLCTCIEMFDDNGELDNSYLPRIVLLMHRWYLSSTELAEKLLCMYRNATGESCNEFRLKICYFMRYWILKFPAEFNLDLGLIRMTEEFREVASQLGYEKHVSLIDISSIPSYDWMRRVTQRKKVSKKGKACLLFDHLEPIELAEHLTFLEHKSFRRIS

SEQ ID NO: 13923 - protein, 264 aa, Homo sapiens
ADSMLLALQLSMAENNKQHSGEFTVSLSDVLLTWKYLLHEKLNLPVENMDVTDHYEDVRKIYDDFLKNSNMLDLIDVYQKCRALTSNCENYNTVSPSQLLDFLSGKQYAVGDETDLSIPTSPTSKYNRDNEKVQLLARKIIFSYLNLLVNSKNDLAVAYILNIPDRGLGREAFTDLKHAAREKQMSIFLVATSFIRTIELGGKGYAPPPSDPLRTHVKGLSNFINFIDKLDEILGEIPNPRGCKSICWKINNWNEFWKCSSGQK

SEQ ID NO: 13924 - protein, 302 aa, Homo sapiens
MQSTPFCGFCSLGKMITAKPGKTPIQVLHEYGMKTKNIPVYECERSDVQIHVPTFTFRVTVGDITCTGEGTSKKLAKHRAAEAAINILKANASICFAVPDPLMPDPSKQPKNQLNPIGSLQELAIHHGWRLPEYTLSQEGGPAHKREYTTICRLESFMETGKGASKKQAKRNAAEKFLAKFSNISPENHISLTNVVGHSLGCTWHSLRNSPGEKINLLKRSLLSIPNTDYIQLLSEIAKEQGFNITYLDIDELSANGQYQCLAELSTSPITVCHGSGISCGNAQSDAAHNALQYLKIIAERK

SEQ ID NO: 13925 - protein, 576 aa, Homo sapiens
MYSKSIQTICSGLLTDVEDQAAKGILNDNIKDYVGKNLDTKNYDSKIPENSEFPFVSLKEPRVQNNLKRLDTLEFKQLIHIEHQPNGGASVIHAYSNELSHLSPMEMERFAEEFVGLVFSENENSAAFYVMGIVHGAATYLPDFLDYFSFNFPNSPVKMEILGKKDIETTTMSNFHAQVKRTYSHGTYRAGPMRQISLVGAVDEEVGDYFPEFLDMLEESPFLKCTLPWGTLSSLKLQSRKDSDDGPIMWVRPGEQMIPVADMPKSPFKRKRTTNEIKNLQYLPRTSEPREMLFEDRTRAHADHIGQGFERQTTAAVGVLKAVHCGEWPDQPRITKDVICFHAEDFLEVVQRMQLDLHEPPLSQCVQWVDDAKLNQLRREGIRYARIQLYDNDIYFIPRNVVHQFKTVSAVCSLAWHIRLKLYHSEEDTSQNTATHETGTSSDSTSSVLGPHTDNMICAVSKASLDSVFSDKLHSKYELQQIKHEPIASVRIKEEPVNVNIPEKTTALNNMDGKNVKAKLDHVQFAEFKIDMDSKFENSNKDLKEELCPGNLSLVDTRQHSSAHSNQDKKDDDILC

SEQ ID NO: 13926 - protein, 270 aa, Homo sapiens
MNPQCARCGKVVYPTEKVNCLDKYWHKGCFHCEVCKMALNMNNYKGYEKKPYCNAHYPKQSFTTVADTPENLRLKQQSELQSQVKYKRDFEESKGRGFSIVTDTPELQRLKRTQEQISNVKYHEDFEKTKGRGFTPVVDDPVTERVRKNTQVVSDAAYKGVHPHIVEMDRRPGIIVAPVLPGAYQQSHSQGYGYMHQTSVSSMRSMQHSPNLRTYRAMYDYSAQDEDEVSFRDGDYIVNVQPIDDGWMYGTVQRTGRTGMLPANYIEFVN

SEQ ID NO: 13927 - protein, 232 aa, Homo sapiens
FQGGKWVPCGKADTNVQGNRVYMHPDSPNTGAHWMRQEISFGKLKLTNNKGASNNNGQMVVLQSLHKYQPRLHVVEVNEDGTEDTSQPGRVQTFTFPETQFIAVTAYQNTDITQLKIDHNPFAKGFRDNYDTIYTGCDMDRLTPSPNDSPRSQIVPGARYAMAGSFLQDQFQAEDPGAPSPQRWFVTPANNRLDFAASAYDTATDFAGNAATLLSYAAAGVKALPLQAAGCT

SEQ ID NO: 13928 - protein, 128 aa, Homo sapiens
MASLAAANAEFCFNLFREMDDNQGNGNVFFSSLSLFAALALVRLGAQDDSLSQIDKLLHVNTASGYGNSSNSQSGLQSQLKRVFSDINASHKDYDLSIVNGLFAEKVYGFHKDYIECAEKLYDAKVER

SEQ ID NO: 13929 - protein, 102 aa, Homo sapiens
MDDDIAALVVDNGSGMCKAGFAGDDAPRAVFPSIVGRPRHQGVMVGMGQKDSYVGDEAQSKRGILTLKYPIEHGIVTNWDDMEKIWHHTFYNELRVAPEEHP

SEQ ID NO: 13930 - protein, 613 aa, Homo sapiens
MGQKGHKDSLYPCGGTPESSLHEALDQCMTALDLFLTNQFSEALSYLKPRTKESMYHSLTYATILEMQAMMTFDPQDILLAGNMMKEAQMLCQRHRRKSSVTDSFSSLVNRPTLGQFTEEEIHAEVCYAECLLQRAALTFLQGSSHGGAVRPRALHDPSHACSCPPGPGRQHLFLLQDENMVSFIKGGIKVRNSYQTYKELDSLVQSSQYCKGENHPHFEGGVKLGVGAFNLTLSMLPTRILRLLEFVGFSGNKDYGLLQLEEGASGHSFRSVLCVMLLLCYHTFLTFVLGTGNVNIEEAEKLLKPYLNRYPKGAIFLFFAGRIEVIKGNIDAAIRRFEECCEAQQHWKQFHHMCYWELMWCFTYKGQWKMSYFYADLLSKENCWSKATYIYMKAAYLSMFGKEDHKPFGDDEVELFRAVPGLKLKIAGKSLPTEKFAIRKSRRYFSSNPISLPVPALEMMYIWNGYAVIGKQPKLTDGILEIITKAEEMLEKGPENEYSVDDECLVKLLKGLCLKYLGRVQEAEENFRSISANEKKIKYDHYLIPNALLELALLLMEQDRNEEAIKLLESAKQNYKNYSMESRTHFRIQAATLQAKSSLENSSRSMVSSVSL

SEQ ID NO: 13931 - protein, 783 aa, Homo sapiens
MAACRYCCSCLRLRPLSDGPFLLPRRDRALTQLQVRALWSSAGSRAVAVDLGNRKLEISSGKLARFADGSAVVQSGDTAVMVTAVSKTKPSPSQFMPLVVDYRQKAAAAGRIPTNYLRREIGTSDKEILTSRIIDRSIRPLFPAGYFYDTQVLCNLLAVDGVNEPDVLAINGASVALSLSDIPWNGPVGAVRIGIIDGEYVVNPTRKEMSSSTLNLVVAGAPKSQIVMLEASAENILQQDFCHAIKVGVKYTQQIIQGIQQLVKETGVTKRTPQKLFTPSPEIVKYTHKLAMERLYAVFTDYEHDKVSRDEAVNKIRLDTEEQLKEKFPEADPYEIIESFNVVAKEVFRSIVLNEYKRCDGRDLTSLRNVSCEVDMFKTLHGSALFQRGQTQVLCTVTFDSLESGIKSDQVITAINGIKDKNFMLHYEFPPYATNEIGKVTGLNRRELGHGALAEKALYPVIPRDFPFTIRVTSEVLESNGSSSMASACGGSLALMDSGVPISSAVAGVAIGLVTKTDPEKGEIEDYRLLTDILGIEDYNGDMDFKIAGTNKGITALQADIKLPGIPIKIVMEAIQQASVAKKEILQIMNKTISKPRASRKENGPVVETVQVPLSKRAKFVGPGGYNLKKLQAETGVTISQVDEETFSVFAPTPSAMHEARDFITEICKDDQEQQLEFGAVYTATITEIRDTGVMVKLYPNMTAVLLHNTQLDQRKIKHPTALGLEVGQEIQVKYFGRDPADGRMRLSRKVLQSPATTVVRTLNDRSSIVMGEPISQSSSNSQ

SEQ ID NO: 13932 - protein, 186 aa, Homo sapiens
MSLVCLTDFQAHAREQLSKSTRDFIEGGADDSITRDDNIAAFKRIRLRPRYLRDVSEVDTRTTIQGEEISAPICIAPTGFHCLVWPDGEMSTARAPEGLRWFQLYVHPDLQLNKQLIQRVESLGFKALVITLDTPVCGNRRHDIRNQLRRNLTLTDLQSPKKGNAIPYFQMTPISTSLCWNDLSWF

SEQ ID NO: 13933 - protein, 254 aa, Homo sapiens
MAVGQIGNFLAYTAVPTVLVTPLGALGVPFGSILASYLLKEKLNILGKLGCLLSCAGSVVLIIHSPKSESVTTQAELEEKLTNPVFVGYLCIVLLMLLLLIFWIAPAHGPTNIMVYISICSLLGSFTVPSTKGIGLAAQDILHNNPSSQRALCLCLVLLAVLGCSIIVQFRYINKALECFDSSVFGAIYYVVFTTLVLLASAILFREWSNVGLVDFLGMACGFTTVSVGIVLIQVFKEFNFNLGEMNKSNMKTD

SEQ ID NO: 13934 - protein, 901 aa, Homo sapiens
MAEPGHSHHLSARVRGRTERRIPRLWRLLLWAGTAFQVTQGTGPELHACKESEYHYEYTACDSTGSRWRVAVPHTPGLCTSLPDPIKGTECSFSCNAGEFLDMKDQSCKPCAEGRYSLGTGIRFDEWDELPHGFASLSANMELDDSAAESTGNCTSSKWVPRGDYIASNTDECTATLMYAVNLKQSGTVNFEYYYPDSSIIFEFFVQNDQCQPNADDSRWMKTTEKGWEFHSVELNRGNNVLYWRTTAFSVWTKVPKPVLVRNIAITEKGSSSCNVRPACTDKDYFYTHTACDANGETQLMYKWAKPKICSEDLEGAVKLPASGVKTHCPPCNPGFFKTNNSTCQPCPYGSYSNGSDCTRCPAGTEPAVGFEYKWWNTLPTNMETTVLSGINFEYKGMTGWEVAGDHIYTAAGASDNDFMILTLVVPGFRPPQSVMADTENKEVARITFVFETLCSVNCELYFMVGVNSRTNTPVETWKGSKGKQSYTYIIEENTTTSFTWAFQRTTFHEASRKYTNDVAKIYSINVTNVMNGVASYCRPCALEASDVGSSCTSCPAGYYIDRDSGTCHSCPTNTILKAHQPYGVQACVPCGPGTKNNKIHSLCYNDCTFSRNTPTRTFNYNFSALANTVTLAGGPSFTSKGLKYFHHFTLSLCGNQGRKMSVCTDNVTDLRIPEGESGFSKSITAYVCQAVIIPPEVTGYKAGVSSQPVSLADRLIGVTTDMTLDGITSPAELFHLESLGIPDVIFFYRSNDVTQSCSSGRSTTIRVRCSPQKTVPGSLLLPGTCSDGTCDGCNFHFLWESAAACPLCSVADYHAIVSSCVAGIQKTTYVWREPKLCSGGISLPEQRVTICKTIDFWLKVGISAGTCTAILLTVLTCYFWKKNQKLEYKYSKLVMNATLK

SEQ ID NO: 13935 - protein, 216 aa, Homo sapiens
MNHLPEDMENALTGSQSSHASLRNIHSINPTQLMARIESYEGREKKGISDVRRTFCLFVTFDLLFVTLLWIIELNVNGGIENTLEKEVMQYDYYSSYFDIFLLAVFRFKVLILAYAVCRLRHWWAIALFSQGAFGYVLPIISFILAWIETWFLDFKVLPQEAEEENRLLIVQDASERAALIPGGLSDGQFYSPPESEAGSEEAEEKQDSEKPLLEL

SEQ ID NO: 13936 - protein, 128 aa, Homo sapiens
MLQTLYDYFWWERLWLPVNLTWADLEDRDGRVYAKASDLYITLPLALLFLIVRYFFELYVATPLAALLNIKEKTRLRAPPNATLEHFYLTSGKQPKQVEVELLSRQSGLSGRQVERWFRRRRNQDRPS

SEQ ID NO: 13937 - protein, 426 aa, Homo sapiens
MLPSASRERPGYRAGVAAPDLLDPKSAAQNSKPRLSFSTKPTVLASRVESDTTINVMKWKTVSTIFLVVVLYLIIGATVFKALEQPHEISQRTTIVIQKQTFISQHSCVNSTELDELIQQIVAAINAGIIPLGNTSNQISHWDLGSSFFFAGTVITTIGFGNISPRTEGGKIFCIIYALLGIPLFGFLLAGVGDQLGTIFGKGIAKVEDTFIKWNVSQTKIRIISTIIFILFGCVLFVALPAIIFKHIEGWSALDAIYFVVITLTTIGFGDYVAGGSDIEYLDFYKPVVWFWILVGLAYFAAVLSMIGDWLRVISKKTKEEVGEFRAHAAEWTANVTAEFKETRRRLSVEIYDKFQRATSIKRKLSAELAGNHNQELTPCRRTLSVNHLTSERDVLPPLLKTESIYLNGLTPHCAGEEIAVIENIK

SEQ ID NO: 13938 - protein, 148 aa, Homo sapiens
MLSDGCGSEEKISVPSCYGGIGAPVSRQVPASHDSELMAFMTRKLWDLEQQVKAQTDEILSKDQKIAALEDLVQTLRPHPAEATLQRQEELETMCVQLQRQVREMERFLSDYGLQWVGEPMDQEDSESKTVSEHGERDWMTAKKFWKP

SEQ ID NO: 13939 - protein, 144 aa, Homo sapiens
MKPKMKYSTNKISTAKWKNTASKALCFKLGNKVLLSYYESQHPSNESGDGVDGKMLMVTLSPTKDFWLHANNKEHSVELHKCEKPLPDQAFFVLHNMHSNCVSFECKTDPGVFIGVKDNHLALIKVDSSENLCTENILFKLSET

SEQ ID NO: 13940 - protein, 488 aa, Homo sapiens
MSDEVFSTTLAYTKSPKVTKRTTFQDELIRAITARSARQRSSEYSDDFDSDEIVSLGDFSDTSADENSVNKKMNDFHISDDEEKNPSKLLFLKTNKSNGNITKDEPVCAIKNEEEMAPDGCEDIVVKSFSESQNKDEEFEKDKIKMKPKPRILSIKSTSSENNSLDTDDHFKPSPRPRSMLKKKSHMEEKDGLEDKETALSEELELHSAPSSLPTPNGIQLEAEKKAFSENLDPEDSCLTSLASSSLKQILGDSFSPGSEGNASGKDPNEEITENHNSLKSDENKENSFSADHVTTAVEKSKESQVTADDLEEEKAKAELIMDDDRTVDPLLSKSQSILISTSATASSKKTIEDRNIKNKKSTNNRASSASARLMTSEFLKKSSSKRRTPSTTTSSHYLGTLKVLDQKPSQKQSIEPDRADNIRAAVYQEWLEKKNVYLHEMHRIKRIESENLRIQNEQKKAAKREEALASFEAWKAMKEKEAKKIAA

SEQ ID NO: 13941 - protein, 563 aa, Homo sapiens
MRDPLTDCPYNKVYKNLKEFSQNGENFCKQVTSVLQQRANLEISYAKGLQKLASKLSKALQNTRKSCVSSAWAWASEGMKSTADLHQKLGKAIELEAIKPTYQVLNVQEKKRKSLDNEVEKTANLVISNWNQQIKAKKKLMVSTKKHEALFQLVESSKQSMTEKEKRKLLNKLTKSTEKLEKEDENYYQKNMAGYSTRLKWENTLENCYQVTHSICLYAFWVKRAWGKCVSDLRYQDTFLPGNLPPLWFGYDIVKRLIMRLCSVCLQSILELEKERIQLLCNNLNQYSQHISLFGQTLTTCHTQIHCAISKIDIEKDIQAVMEETAILSTENKSEFLLTDYFEEDPNSAMDKERRKSLLKPKLLRLQRDIEKASKDKEGLERMLKTYSSTSSFSDAKSQKDTAALMDENNLKLDLLEANSYKLSSMLAELEQRPQPSHPCSNSIFRWREKEHTHSYVKISRPFLMKRLENIVSKASSGGQSNPGSSTPAPGAAQLSSRLCKALYSFQARQDDELNLEKGDIVIIHEKKEGGWWFGSLNGKKGHFPAAYVEELPSNAGNTATKA

SEQ ID NO: 13942 - protein, 396 aa, Homo sapiens
MQLPRWWELGDPCAWTGQGRGTRRMSPATTGTFLLTGEISNDPITFNTNLMGYPDRPGWLRYIQRTPYSDGVLYGSPTAENVGKPTIIEITAYNRRTFETARHNLIINIMSAEDFPLPYQAEFFIKNMNVEEMLASEVLGDFLGAVKNVWQPERLNAINITSALDRGGRVPLPINDLKEGVYVMVGADVPFSSCLREVENPQNQLRCSQEMEPVITCDKKFRTQFYIDWCKISLVDKTKQVSTYQEVIRGEGILPDGGEYKPPSDSLKSRDYYTDFLITLAVPSAVALVLFLILAYIMCCRREGVEKRNMQTPDIQLVHHSAIQKSTKELRDMSKNREIAWPLSTLPVFHPVTGEIIPPLHTDNYDSTNMPLMQTQQNLPHQTQIPQQQTTGKWYP

SEQ ID NO: 13943 - protein, 392 aa, Homo sapiens
MRGSCERSGEDEEQKEEAMVACGRLSGVPEAEQGPEANWDSDLETEGTDGLGELVRDTLYLRSCRAHSVVPISCFLRQGSAQELNLRHRGLGPQGARALASSLSSNPYVKRLDLRDNGLCGAGAEALAGALSKSSSIHDVDLSENQLGVAGAQALCAALTVNQAMRKMQLSGNGLEEQAAQHLAELLLAHTDLKSLDLSYNQLNDQAGETLGPALAENTGLTELNVSWNHLRGPGAVAFARGLEANIFLKVLDISYNGFGDPGASAVGEALKANNVLEELNMSNNRISAMGALSLGLGLRVNQTLRILVVSRNPMRSEGCFGLLKSVQDNPASALELLDFSDIQVNAEFDGLASSVRGILPELCIKTGACRVEYKKELLPVFRSALPASVPK

SEQ ID NO: 13944 - protein, 574 aa, Homo sapiens
MGTTGLESLSLGDRGAAPTVTSSERLVPDPPNDLRKEDVAMELERVGEDEEQMMIKRSSECNPLLQEPIASAQFGATAGTECRKSVPCGWERVVKQRLFGKTAGRFDVYFISPQGLKFRSKSSLANYLHKNGETSLKPEDFDFTVLSKRGIKSRYKDCSMAALTSHLQNQSNNSNWNLRTRSKCKKDVFMPPSSSSELQESRGLSNFTSTHLLLKEDEGVDDVNFRKVRKPKGKVTILKGIPIKKTKKGCRKSCSGFVQSDSKRESVCNKADAESEPVAQKSQLDRTVCISDAGACGETLSVTSEENSLVKKKERSLSSGSNFCSEQKTSGIINKFCSAKDSEHNEKYEDTFLESEEIGTKVEVVERKEHLHTDILKRGSEMDNNCSPTRKDFTEDTIPRTQIERRKTSLYFSSKYNKEALSPPRRKAFKKWTPPRSPFNLVQETLFHDPWKLLIATIFLNRTSGKMAIPVLWKFLEKYPSAEVARTADWRDVSELLKPLGLYDLRAKTIVKFSDEYLTKQWKYPIELHGIGKYGNDSYRIFCVNEWKQVHPEDHKLNKYHDWLWENHEKLSLS

SEQ ID NO: 13945 - protein, 376 aa, Homo sapiens
MGNSSEFQKAVKLVINTVSFDKDSTVQVFEATIRVLGSLLSAHRIITDSKQPFGDMTIKDYDNELLYMAHDLAVRLLPAFENTKTGIPYPRVNLKTGVPPDTNNETCTAGAGSLLVEFGILSRLLGDSTFEWVARRAVKALWNLRSNDTGLLGNVVNIQTGHWVGKQSGLGAGLDSFYEYLLKSYILFGEKEDLEMFNAAYQSIQNYLRRGREACNEGEGDPPLYVNVNMFSGQLMNTWIDSLQAFFPGLQVLIGDVEDAICLHAFYYAIWKRYGALPERYNWQLQAPDVLFYPLRPELVESTYLLYQATKNPFYLHVGMDILQSLEKYTKVKCGYATLHHVIDKSTEDRMESFFLSETCKYLYLVCVLQDEPRNI

SEQ ID NO: 13946 - protein, 511 aa, Homo sapiens
QIDQFLVVARSVGTFARALDCSSSVRQPSLHMSAAAASRDITLFHAMDTLHKNIYDISKAISALVPQGGPVLCRDEMEEWSASEANLFEEALEKYGKDFTDIQQDFLPWKSLTSIIEYYYMWKTTDRYVQQKRLKAAEAESKLKQVYIPNYNKPNPNQISVNNVKAGVVNGTGAPGQSPGAGRACESCYTTQSYQWYSWGPPNMQCRLCASCWTYWKKYGGLKMPTRLDGERPGPNRSNMSPHGLPARSSGSPKFAMKTRQAFYLHTTKLTRIARRLCREILRPWHAARHPYLPINSAAIKAECTARLPEASQSPLVLKQAVRKPLEAVLRYLETHPRPPKPDPVKSVSSVLSSLTPAKVAPVINNGSPTILGKRSYEQHNGVDGNMKKRLLMPSRGTYLGLANHGQARHMGPSRNLLLNGKSYPTKVRLIRGGSLPPVKRRRMNWIDAPDDVFYMATEETRKIRKLLSSSETKRAARRPYKPIALRQSQALPPRPPPPAPVNDEPIVIED

SEQ ID NO: 13947 - protein, 549 aa, Homo sapiens
MKVTLSALDTSESSFTPLVVIELAQDVKEETKEWLKNRIIAKKKDGVRRLLTSGIVIQVFPLHDSEALKKLEDTWYTRFALKYQPIDSIRGYFGETIALYFGFLEYFTFALIPMAVIGLPYYLFVWEDYDKYVIFASFNLIWSTVILELWKRGCANMTYRWGTLLMKRKFEEPRPGFHGVLGINSITGKEEPLYPSYKRQLRIYLVSLPFVCLCLYFSLYVMMIYFDMEVWALGLHENSGSEWTSVLLYVPSIIYAIVIEIMNRLYRYAAEFLTSWENHRLESAYQNHLILKVLVFNFLNCFASLFYIAFVLKDMKLLRQSLATLLITSQILNQIMESFLPYWLQRKHGVRVKRKVQALKADIDATLYEQVILEKEMGTYLGTFDDYLELFLQFGYVSLFSCVYPLAAAFAVLNNFTEVNSDALKMCRVFKRPFSEPSANIGVWQLAFETMSVISVVTNCALIGMSPQVNAVFPESKADLILIVVAVEHALLALKFILAFAIPDKPRHIQMKLARLEFESLEALKQQQMKLVTENLKEEPMESGKEKAT

SEQ ID NO: 13948 - protein, 190 aa, Homo sapiens
MKDLKKRVALGYISTHTGEAALRGEPRIQTLPVASALSSHRTGPPPISPSKRKFSMEPGDEDLDCDNDHVSKMSRIFNPHLNKTANGDCRRDPRERSRSPIERAVAPTMSLHGSHLYTSLPSLGLEQPLALTKNSLDASRPAGLSPTLTPGERQQNRPSVITCASAGARNCNLSHCPIAHSGCAAPGPAS

SEQ ID NO: 13949 - protein, 305 aa, Homo sapiens
MGILLGLLLLGHLTVDTYGRPILEVPESVTGPWKGDVNLPCTYDPLQGYTQVLVKWLVQRGSDPVTIFLRDSSGDHIQQAKYQGRLHVSHKVPGDVSLQLSTLEMDDRSHYTCEVTWQTPDGNQVVRDKITELRVQKHSSKLLKTKTEAPTTMTYPLKATSTVKQSWDWTTDMDGYLGETSAGPGKSLPVFAIILIISLCCMVVFTMAYIMLCRKTSQQEHVYEAARAHAREANDSGETMRVAIFASGCSSDEPTSQNLGNNYSDEPCIGQEYQIIAQINGNYARLLDTVPLDYEFLATEGKSVC

SEQ ID NO: 13950 - protein, 295 aa, Homo sapiens
MEVMNLMEQPIKVTEWQQTYTYDSGIHSGANTCVPSVSSKGIMEEDEACGRQYTLKKTTTYTQGVPPSQGDLEYQMSTTARAKRVREAMCPGVSGEDSSLLLATQVEGQATNLQRLAEPSQLLKSAIVHLINYQDDAELATRALPELTKLLNDEDPVVVTKAAMIVNQLSKKEASRRALMGSPQLVAAVVRTMQNTSDLDTARCTTSILHNLSHHREGLLAIFKSGGIPALVRMLSSPVESVLFYAITTLHNLLLYQEGAKMAVRLADGLQKMVPLLNKNNPKFLAITTDCLQLL

SEQ ID NO: 13951 - protein, 1086 aa, Homo sapiens
MAAAGQLCLLYLSAGLLSRLGAAFNLDTREDNVIRKYGDPGSLFGFSLAMHWQLQPEDKRLLLVGAPRAEALPLQRANRTGGLYSCDITARGPCTRIEFDNDADPTSESKEDQWMGVTVQSQGPGGKVVTCAHRYEKRQHVNTKQESRDIFGRCYVLSQNLRIEDDMDGGDWSFCDGRLRGHEKFGSCQQGVAATFTKDFHYIVFGAPGTYNWKGLLFLTSVSYTDPDQFVYKTRPPREQPDTFPDVMMNSYLGFSLDSGKGIVSKDEITFVSGAPRANHSGAVVLLKRDMKSAHLLPEHIFDGEGLASSFGYDVAVVDLNKDGWQDIVIGAPQYFDRDGEVGGAVYVYMNQQGRWNNVKPIRLNGTKDSMFGIAVKNIGDINQDGYPDIAVGAPYDDLGKVFIYHGSANGINTKPTQVLKGISPYFGYSIAGNMDLDRNSYPDVAVGSLSDSVTIFRSRPVINIQKTITVTPNRIDLRQKTACGAPSGICLQVKSCFEYTANPAGYNPSISIVGTLEAEKERRKSGLSSRVQFRNQGSEPKYTQELTLKRQKQKVCMEETLWLQDNIRDKLRPIPITASVEIQEPSSRRRVNSLPEVLPILNSDEPKTAHIDVHFLKEGCGDDNVCNSNLKLEYKFCTREGNQDKFSYLPIQKGVPELVLKDQKDIALEITVTNSPSNPRNPTKDGDDAHEAKLIATFPDTLTYSAYRELRAFPEKQLSCVANQNGSQADCELGNPFKRNSNVTFYLVLSTTEVTFDTPDLDINLKLETTSNQDNLAPITAKAKVVIELLLSVSGVAKPSQVYFGGTVVGEQAMKSEDEVGSLIEYEFRVINLGKPLTNLGTATLNIQWPKEISNGKWLLYLVKVESKGLEKVTCEPQKEINSLNLTESHNSRKKREITEKQIDDNRKFSLFAERKYQTLNCSVNVNCVNIRCPLRGLDSKASLILRSRLWNSTFLEEYSKLNYLDILMRAFIDVTAAAENIRLPNAGTQVRVTVFPSKTVAQYSGVPWWIILVAILAGILMLALLVFILWKCGFFKRSRYDDSVPRYHAVRIRKEEREIKDEKYIDNLEKKQWITKWNENESYS

SEQ ID NO: 13952 - protein, 846 aa, Homo sapiens
MEQLVKERKGVQAREKQPAEPPAPLRRRAASDGQYENQSPEATSPRSPGVRSPVQCVSPELALTIALNPGGRPKEPHLHSYKEAFEEMEGTSPSSPPPSGVRSPPGLAKTPLSALGLKPHNPADILLHPTGEPRSYVESVARTAVAGPRAQDSEPKSFSAPATQAYGHEIPLRNGTLGGSFVSPSPLSTSSPILSADSTSVGSFPSGESSDQGPRTPTQPLLESGFRSGSLGQPSPSAQRNYQSSSPLPTVGSSYSSPDYSLQHFSSSPESQARAQFSVAGVHTVPGSPQARHRTVGTNTPPSPGFGWRAINPSMAAPSSPSLSHHQMMGPPGTGFHGSTVSSPQSSAATTPGSPSLCRHPAGVYQVSGLHNKVATTPGSPSLGRHPGAHQGNLASGLHSNAIASPGSPSLGRHLGGSGSVVPGSPCLDRHVAYGGYSTPEDRRPTLSRQSSASGYQAPSTPSFPVSPAYYPGLSSPATSPSPDSAAFRQGSPTPALPEKRRMSVGDRAGSLPNYATINGKVSSPVASGMSSPSGGSTVSFSHTLPDFSKYSMPDNSPETRAKVKFVQDTSKYWYKPEISREQAIALLKDQEPGAFIIRDSHSFRGAYGLAMKVSSPPPTIMQQNKKGDMTHELVRHFLIETGPRGVKLKGCPNEPNFGSLSALVYQHSIIPLALPCKLVIPNRDPTDESKDSSGPANSTADLLKQGAACNVLFVNSVDMESLTGPQAISKATSETLAADPTPAATIVHFKVSAQGITLTDNQRKLFFRRHYPLNTVTFCDLDPQERKWMKTEGGAPAKLFGFVARKQGSTTDNACHLFAELDPNQPASAIVNFVSKVMLNAGQKR

SEQ ID NO: 13953 - protein, 402 aa, Homo sapiens
MDSHLVEKLGQHLLPWMDRLSLEHLNPSIYVGLRLSSLQAGTKEDLYLHSLKLGYQQCLLGSAFSEDDGDCQGKPSMGQLALYLLALRANCEFVRGHKGDRLVSQLKWFLEDEKRAIGHDHKGHPHTSYYQYGLGILALCLHQKRVHDSVVDKLLYAVEPFHQGHHSVDTAAMAGLAFTCLKRSNFNPGRRQRITMAIRTVREEILKAQTPEGHFGNVYSTPLALQFLMTSPMRGAELGTACLKARVALLASLQDGAFQNALMISQLLPVLNHKTYIDLIFPDCLAPRVMLEPAAETIPQTQEIISVTLQVLSLLPPYRQSISVLAGSTVEDVLKKAHELGGFTYETQASLSGPYLTSVMGKAAGEREFWQLLRDPNTPLLQGIADYRPKDGETIELRLVSW

SEQ ID NO: 13954 - protein, 318 aa, Homo sapiens
MGLHLRPYRVGLLPDGLLFLLLLLMLLADPALPAGRHPPVVLGWFTTKHPGPPSFLMVWMYVSLALGRPSHWSSWTPAKAAWVPISTPWWRALWAGATHGVRMSEGLPMTGAEPQRQPQAWKDKYIRAFVSLGAPWGGVAKTLRVLASGDNNRIPVIGPLKIREQQRSAVSTSWLLPYNYTWSPEKVFVQTPTINYTLRDYRKFFQDIGFEDGWLMRQDTEGLVEATMPPGVQLHCLYGTGVPTPDSFYYESFPDRDPKICFGDGDGTVNLKSALQCQAWQSRQEHQVLLQELPGSEHIEMLANATTLAYLKRVLLGP

SEQ ID NO: 13955 - protein, 96 aa, Homo sapiens
MSSVAVLTQESFAEHRSGLVPQQIKVATLNSEEESDPPTYKDAFPPLPEKAACLESAQEPAGAWGNKIRPIKASVITQVFHVPLEERKYKDMNQFG

SEQ ID NO: 13956 - protein, 608 aa, Homo sapiens
MASLSRALRVAAAHPRQSPTRGMGPCNLSSAAGPTAEKSVPYQRTLKEGQGTSVVAQGPSRPLPSTANVVVIGGGSLGCQTLYHLAKLGMSGAVLLERERLTSGTTWHTAGLLWQLRPSDVEVELLAHTRRVVSRELEEETGLHTGWIQNGGLFIASNRQRLDEYKRLMSLGKAYGVESHVLSPAETKTLYPLMNVDDLYGTLYVPHDGTMDPAGTCTTLARAASARGAQVIENCPVTGIRVWTDDFGVRRVAGVETQHGSIQTPCVVNCAGVWASAVGRMAGVKVPLVAMHHAYVVTERIEGIQNMPNVRDHDASVYLRLQGDALSVGGYEANPIFWEEVSDKFAFGLFDLDWEVFTQHIEGAINRVPVLEKTGIKSTVCGPESFTPDHKPLMGEAPELRGFFLGCGFNSAGMMLGGGCGQELAHWIIHGRPEKDMHGYDIRRFHHSLTDHPRWIRERSHESYAKNYSVVFPHDEPLAGRNMRRDPLHEELLGQGCVFQERHGWERPGWFHPRGPAPVLEYDYYGAYGSRAHEDYAYRRLLADEYTFAFPPHHDTIKKECLACRGAAAVFDMSYFGKFYLVGLDARKAADWLFSADVSRPPGSTVYT

SEQ ID NO: 13957 - protein, 434 aa, Homo sapiens
MLLLVTSLLLCELPHPAFLLIPEKSDLRTVAPASSLNVRFDSRTMNLSWDCQENTTFSKCFLTDKKNRVVEPRLSNNECSCTFREICLHEGVTFEVHVNTSQRGFQQKLLYPNSGREGTAAQNFSCFIYNADLMNCTWARGPTAPRDVQYFLYIRNSKRRREIRCPYYIQDSGTHVGCHLDNLSGLTSRNYFLVNGTSREIGIQFFDSLLDTKKIERFNPPSNVTVRCNTTHCLVRWKQPRTYQKLSYLDFQYQLDVHRKNTQPGTENLLINVSGDLENRYNFPSSEPRAKHSVKIRAADVRILNWSSWSEAIEFGSHSVTQAGVQWHNLGSLQPPSPRLKRFSCLRLPGSDDGNLGSVYIYVLLIVGTLVCGIVLGFLFKRFLRIQRLFPPVPQIKDKLNDNHEVEDEIIWEEFTPEEGKGYREEVLTVKEIT

SEQ ID NO: 13958 - protein, 165 aa, Homo sapiens
PRRFEFCAAGVRWFSELCPRLPRAGARERVRGFLTQTRVRSAQSPEMESSSSDYYNKDNEEESLLANVASLRHELKITEWSLQSLGEELSSVSPSENSDYAPNPSRSEKLILDVQPSHPGLLNYSPYENVCKISGSSTDFQKKPRDKMFSSSAPVDQEIKSLREK

SEQ ID NO: 13959 - protein, 610 aa, Homo sapiens
MQYLNTFYGCPKESCNLFVLKDTLKKMQKFFGLPQTGDLDQNTIETMRKPRCGNPDVANYNFFPRKPKWDKNQITYRIIGYTPDLDPETVDDAFARAFQVWSDVTPLRFSRIHDGEADIMINFGRWEHGDGYPFDGKDGLLAHAFAPGTGVGGDSHFDDDELWTLGEGQVVRVKYGNADGEYCKFPFLFNGKEYNSCTDTGRSDGFLWCSTTYNFEKDGKYGFCPHEALFTMGGNAEGQPCKFPFRFQGTSYDSCTTEGRTDGYRWCGTTEDYDRDKKYGFCPETAMSTVGGNSEGAPCVFPFTFLGNKYESCTSAGRSDGKMWCATTANYDDDRKWGFCPDQGYSLFLVAAHEFGHAMGLEHSQDPGALMAPIYTYTKNFRLSQDDIKGIQELYGASPDIDLGTGPTPTLGPVTPEICKQDIVFDGIAQIRGEIFFFKDRFIWRTVTPRDKPMGPLLVATFWPELPEKIDAVYEAPQEEKAVFFAGNEYWIYSASTLERGYPKPLTSLGLPPDVQRVDAAFNWSKNKKTYIFAGDKFWRYNEVKKKMDPGFPKLIADAWNAIPDNLDAVVDLQGGGHSYFFKGAYYLKLENQSLKSVKFGSIKSDWLGC

SEQ ID NO: 13960 - protein, 655 aa, Homo sapiens
MSYGEIEGKFLGPREEVTSEPRCKKLKSTTESYVFHNHSNADFHRIQEKTGNDWVPVTIIDVRGHSYLQENKIKTTDLHRPLHDEMPGNRPDVIESIDSQVLQEARPPLVSADDEIYSTSKAFIGPIYKPPEKKKRNEGRNEAHVLNGINDRGGQKEKQKFNSEKSEIDNELFQFYKEIEELEKEKDGFENSCKESEPSQEQFVPFYEGHNNGLLKPDEEKKDLSNKAMPSHCDYQQNLGNEPDKYPCNGQVIPTFCDTSFTSFRPEWQSVYPFIVPYGPPLPSLNYHLNIQRFSGPPNPPSNIFQAQDDSQIQNGYYVNNCHVNWNCMTFDQNNEYTDCSENRSSVHPSGNGCSMQDRYVSNGFCEVRERCWKDHCMDKHNGTDRFVNQQFQEEKLNKLQKLLILLRGLPGSGKTTLSRILLGQNRDGIVFSTDDYFHHQDGYRYNVNQLGDAHDWNQNRAKQAIDQGRSPVIIDNTNIQAWEMKPYVEVAIGKGYRVEFHEPETWWKFDPEELEKRNKHGVSRKKIAQMLDRYEYQMSISIVMNSVEPSHKSTQRPPPPQGRQRFDRKLKRWEEPKELPAEDSQDLTSTDYRSLELPLSQGFAFQLVKLFGSPGVPMESLLPDDYVVPLDWKTLKMIYLQWKMSVEKRQKKIG

SEQ ID NO: 13961 - protein, 162 aa, Homo sapiens
MCGIWALFGSDDCLSVQCLSAMKIAHRGPDAFRFENVNGYTNCCFGFHRLAVVDPLFGMQPIRVKKYPYLWLCYNGEIYNHKKMQQHFEFEYQTKVDGEIILHLYDKGGIEQTICMLDGVFAFVLLDTANKKVFLGRDTYGVRPLFKAMTEDGFLAVCSEAK

SEQ ID NO: 13962 - protein, 495 aa, Homo sapiens
MAKRPGPPGSREMGLLTFRDIAIEFSLAEWQCLDHAQQNLYRDVMLENYRNLVSLGIAVSKPDLITCLEQNKEPQNIKRNEMVAKHPVTCSHFTQDLQSEQGIKDSLQKVILRRYGKCGQEDLQVKKCCKSVGECEVHKGGYNYVNQCLSATQNKTFQTHKCVKVFGKFSNSNRHKTRHTGKKHFKCKNDGKSFCMLSRLNQHQIIHTREKSYKCEECGKSFNCSSTLTRHKRIHTGEKPYRCEECGKAFSWSASLTKHKRIHTGEKPYTCEERGKVFSRSTLTNYKRIHTGEKPYTCEECGKAFSRSSTLTNHKRIHTGERPYKCEECGKAFSLSSTLKKHKIVHTGEKLYTCEECGKAFTFSSTLNTHKRIHTGEKPYTCEECGKAFSLPSTFTYHKRTHTGEKPYKCEECGKAFNCSSTLKKHKIIHTGEKLYKCKECGKAFTFSSTLNTHKRIHTGEKPYKCEECDQTFKWHSSLANHKNMHTGEKPYKYE

SEQ ID NO: 13963 - protein, 1095 aa, Homo sapiens
MEADGAGEQMRPLLTRGPDEEAVVDLGKTSSTVNTKFEKEELESHRAVYIGVHVPFSKESRRRHRHRGHKHHHRRRKDKESDKEDGRESPSYDTPSQRVQFILGTEDDDEEHIPHDLFTEMDELCYRDGEEYEWKETARWLKFEEDVEDGGDRWSKPYVATLSLHSLFELRSCILNGTVMLDMRASTLDEIADMVLDNMIASGQLDESIRENVREALLKRHHHQNEKRFTSRIPLVRSFADIGKKHSDPHLLERNGILASPQSAPGNLDNSKSGEIKGNGSGGSRENSTVDFSKVDMNFMRKIPTGAEASNVLVGEVDFLERPIIAFVRLAPAVLLTGLTEVPVPTRFLFLLLGPAGKAPQYHEIGRSIATLMTDEIFHDVAYKAKDRNDLLSGIDEFLDQVTVLPPGEWDPSIRIEPPKSVPSQEKRKIPVFHNGSTPTLGETPKEAAHHAGPELQRTGRLFGGLILDIKRKAPFFLSDFKDALSLQCLASILFLYCACMSPVITFGGLLGEATEGRISAIESLFGASLTGIAYSLFAGQPLTILGSTGPVLVFEKILYKFCRDYQLSYLSLRTSIGLWTSFLCIVLVATDASSLVCYITRFTEEAFAALICIIFIYEALEKLFDLGETYAFNMHNNLDKLTSYSCVCTEPPNPSNETLAQWKKDNITAHNISWRNLTVSECKKLRGVFLGSACGHHGPYIPDVLFWCVILFFTTFFLSSFLKQFKTKRYFPTKVRSTISDFAVFLTIVIMVTIDYLVGVPSPKLHVPEKFEPTHPERGWIISPLGDNPWWTLLIAAIPALLCTILIFMDQQITAVIINRKEHKLKKGAGYHLDLLMVGVMLGVCSVMGLPWFVAATVLSISHVNSLKVESECSAPGEQPKFLGIREQRVTGLMIFILMGLSVFMTSVLKFIPMPVLYGVFLYMGVSSLKGIQLFDRIKLFGMPAKHQPDLIYLRYVPLWKVHIFTVIQLTCLVLLWVIKVSAAAVVFPMMVLALVFVRKLMDLCFTKRELSWLDDLMPESKKKKEDDKKKKEKEEAERMLQDDDDTVHLPFEGGSLLQIPVKALKYSPDKPVSVKISFEDEPRKKYVDAETSL

SEQ ID NO: 13964 - protein, 1586 aa, Homo sapiens
MSKRRMSVGQQTWALLCKNCLKKWRMKRQTLLEWLFSFLLVLFLYLFFSNLHQVHDTPQMSSMDLGRVDSFNDTNYVIAFAPESKTTQEIMNKVASAPFLKGRTIMGWPDEKSMDELDLNYSIDAVRVIFTDTFSYHLKFSWGHRIPMMKEHRDHSAHCQAVNEKMKCEGSEFWEKGFVAFQAAINAAIIEIATNHSVMEQLMSVTGVHMKILPFVAQGGVATDFFIFFCIISFSTFIYYVSVNVTQERQYITSLMTMMGLRESAFWLSWGLMYAGFILIMATLMALIVKSAQIVVLTGFVMVFTLFLLYGLSLITLAFLMSVLIKKPFLTGLVVFLLIVFWGILGFPALYTRLPAFLEWTLCLLSPFAFTVGMAQLIHLDYDVNSNAHLDSSQNPYLIIATLFMLVFDTLLYLVLTLYFDKILPAEYGHRCSPLFFLKSCFWFQHGRANHVVLENETDSDPTPNDCFEPVSPEFCGKEAIRIKNLKKEYAGKCERVEALKGVVFDIYEGQITALLGHSGAGKTTLLNILSGLSVPTSGSVTVYNHTLSRMADIENISKFTGFCPQSNVQFGFLTVKENLRLFAKIKGILPHEVEKEVQRVVQELEMENIQDILAQNLSGGQNRKLTFGIAILGDPQVLLLDEPTAGLDPLSRHRIWNLLKEGKSDRVILFSTQFIDEADILADRKVFISNGKLKCAGSSLFLKKKWGIGYHLSLHLNERCDPESITSLVKQHISDAKLTAQSEEKLVYILPLERTNKFPELYRDLDRCSNQGIEDYGVSITTLNEVFLKLEGKSTIDESDIGIWGQLQTDGAKDIGSLVELEQVLSSFHETRKTISGVALWRQQVCAIAKVRFLKLKKERKSLWTILLLFGISFIPQLLEHLFYESYQKSYPWELSPNTYFLSPGQQPQDPLTHLLVINKTGSTIDNFLHSLRRQNIAIEVDAFGTRNGTDDPSYNGAIIVSGDEKDHRFSIACNTKRLNCFPVLLDVISNGLLGIFNSSEHIQTDRSTFFEEHMDYEYGYRSNTFFWIPMAASFTPYIAMSSIGDYKKKAHSQLRISGLYPSAYWFGQALVDVSLYFLILLLMQIMDYIFSPEEIIFIIQNLLIQVVIFSIVATDLNEYGFLGLFFGTMLIPPFTLIGSLFIFSEISPDSMDYLGASESEIVYLALLIPYLHFLIFLFILRCLEMNCRKKLMRKDPVFRISPRSNAIFPNPEEPEGEEEDIQMERMRTVNAMAVRDFDETPVIIASCLRKEYAGKKKNCFSKRKKKIATRNVSFCVKKGEVIGLLGHNGAGKSTTIKMITGDTKPTAGQVILKGSGGGEPLGFLGYCPQENALWPNLTVRQHLEVYAAVKGLRKGDAMIAITRLVDALKLQDQLKAPVKTLSEGIKRKLCFVLSILGNPSVVLLDEPSTGMDPEGQQQMWQVIRATFRNTERGALLTTHYMAEAEAVCDRVAIMVSGRLRCIGSIQHLKSKFGKDYLLEMKLKNLAQMEPLHAEILRLFPQAAQQERFSSLMVYKLPVEDVRPLSQAFFKLEIVKQSFDLEEYSLSQSTLEQVFLELSKEQELGDLEEDFDPSVKWKLLLQEEP

SEQ ID NO: 13965 - protein, 274 aa, Homo sapiens
MFSEELWLENEKKCAVVRKSKQGRKRQELLAVAFGVKVGVKGGFLWPPLKLFACSQISSLVRRAALTHNDNHFNYEKTHNFKVHTFRGPHWCEYCANFMWGLIAQGVRCSGLKSEGLYRVSGFTEHIEDVKMAFDRDGEKADISANVYPDINIITGALKLYFRDLPIPVITYDTYSKFIDAAKISNADERLEAVHEVLMLLPPAHYETLRYLMIHLKKVTMNEKDNFMNAENLGIVFGPTLMRPPEDSTLTTLHDMRYQKLIVQILIENEDVLF

SEQ ID NO: 13966 - protein, 411 aa, Homo sapiens
MERKERLSKFESIRHSIAGIIRSPKSALGSSALSDMISISEKPLAEQDWYHGAIPRIEAQELLKKQGDFLVRESHGKPGEYVLSVYSDGQRRHFIIQYVDNMYRFEGTGFSNIPQLIDHHYTTKQVITKKSGVVLLNPIPKDKKWILSHEDVILGELLGKGNFGEVYKGTLKDKTSVAVKTCKEDLPQELKIKFLQEAKILKQYDHPNIVKLIGVCTQRQPVYIIMELVSGGDFLTFLRRKKDELKLKQLVKFSLDAAAGMLYLESKNCIHRDLAARNCLVGENNVLKISDFGMSRQEDGGVYSSSGLKQIPIKWTAPEALNYGRYSSESDVWSFGILLWETFSLGVCPYPGMTNQQAREQVERGYRMSAPQHCPEDISKIMMKCWDYKPENRPKFSELQKELTIIKRKLT

SEQ ID NO: 13967 - protein, 1052 aa, Homo sapiens
MKSEDYPHETMAPDIHEERQYRCEDCDQLFESKAELADHQKFPCSTPHSAFSMVEEDFQQKLESENDLQEIHTIQECKECDQVFPDLQSLEKHMLSHTEEREYKCDQCPKAFNWKSNLIRHQMSHDSGKHYECENCAKQVFTDPSNLQRHIRSQHVGARAHACPECGKTFATSSGLKQHKHIHSSVKPFICEVCHKSYTQFSNLCRHKRMHADCRTQIKCKDCGQMFSTTSSLNKHRRFCEGKNHFAAGGFFGQGISLPGTPAMDKTSMVNMSHANPGLADYFGANRHPAGLTFPTAPGFSFSFPGLFPSGLYHRPPLIPASSPVKGLSSTEQTNKSQSPLMTHPQILPATQDILKALSKHPSVGDNKPVELQPERSSEERPFEKISDQSESSDLDDVSTPSGSDLETTSGSDLESDIESDKEKFKENGKMFKDKVSPLQNLASINNKKEYSNHSIFSPSLEEQTAVSGAVNDSIKAIASIAEKYFGSTGLVGLQDKKVGALPYPSMFPLPFFPAFSQSMYPFPDRDLRSLPLKMEPQSPGEVKKLQKGSSESPFDLTTKRKDEKPLTPVPSKPPVTPATSQDQPLDLSMGSRSRASGTKLTEPRKNHVFGGKKGSNVESRPASDGSLQHARPTPFFMDPIYRVEKRKLTDPLEALKEKYLRPSPGFLFHPQFQLPDQRTWMSAIENMAEKLESFSALKPEASELLQSVPSMFNFRAPPNALPENLLRKGKERYTCRYCGKIFPRSANLTRHLRTHTGEQPYRCKYCDRSFSISSNLQRHVRNIHNKEKPFKCHLCDRCFGQQTNLDRHLKKHENGNMSGTATSSPHSELESTGAILDDKEDAYFTEIRNFIGNSNHGSQSPRNVEERMNGSHFKDEKALVTSQNSDLLDDEEVEDEVLLDEEDEDNDITGKTGKEPVTSNLHEGNPEDDYEETSALEMSCKTSPVRYKEEEYKSGLSALDHIRHFTDSLKMRKMEDNQYSEAELSSFSTSHVPEELKQPLHRKSKSQAYAMMLSLSDKESLHSTSHSSSNVWHSMARAAAESSAIQSISHV

SEQ ID NO: 13968 - protein, 948 aa, Homo sapiens
MILVLVKALSDVCAGTSGFLLDFSSQTSPGTDNGEALPESIPSAPGTLPHFIEEPDDAYIIKSNPIALRCKARPAMQIFFKCNGEWVHQNEHVSEETLDESSGLKVREVFINVTRQQVEDFHGPEDYWCQCVAWSHLGTSKSRKASVRIAYLRKNFEQDPQGREVPIEGMIVLHCRPPEGVPAAEVEWLKNEEPIDSEQDENIDTRADHNLIIRQARLSDSGNYTCMAANIVAKRRSLSATVVVYVNGGWSSWTEWSACNVRCGRGWQKRSRTCTNPAPLNGGAFCEGMSVQKITCTSLCPVDGSWEVWSEWSVCSPECEHLRIRECTAPPPRNGGKFCEGLSQESENCTDGLCILDKKPLHEIKPQSIENASDIALYSGLGAAVVAVAVLVIGVTLYRRSQSDYGVDVIDSSALTGGFQTFNFKTVRQGNSLLLNSAMQPDLTVSRTYSGPICLQDPLDKELMTESSLFNPLSDIKVKVQSSFMVSLGVSERAEYHGKNHSRTFPHGNNHSFSTMHPRNKMPYIQNLSSLPTRTELRTTGVFGHLGGRLVMPNTGVSLLIPHGAIPEENSWEIYMSINQGEPSLQSDGSEVLLSPEVTCGPPDMIVTTPFALTIPHCADVSSEHWNIHLKKRTQQGKWEEVMSVEDESTSCYCLLDPFACHVLLDSFGTYALTGEPITDCAVKQLKVAVFGCMSCNSLDYNLRVYCVDNTPCAFQEVVSDERHQGGQLLEEPKLLHFKGNTFSLQISVLDIPPFLWRIKPFTACQEVPFSRVWCSNRQPLHCAFSLERYTPTTTQLSCKICIRQLKGHEQILQVQTSILESERETITFFAQEDSTFPAQTGPKAFKIPYSIRQRICATFDTPNAKGKDWQMLAQKNSINRNLSYFATQSSPSAVILNLWEARHQHDGDLDSLACALEEIGRTHTKLSNISESQLDEADFNYSRQNGL

SEQ ID NO: 13969 - protein, 640 aa, Homo sapiens
MLSSRWWPSSWGILGLGPRSPPRGSQLCALYAFTYTGADGQQVSLAEGDRFLLLRKTNSDWWLARRLEAPSTSRPIFVPAAYMIEESIPSQSPTTVIPGQLLWTPGPKLFHGSLEELSQALPSRAQASSEQPPPLPRKMCRSVSTDNLSPSLLKPFQEGPSGRSLSQEDLPSEASASTAGPQPLMSEPPVYCNLVDLRRCPRSPPPGPACPLLQRLDAWEQHLDPNSGRCFYINSLTGCKSWKPPRRSRSETNPGSMEGTQTLKRNNDVLQPQAKGFRSDTGTPEPLDPQGSLSLSQRTSQLDPPALQAPRPLPQLLDDPHEVEKSGLLNMTKIAQGGRKLRKNWGPSWVVLTGNSLVFYREPPPTAPSSGWGPAGSRPESSVDLRGAALAHGRHLSSRRNVLHIRTIPGHEFLLQSDHETELRAWHRALRTVIERLDRENPLELRLSGSGPAELSAGEDEEEESELVSKPLLRLSSRRSSIRGPEGTEQNRVRNKLKRLIAKRPPLQSLQERGLLRDQVFGCQLESLCQREGDTVPSFLRLCIAAVDKRGLDVDGIYRVSGNLAVVQKLRFLVDRERAVTSDGRYVFPEQPGQEGRLDLDSTEWDDIHVVTGALKLFLRELPQPLVPPLLLPHFRAALG

SEQ ID NO: 13970 - protein, 451 aa, Homo sapiens
MYGAPGAPAQSASVTVVRSLRRPPPQATGVSFMNNQKQQKPTLSGQRFKTRKRDEKERFDPTQFQDCIIQGLTETGTDLEAVAKFLDASGAKLDYRRYAETLFDILVAGGMLAPGGTLADDMMRTDVCVFAAQEDLETMQAFAQVFNKLIRRYKYLEKGFEDEVKKLLLFLKGFSESERNKLAMLTGVLLANGTLNASILNSLYNENLVKEGVSAAFAVKLFKSWINEKDINAVAASLRKVSMDNRLMELFPANKQSVEHFTKYFTEAGLKELSEYVRNQQTIGARKELQKELQEQMSRGDPFKDIILYVKEEMKKNNIPEPVVIGIVWSSVMSTVEWNKKEELVAEQAIKHLKQYSPLLAAFTTQGQSELTLLLKIQEYCYDNIHFMKAFQKIVVLFYKAEVLSEEPILKWYKDAHVAKGKSVFLEQMKKFVEWLKNAEEESESEAEEGD

SEQ ID NO: 13971 - protein, 177 aa, Homo sapiens
MAGPVKDREAFQRLNFLYQVSLRQGPHGDGARRPRVTAPLPQAAHCVLAQDPENQALARFYCYTERTIAKRLVLRRDPSVKRTLCRGCSSLLVPGLTCTQRQRRCRGQRWTVQTCLTCQRSQRFLNDPGHLLWGDRPEAQLGSQADSKPLQPLPNTAHSISDRLPEEKMQTQGSSNQ

SEQ ID NO: 13972 - protein, 218 aa, Homo sapiens
MFLSTSKHGRQEAMLLFLLSALVLLTQPLGYLEAEMKTYSHRTMPSACTLVMCSSVESGLPGRDGRDGREGPRGEKGDPGLPGAAGQAGMPGQAGPVGPKGDNGSVGEPGPKGDTGPSGPPGPPGVPGPAGREGPLGKQGNIGPQGKPGPKGEAGPKGEVGAPGMQGSAGARGLAGPKGERGVPGERGVPGNTGAAGSAGAMGPQGSPGARGPPGLKG

SEQ ID NO: 13973 - protein, 866 aa, Homo sapiens
MATGTGKHKLLSTGPTEPWSIREKLCLASSVMRSGDQNWVSVSRAIKPFAEPGRPPDWFSQKHCASQYSELLETTETPKRKRGEKGEVVETVEDVIVRKLTAERVEELKKVIKETQERYRRLKRDAELIQAGHMDSRLDELCNDIATKKKLEEEEAEVKRKATDAAYQARQAVKTPPRRLPTVMVRSPIDSASPGGDYPLGDLTPTTMEEATSGVTPGTLPSTPVTSFPGIPDTLPPGSAPLEAPMTPVTDDSPQKKMLGQKATPPPSPLLSELLKKGSLLPTSPRLVNESEMAVASGHLNSTGVLLEVGGVLPMIHGGEIQQTPNTVAASPAASVSQPDNCVPMEAVGDPHTVTVSMDSSEISMIINSIKEECFRSGVAEAPVGSKAPSIDGKEELDLAEKMDIAVSYTGEELDFETVGDIIAIIEDKVDDHPEVLDVAAVEAALSFCEENDDPQSLPGPWEHPIQQERDKPVPLPAPEMTVKQERLDFEETENKGIHELVDIREPSAEIKVEPAEPEPVISGAEIVAGVVPATSMEPPELRSQDLDEELGSTAAGEIVEADVAIGKGDETPLTNVKTEASPESMLSPSHGSNPIEDPLEAETQHKFEMSDSLKEESGTIFGSQIKDAPGEDEEEDGVSEAASLEEPKEEDQGEGYLSEMDNEPPVSESDDGFSIHNATLQSHTLADSIPSSPASSQFSVCSEDQEAIQAQKIWKKAIMLVWRAAANHRYANVFLQPVTDDIAPGYHSIVQRPMDLSTIKKNIENGLIRSTAEFQRDIMLMFQNAVMYNSSDHDVYHMAVEMQRDVLEQIQQFLATQLIMQTSESGISAKSLRGRDSTRKQDASEKDGGTRGRRCAIEADMKMKK

SEQ ID NO: 13974 - protein, 676 aa, Homo sapiens
MNFETSRCATLQYCPDPYIQRFVETPAHFSWKESYYRSTMSQSTQTNEFLSPEVFQHIWDFLEQPICSVQPIDLNFVDEPSEDGATNKIEISMDCIRMQDSDLSDPMWPQYTNLGLLNSMDQQIQNGSSSTSPYNTDHAQNSVTAPSPYAQPSSTFDALSPSPAIPSNTDYPGPHSFDVSFQQSSTAKSATWTYSTELKKLYCQIAKTCPIQIKVMTPPPQGAVIRAMPVYKKAEHVTEVVKRCPNHELSREFNEGQIAPPSHLIRVEGNSHAQYVEDPITGRQSVLVPYEPPQVGTEFTTVLYNFMCNSSCVGGMNRRPILIIVTLETRDGQVLGRRCFEARICACPGRDRKADEDSIRKQQVSDSTKNGDAFRQNTHGIQMTSIKKRRSPDDELLYLPVRGRETYEMLLKIKESLELMQYLPQHTIETYRQQQQQQHQHLLQKQTSIQSPSSYGNSSPPLNKMNSMNKLPSVSQLINPQQRNALTPTTIPDGMGANIPMMGTHMPMAGDMNGLSPTQALPPPLSMPSTSHCTPPPPYPTDCSIVSFLARLGCSSCLDYFTTQGLTTIYQIEHYSMDDLASLKIPEQFRHAIWKGILDHRQLHEFSSPSHLLRTPSSASTVSVGSSETRGERVIDAVRFTLRQTISFPPRDEWNDFNFDMDARRNKQQRIKEEGE

SEQ ID NO: 13975 - protein, 580 aa, Homo sapiens
MFVPRSLKIKRNANDDGKSCVAKIIKPDPEDLQLDKSRDVPVDAVATEAATIDRHISESCPFPSPGGQLAEVHSVSPEQGAKDSHPSEEPVKSFSKTQRWAEPGEPICVVCGRYGEYICDKTDEDVCSLECKAKHLLQVKEKEEKSKLSNPQKADSEPESPLNASYVYKEHPFILNLQEDQIENLKQQLGILVQGQEVTRPIIDFEHCSLPEVLNHNLKKSGYEVPTPIQMQMIPVGLLGRDILASADTGSGKTAAFLLPVIMRALFESKTPSALILTPTRELAIQIERQAKELMSGLPRMKTVLLVGGLPLPPQLYRLQQHVKVIIATPGRLLDIIKQSSVELCGVKIVVVDEADTMLKMGFQQQVLDILENIPNDCQTILVSATIPTSIEQLASQLLHNPVRIITGEKNLPCANVRQIILWVEDPAKKKKLFEILNDKKLFKPPVLVFVDCKLGADLLSEAVQKITGLKSISIHSEKSQIERKNILKGLLEGDYEVVVSTGVLGRGLDLISVRLVVNFDMPSSMDEYVHQENTYKSTWRNPQHFQQDVRMTLGYVGKAQWEEDNQLKVKLGLKKNCSS

SEQ ID NO: 13976 - protein, 721 aa, Homo sapiens
MASKGAGMSFSRKSYRLTSDAEKSRVTGIVQEKLLNDYLNRIFSSSEHAPPAATSRKPLNFQNLPEHLDQLLQVDNEEEESQGQVEGRLGPSTVVLDHTGGFEGLLLVDDDLLGVIGHSNFGTIRSTTCVYKGKWLYEVLISSQGLMQIGWCTISCRFNQEEGVGDTHNSYAYDGNRVRKWNVTTTNYGKAWAAGDIVSCLIDLDDGTLSFCLNGVSLGTAFENLSRGLGMAYFPAISLSFKESVAFNFGSRPLRYPVAGYRPLQDPPSADLVRAQRLLGCFRAVLSVELDPVEGRLLDKESSKWRLRGQPTVLLTLAHIFHHFAPLLRKVYLVEAVLMSFLLGIVEKGTPTQAQSVVHQVLDLLWLFMEDYEVQDCLKQLMMSLLRLYRFSPIVPDLGLQIHYLRLTIAILRHEKSRKFLLSNVLFDVLRSVVFFYIKSPLRVEEAGLQELIPTTWWPHCSSREGKESTEMKEETAEERLRRRAYERGCQRLRKRIEVVEELQVQILKLLLDNKDDNGGEASRYIFLTKFRKFLQENASGRGNMPMLCPPEYMVCFLHRLISALRYYWDEYKASNPHASFSEEAYIPPQVFYNGKVDYFDLQRLGGLLSHLRKTLKDDLASKANIVIDPLELQSTAMDDLDEDEEPAPAMAQRPMQALAVGGPLPLPRPGWLSSPTLGRANRFLSTAAVSLMTPRRPLSTSEKVKVRTLSVEQRTREDSS

SEQ ID NO: 13977 - protein, 372 aa, Homo sapiens
MDSVVFEDVDVNFTQEEWALLDPSQKNLYRDVMQETFRNLASVGKKWKDQKIEDEYKNPRRNLRGLMGERLLESKKDHQHGEILTQVPDDMLKKKTPRVKSCGEVSVGHASLNRHHRADTGHKPYEYQEYGQKPYKCTYCKKAFSDLPYFRTHEWAHTGGKPYDCEECGKSFISRSSIRRHRIMHSGDGPYKCNFCGKALMCLSLYLIHKRTHTGEKPYECKQCGKAFSHSGSLRIHERTHTGEKPYECSECGKAFHSSTCLHAHKITHTGEKPYECKQCGKAFVSFNSVRYHERTHTGEKPYECKQCGKAFRSASHLRTHGRTHTGEKPYECKQCGKAFGCASSVKIHERTHTGEKPCSSNTSKGQGEKIA

SEQ ID NO: 13978 - protein, 522 aa, Homo sapiens
MAAVAVAVREDSGSGMKAELPPGPGAVGREMTKEEKLQLRKEKKQQKKKRKEEKGAEPETGSAVSAAQCQGPTRELPESGIQLGTPREKVPAGRSKAELRAERRAKQEAERALKQARKGEQGGPPPKASPSTAGETPSGVKRLPEYPQVDDLLLRRLVKKPERQQVPTRKDYGSKVSLFSHLPQYSRQNSLTQFMSIPSSVIHPAMVRLGLQYSQGLVSGSNARCIALLRALQQVIQDYTTPPNEELSRDLVNKLKPYMSFLTQCRPLSASMHNAIKFLNKEITSVGSSKREEEAKSELRAAIDRYVQEKIVLAAQAISRFAYQKISNGDVILVYGCSSLVSRILQEAWTEGRRFRVVVVDSRPWLEGRHTLRSLVHAGVPASYLLIPAASYVLPEVSKVLLGAHALLANGSVMSRVGTAQLALVARAHNVPVLVCCETYKFCERVQTDAFVSNELDDPDDLQCKRGEHVALANWQNHASLRLLNLVYDVTPPELVDLVITELGMIPCSSVPVVLRVKSSDQ

SEQ ID NO: 13979 - protein, 339 aa, Homo sapiens
MEKTCIDALPLTMNSSEKQETVCIFGTGDFGRSLGLKMLQCGYSVVFGSRNPQKTTLLPSGAEVLSYSEAAKKSGIIIIAIHREHYDFLTELTEVLNGKILVDISNNLKINQYPESNAEYLAHLVPGAHVVKAFNTISAWALQSGALDASRQVFVCGNDSKAKQRVMDIVRNLGLTPMDQGSLMAAKEIEKYPLQLFPMWRFPFYLSAVLCVFLFFYCVIRDVIYPYVYEKKDNTFRMAISIPNRIFPITALTLLALVYLPGVIAAILQLYRGTKYRRFPDWLDHWMLCRKQLGLVALGFAFLHVLYTLVIPIRYYVRWRLGNLTVTQVNLFLYIFFCS

SEQ ID NO: 13980 - protein, 1226 aa, Homo sapiens
MWGSDRLAGAGGGGAAVTVAFTNARDCFLHLPRRLVAQLHLLQNQAIEVVWSHQPAFLSWVEGRHFSDQGENVAEINRQVGQKLGLSNGGQVFLKPCSHVVSCQQVEVEPLSADDWEILELHAVSLEQHLLDQIRIVFPKAIFPVWVDQQTYIFIQIVALIPAASYGRLETDTKLLIQPKTRRAKENTFSKADAEYKKLHSYGRDQKGMMKELQTKQLQSNTVGITESNENESEIPVDSSSVASLWTMIGSIFSFQSEKKQETSWGLTEINAFKNMQSKVVPLDNIFRVCKSQPPSIYNASATSVFHKHCAIHVFPWDQEYFDVEPSFTVTYGKLVKLLSPKQQQSKTKQNVLSPEKEKQMSEPLDQKKIRSDHNEEDEKACVLQVVWNGLEELNNAIKYTKNVEVLHLGKVWIPDDLRKRLNIEMHAVVRITPVEVTPKIPRSLKLQPRENLPKDISEEDIKTVFYSWLQQSTTTMLPLVISEEEFIKLETKDGLKEFSLSIVHSWEKEKDKNIFLLSPNLLQKTTIQVLLDPMVKEENSEEIDFILPFLKLSSLGGVNSLGVSSLEHITHSLLGRPLSRQLMSLVAGLRNGALLLTGGKGSGKSTLAKAICKEAFDKLDAHVERVDCKALRALNDMIKEFISMGSLVALIATSQSQQSLHPLLVSAQGVHIFQCVQHIQPPNQEQRCEILCNVIKNKLDCDINKFTDLDLQHVAKETGGFVARDFTVLVDRAIHSRLSRQSISTREKLVLTTLDFQKALRGFLPASLRSVNLHKPRDLGWDKIGGLHEVRQILMDTIQLPAKYPELFANLPIRQRTGILLYGPPGTGKTLLAGVIARESRMNFISVKGPELLSKYIGASEQAVRDIFIRAQAAKPCILFFDEFESIAPRRGHDNTGVTDRVVNQLLTQLDGVEGLQGVYVLAATSRPDLIDPALLRPGRLDKCVYCPPPDQVSRLEILNVLSDSLPLADDVDLQHVASVTDSFTGADLKALLYNAQLEALHGMLLSSGLQDGSSSSDSDLSLSSMVFLNHSSGSDDSAGDGECGLDQSLVSLEMSEILPDESKFNMYRLYFGSSYESELGNGTSSDLSSQCLSAPSSMTQDLPGVPGKDQLFSQPPVLRTASQEGCQELTQEQRDQLRADISIIKGRYRSQSGEDESMNQPGPIKTRLAISQSHLMTALGHTRPSISEDDWKNFAELYESFQNPKRRKNQSGTMFRPGQKVTLA

SEQ ID NO: 13981 - protein, 2240 aa, Homo sapiens
MLRGPGPGLLLLAVQCLGTAVPSTGASKSKRQAQQMVQPQSPVAVSQSKPGCYDNGKHYQINQQWERTYLGNALVCTCYGGSRGFNCESKPEAEETCFDKYTGNTYRVGDTYERPKDSMIWDCTCIGAGRGRISCTIANRCHEGGQSYKIGDTWRRPHETGGYMLECVCLGNGKGEWTCKPIAEKCFDHAAGTSYVVGETWEKPYQGWMMVDCTCLGEGSGRITCTSRNRCNDQDTRTSYRIGDTWSKKDNRGNLLQCICTGNGRGEWKCERHTSVQTTSSGSGPFTDVRAAVYQPQPHPQPPPYGHCVTDSGVVYSVGMQWLKTQGNKQMLCTCLGNGVSCQETAVTQTYGGNSNGEPCVLPFTYNGRTFYSCTTEGRQDGHLWCSTTSNYEQDQKYSFCTDHTVLVQTRGGNSNGALCHFPFLYNNHNYTDCTSEGRRDNMKWCGTTQNYDADQKFGFCPMAAHEEICTTNEGVMYRIGDQWDKQHDMGHMMRCTCVGNGRGEWTCIAYSQLRDQCIVDDITYNVNDTFHKRHEEGHMLNCTCFGQGRGRWKCDPVDQCQDSETGTFYQIGDSWEKYVHGVRYQCYCYGRGIGEWHCQPLQTYPSSSGPVEVFITETPSQPNSHPIQWNAPQPSHISKYILRWRPKNSVGRWKEATIPGHLNSYTIKGLKPGVVYEGQLISIQQYGHQEVTRFDFTTTSTSTPVTSNTVTGETTPFSPLVATSESVTEITASSFVVSWVSASDTVSGFRVEYELSEEGDEPQYLDLPSTATSVNIPDLLPGRKYIVNVYQISEDGEQSLILSTSQTTAPDAPPDTTVDQVDDTSIVVRWSRPQAPITGYRIVYSPSVEGSSTELNLPETANSVTLSDLQPGVQYNITIYAVEENQESTPVVIQQETTGTPRSDTVPSPRDLQFVEVTDVKVTIMWTPPESAVTGYRVDVIPVNLPGEHGQRLPISRNTFAEVTGLSPGVTYYFKVFAVSHGRESKPLTAQQTTKLDAPTNLQFVNETDSTVLVRWTPPRAQITGYRLTVGLTRRGQPRQYNVGPSVSKYPLRNLQPASEYTVSLVAIKGNQESPKATGVFTTLQPGSSIPPYNTEVTETTIVITWTPAPRIGFKLGVRPSQGGEAPREVTSDSGSIVVSGLTPGVEYVYTIQVLRDGQERDAPIVNKVVTPLSPPTNLHLEANPDTGVLTVSWERSTTPDITGYRITTTPTNGQQGNSLEEVVHADQSSCTFDNLSPGLEYNVSVYTVKDDKESVPISDTIIPAVPPPTDLRFTNIGPDTMRVTWAPPPSIDLTNFLVRYSPVKNEEDVAELSISPSDNAVVLTNLLPGTEYVVSVSSVYEQHESTPLRGRQKTGLDSPTGIDFSDITANSFTVHWIAPRATITGYRIRHHPEHFSGRPREDRVPHSRNSITLTNLTPGTEYVVSIVALNGREESPLLIGQQSTVSDVPRDLEVVAATPTSLLISWDAPAVTVRYYRITYGETGGNSPVQEFTVPGSKSTATISGLKPGVDYTITVYAVTGRGDSPASSKPISINYRTEIDKPSQMQVTDVQDNSISVKWLPSSSPVTGYRVTTTPKNGPGPTKTKTAGPDQTEMTIEGLQPTVEYVVSVYAQNPSGESQPLVQTAVTTIPAPTDLKFTQVTPTSLSAQWTPPNVQLTGYRVRVTPKEKTGPMKEINLAPDSSSVVVSGLMVATKYEVSVYALKDTLTSRPAQGVVTTLENVSPPRRARVTDATETTITISWRTKTETITGFQVDAVPANGQTPIQRTIKPDVRSYTITGLQPGTDYKIYLYTLNDNARSSPVVIDASTAIDAPSNLRFLATTPNSLLVSWQPPRARITGYIIKYEKPGSPPREVVPRPRPGVTEATITGLEPGTEYTIYVIALKNNQKSEPLIGRKKTVQKTPFVTHPGYDTGNGIQLPGTSGQQPSVGQQMIFEEHGFRRTTPPTTATPIRHRPRPYPPNVGQEALSQTTISWAPFQDTSEYIISCHPVGTDEEPLQFRVPGTSTSATLTGLTRGATYNVIVEALKDQQRHKVREEVVTVGNSVNEGLNQPTDDSCFDPYTVSHYAVGDEWERMSESGFKLLCQCLGFGSGHFRCDSSRWCHDNGVNYKIGEKWDRQGENGQMMSCTCLGNGKGEFKCDPHEATCYDDGKTYHVGEQWQKEYLGAICSCTCFGGQRGWRCDNCRRPGGEPSPEGTTGQSYNQYSQRYHQRTNTNVNCPIECFMPLDVQADREDSRE

SEQ ID NO: 13982 - protein, 785 aa, Homo sapiens
MGFMTMPASQEHTPHPCRSAMAPRSLSCHSVGSMDSVGGGPGGASGGLTEDSSTRRPPAKPRRHPSTKLSMVGPGSGAETPPSKKAGSQKPTPEGRESSRKVPPQKPRRSPNTQLSVSFDESCPPGPSPRGGNLPLQRLTRGSRVAGDPDVGAQEEPVYIEMVGDVFRGGGRSGGGLAGPPLGGGGPTPPAGADSDSEESEAIYEEMKYPLPEEAGEGRANGPPPLTATSPPQQPHALPPHAHRRPASALPSRRDGTPTKTTPCEIPPPFPNLLQHRPPLLAFPQAKSASRTPGDGVSRLPVLCHSKEPAGSTPAPQVPARERETPPPPPPPPAANLLLLGPSGRARSHSTPLPPQGSGQPRGERELPNSHSMICPKAAGAPAAPPAPAALLPGPPKDKAVSYTMVYSAVKVTTHSVLPAGPPLGAGEPKTEKEISVLHGMLCTSSRPPVPGKTSPHGGAMGAAAGVLHHRGCLASPHSLPDPTVGPLTPLWTYPATAAGLKRPPAYESLKAGGVLNKGCGVGAPSPMVKIQLQEQGTDGGAFASISCAHVIASAGTPEEEEEEVGAATFGAGWALQRKVLYGGRKAKELDTEVEDGARAWNGSAEGPGKVEREDRGPGTSGIPVRSQGAEGLLARIHHGDRGGSRTALPIPCQTFPACHRNGDFTGGYRLGRSASTSGVRQVVLHTPRPCSQPRDALSQPHPALPLPLPLPPQPARERDGKLLEVIERKRCVCKEIKARHRPDRGLCKQESMPILPSWRRGPEPRKSGTPPCRRQHTVLWDTAI

SEQ ID NO: 13983 - protein, 249 aa, Homo sapiens
MTEDSQRNFRSVYYEKVGFRGVEEKKSLEILLKDDRLDTEKLCTFSQRFPLPSMYRALVWKVLLGILPPHHESHAKVMMYRKEQYLDVLHALKVVRFVSDATPQAEVYLRMYQLESGKLPRSPSFPLEPDDEVFLAIAKAMEEMVEDSVDCYWITRRFVNQLNTKYRDSLPQLPKAFEQYLNLEDGRLLTHLRMCSAAPKLPYDLWFKRCFAGCLPESSLQRVWDKVVSGSCKILVFVAVEILLTFKIK

SEQ ID NO: 13984 - protein, 459 aa, Homo sapiens
MHLRIHARRSPPRRPAWTLGIWFLFWGCIVSSVWSSSNVASSSSTSSSPGSHSQHEHHFHGSKHHSVPISIYRSPVSLRGGHAGATYIFGKSGGLILYTWPANDRPSTRSDRLAVGFSTTVKDGILVRIDSAPGLGDFLQLHIEQGKIGVVFNIGTVDISIKEERTPVNDGKYHVVRFTRNGGNATLQVDNWPVNEHYPTGNTDNERFQMVKQKIPFKYNRPVEEWLQEKGRQLTIFNTQAQIAIGGKDKGRLFQGQLSGLYYDGLKVLNMAAENNPNIKINGSVRLVGEVPSILGTTQTTSMPPEMSTTVMETTTTMATTTTRKNRSTASIQPTSDDLVSSAECSSDDEDFVECEPSTANPTEPGIRRVPGASEVIRESSSTTGMVVGIVAAAALCILILLYAMYKYRNRDEGSYQVDETRNYISNSAQSNGTLMKEKQQSSKSGHKKQKNKDREYYV

SEQ ID NO: 13985 - protein, 258 aa, Homo sapiens
NLLDIFIEMEKRVILGEGKLDILKRVCAQINKSLLKIINDYEEFSKGALTTTFEELHFEIKPHDDCTVEQIYEILKIYQLMDHSNMDCFICCILSHGDKGIIYGTDGQEAPIYELTSQFTGLKCPSLAGKPKVFFIQACQGDNYQKGIPVETDSEEQPYLEMDLSSPQTRYIPDEADFLLGMATVNNCVSYRNPAEGTWYIQSLCQSLRERCPRGDDILTILTEVNYEVSNKDDKKNMGKQMPQPTFTLRKKLVFPSD

SEQ ID NO: 13986 - protein, 200 aa, Homo sapiens
METPLDVLSRAASLVHADDEKREAALRGEPRIQTLPVASALSSHRTGPPPISPSKRKFSMEPGDEDLDCDNDHVSKMSRIFNPHLNKTANGDCRRDPRERSRSPIERAVAPTMSLHGSHLYTSLPSLGLEQPLALTKNSLDASRPAGLSPTLTPGERQQNRPSVITCASAGARNCNLSHCPIAHSGCAAPGPASYRRPPS

SEQ ID NO: 13987 - protein, 375 aa, Homo sapiens
IIPPQDWLDRGDESAPIRTPAMIGCSFVVDREYFGDIGLLDPGMEVYGGENVELGMRETEGFQQDKVNYKQNKRGRKTRQRVKRSRSEAHRAQPSPGATHGAHSRAPGPRTEPTAEPWGHARPTAALPATGVWQCGGSMEVLPCSRVAHIERTRKPYNNDIDYYAKRNALRAAEVWMDDFKSHVYMAWNIPMSNPGVDFGDVSERLALRQRLKCRSFKWYLENVYPEMRVYNNTLTYGEVRNSKASAYCLDQGAEDGDRAILYPCHGMSSQLVRYSADGLLQLGPLGSTAFLPDSKCLVDDGTGRMPTLKKCEDVARPTQRLWDFTQSGPIVSRATGRCLEVEMSKDANFGLRLVVQRCSGQKWMIRNWIKHARH

SEQ ID NO: 13988 - protein, 117 aa, Homo sapiens
MEFGLSWVFLVAILKGVQCEVQLVESGGGLVQPGGSLRLSCAASGFTFSSYWMHWVRQAPGKGLVWVSRINSDGSSTSYADSVKGRFTISRDNAKNTLYLQMNSLRAEDTAVYYCAR

SEQ ID NO: 13989 - protein, 439 aa, Homo sapiens
MTPQPAGPPDGGWGWVVAAAAFAINGLSYGLLRSLGLAFPDLAEHFDRSAQDTAWISALALAVQQAASPVGSALSTRWGARPVVMVGGVLASLGFVFSAFASDLLHLYLGLGLLAGFGWALVFAPALGTLSRYFSRRRVLAVGLALTGNGASSLLLAPALQLLLDTFGWRGALLLLGAITLHLTPCGALLLPLVLPGDPPAPPRSPLAALGLSLFTRRAFSIFALGTALVGGGYFVPYVHLAPHALDRGLGGYGAALVVAVAAMGDAGARLVCGWLADQGWVPLPRLLAVFGALTGLGLWVVGLSWGGPLLAAAVAYGLSAGSYAPLVFGVLPGLVGVGGVVQATGLVMMLMSLGGLLGPPLSGFLRDETGDFTASFLLSGSLILSGSFIYIGLPRALPSCGPASPPATPPPETGELLPAPQAVLLSPGGPGSTLDTTC

SEQ ID NO: 13990 - protein, 166 aa, Homo sapiens
MRRKQTGTRERGRYREEEMTVVEEADDDKKRLLQIIDRDGEEEEEEEEPLDESSVKKMILTFEKRSYKNQELRIKFPDNPEKFMESELDLNDIIQEMHVVATMPDLYHLLVELNAVQSLLGLLGHDNTDVSIAVVDLLQELTDIDTLHESEEGAEVLIDALVDGQV

SEQ ID NO: 13991 - protein, 492 aa, Homo sapiens
MDFLLGNPFSSPVGQRIEKATDGSLQSEDWALNMEICDIINETEEGPKDALRAVKKRIVGNKNFHEVMLALTVLETCVKNCGHRFHVLVASQDFVESVLVRTILPKNNPPTIVHDKVLNLIQSWADAFRSSPDLTGVVTIYEDLRRKGLEFPMTDLDMLSPIHTPQRTVFNSETQSGQDSVGTDSSQQEDSGQHAAPLPAPPILSGDTPIAPTPEQIGKLRSELEMVSGNVRVMSEMLTELVPTQAEPADLELLQELNRTCRAMQQRVLELIPQIANEQLTEELLIVNDNLNNVFLRHERFERFRTGQTTKAPSEAEPAADLIDMGPDPAATGNLSSQLAGMNLGSSSVRAGLQSLEASGRLEDEFDMFALTRGSSLADQRKEVKYEAPQATDGLAGALDARQQSTGAIPVTQACLMEDIEQWLSTDVGNDAEEPKGVTSEEFDKFLEERAKAADRLPNLSSPSAEGPPGPPSGPAPRKKTQEKDDDMLFAL

SEQ ID NO: 13992 - protein, 712 aa, Homo sapiens
MCSPASPKILYRNPRFLRLAFLQLHHQQQSDVFCDVLLQAEGEAVPAHCCILSACSPFFTERLERERPAQGGKVVLELGGLKISTLRKLVDFLYTSEMEVSQEEAQDVLSAARQLRVSELESLQLEGGKLVKAPQGRRLNRECLQPTSAAPISARVVTPSHHPHTPLPTNQTPCPLGAIRLKSLGKEEGPQENNRQNADNLSGTLLLKRKARACPTPQEKNSSPSSHSQEPRENKNDTALDPTVLSPPSLYPSVDKHLLPRKIRLSRSKPSPGICTSKPSSILSGSSSVPATPGRRLWRQRSVNKETPEDKPKPGRASPLQSTPNPSGLGKTGGSRKRSPEVRAPNSDSAEEGQVGRVKLRKIVNGTCWEVVQETPLKNTQDSPQIPDPGGDFQEPSGTQPFSSNEQEMSPTRTELCQDSPMCTKLQDILVSASHSPDHPVVKSEFESSPELVEKEPMLAIDCREPYAFDTALLEQPCEAEEYRITSAAATSELEEILDFMLCGSDIEPPIGSLESPGAEGCRTPTYHLTETGKNWIEGEEWCLPDMELWPRELTELEKEPAGENRGPTELLSPLVMPSEVSEVLSVGGRWTPDLEITSSQPLDGQEDKLLHVSSLDTPQRSYGDLSPPCSNWVETGLEVSLTTDELLYPSPKAGKEVSGHSELLGSLPASSEEEEIDVVDWTAEGRLVPTTVPSVWPDPSSESETEVDILT

SEQ ID NO: 13993 - protein, 648 aa, Homo sapiens
MGKEPLTLKSIQVAVEELYPNKARALTLAQHSRAPSPRLRSRLFSKALKGDHRCGETETPKSCSEVAGCKAAMRHQGKIPEELSLDDRARTQKKWGRGKWEPEPSSKPPREATLEERHARGEKHLGVEIEKTSGEIIRCEKCKRERELQQSLERERLSLGTSELDMGKGPMYDVEKLVRTRSCRRSPEANPASGEEGWKGDSHRSSPRNPTQELRRPSKSMDKKEDRGPEDQESHAQGAAKAKKDLVEVLPVTEEGLREVKKDTRPMSRSKHGGWLLREHQAGFEKLRRTRGEEKEAEKEKKPCMSGGRRMTLRDDQPAKLEKEPKTRPEENKPERPSGRKPRPMGIIAANVEKHYETGRVIGDGNFAVVKECRHRETRQAYAMKIIDKSRLKGKEDMVDSEILIIQSLSHPNIVKLHEVYETDMEIYLILEYVQGGDLFDAIIESVKFPEPDAALMIMDLCKALVHMHDKSIVHRDLKPENLLVQRNEDKSTTLKLADFGLAKHVVRPIFTVCGTPTYVAPEILSEKGYGLEVDMWAAGVILYILLCGFPPFRSPERDQDELFNIIQLGHFEFLPPYWDNISDAAKDLVSRLLVVDPKKRYTAHQVLQHPWIETAGKTNTVKRQKQVSPSSEGHFRSQHKRVVEQVS

SEQ ID NO: 13994 - protein, 1565 aa, Homo sapiens
MLTDSGGGGTSFEEDLDSVAPRSAPAGASEPPPPGGVGLGIRTVRLFGEAGPASGVGSSGGGGSGSGTGGGDAALDFKLAAAVLRTGGGGGASGSDEDEVSEVESFILDQEDLDNPVLKTTSEIFLSSTAEGADLRTVDPETQARLEALLEAAGIGKLSTADGKAFADPEVLRRLTSSVSCALDEAAAALTRMKAENSHNAGQVDTRSLAEACSDGDVNAVRKLLDEGRSVNEHTEEGESLLCLACSAGYYELAQVLLAMHANVEDRGNKGDITPLMAASSGGYLDIVKLLLLHDADVNSQSATGNTALTYACAGGFVDIVKVLLNEGANIEDHNENGHTPLMEAASAGHVEVARVLLDHGAGINTHSNEFKESALTLACYKGHLDMVRFLLEAGADQEHKTDEMHTALMEACMDGHVEVARLLLDSGAQVNMPADSFESPLTLAACGGHVELAALLIERGANLEEVNDEGYTPLMEAAREGHEEMVALLLAQGANINAQTEETQETALTLACCGGFSEVADFLIKAGADIELGCSTPLMEASQEGHLELVKYLLASGANVHATTATGDTALTYACENGHTDVADVLLQAGADLDKQEDMKTILEGIDPAKHQEHESEGGRTPLMKAARAGHLCTVQFLISKGANVNRATANNDHTVVSLACAGGHLAVVELLLAHGADPTHRLKDGSTMLIEAAKGGHTNVVSYLLDYPNNVLSVPTTDVSQLPPPSQDQSQVPRVPTHTLAMVVPPQEPDRTSQENSPALLGVQKGTSKQKSSSLQVADQDLLPSFHPYQPLECIVEETEGKLNELGQRISAIEKAQLKSLELIQGEPLNKDKIEELKKNREEQVQKKKKILKELQKVERQLQMKTQQQFTKEYLETKGQKDTVSLHQQCSHRGVFPEGEGDGSLPEDHFSELPQVDTILFKDNDVDDEQQSPPSAEQIDFVPVQPLSSPQCNFSSDLGSNGTNSLELQKVSGNQQIVGQPQIAITGHDQGLLVQEPDGLMVATPAQTLTDTLDDLIAAVSTRVPTGSNSSSQTTECLTPESCSQTTSNVASQSMPPVYPSVDIDAHTESNHDTALTLACAGGHEELVSVLIARDAKIEHRDKKGFTPLILAATAGHVGVVEILLDKGGDIEAQSERTKDTPLSLACSGGRQEVVDLLLARGANKEHRNVSDYTPLSLAASGGYVNIIKILLNAGAEINSRTGSKLGISPLMLAAMNGHVPAVKLLLDMGSDINAQIETNRNTALTLACFQGRAEVVSLLLDRKANVEHRAKTGLTPLMEAASGGYAEVGRVLLDKGADVNAPPVPSSRDTALTIAADKGHYKFCELLIHRGAHIDVRNKKGNTPLWLASNGGHFDVVQLLVQAGADVDAADNRKITPLMSAFRKGHVKVVQYLVKEVNQFPSDIECMRYIATITDKELLKKCHQCVETIVKAKDQQAAEANKNASILLKELDLEKSREESRKQALAAKREKRKEKRKKKKEEQKRKQEEDEENKPKENSELPEDEDEEENDEDVEQEVPIEPPSATTTTTIGISATSATFTNVFGKKRANVVTTPSTNRKNK

SEQ ID NO: 13995 - protein, 185 aa, Homo sapiens
MSDKSELKAELERKKQRLAQIREEKKRKEEERKKKETDQKKEAVAPVQEESDLEKKRREAEALLQSMGLTPESPIVPPPMSPSSKSVSTPSEAGSQDSGDGAVGSRRGPIKLGMAKITQVDFPPREIVTYTKETQTPVMAQPKEDEEEDDDVVAPKPPIEPEEEKTLKKDEENDSKAPPHELTEE

SEQ ID NO: 13996 - protein, 1156 aa, Homo sapiens
MCKCCNLFSPNQSELLSHVSEKHMEEGVNVDEIIIPLRPLSTPEPPNSSKTGDEFLVMKRKRGRPKGSTKKSSTEEELAENIVSPTEDSPLAPEEGNSLPPSSLECSKCCRKFSNTRQLRKHICIIVLNLGEEEGEAGNESDLELEKKCKEDDREKASKRPRSQKTEKVQKISGKEARQLSGAKKPIISVVLTAHEAIPGATKIVPVEAGPPETGATNSETTSADLVPRRGYQEYAIQQTPYEQPMKSSRLGPTQLKIFTCEYCNKVFKFKHSLQAHLRIHTNEKPYKCPQCSYASAIKANLNVHLRKHTGEKFACDYCSFTCLSKGHLKVHIERVHKKIKQHCRFCKKKYSDVKNLIKHIRDAHDPQDKKVKEALDELCLMTREGKRQLLYDCHICERKFKNELDRDRHMLVHGDKWPFACELCGHGATKYQALELHVRKHPFVYVCAVCRKKFVSSIRLRTHIKEVHGAAQEALVFTSSINQSFCLLEPGGDIQQEALGDQLQLVEEEFALQGVNALKEEACPGDTQLEEGRKEPEAPGEMPAPAVHLASPQAESTALPPCELETTVVSSSDLHSQEVVSDDFLLKNDTSSAEAHAAPEKPPDMQHRSSVQTQGEVITLLLSKAQSAGSDQESHGAQSPLGEGQNMAVLSAGDPDPSRCLRSNPAEASDLLPPVAGGGDTITHQPDSCKAAPEHRSGITAFMKVLNSLQKKQMNTSLCERIRKVYGDLECEYCGKLFWYQVHFDMHVRTHTREHLYYCSQCHYSSITKNCLKRHVIQKHSNILLKCPTDGCDYSTPDKYKLQAHLKVHTALDKRSYSCPVCEKSFSEDRLIKSHIKTNHPEVSMSTISEVLGRRVQLKGLIGKRAMKCPYCDFYFMKNGSDLQRHIWAHEGVKPFKCSLCEYATRSKSNLKAHMNRHSTEKTHLCDMCGKKFKSKGTLKSHKLLHTADGKQFKCTVCDYTAAQKPQLLRHMEQHVSFKPFRCAHCHYSCNISGSLKRHYNRKHPNEEYANVGTGELAAEVLIQQGGLKCPVCSFVYGTKWEFNRHLKNKHGLKVVEIDGDPKWETATEAPEEPSTQYLHITEAEEDVQGTQAAVAALQDLRYTSESGDRLDPTAVNILQQLQPHGHDPGDGPASVRGACRAAPPGGVLRRRGGH

SEQ ID NO: 13997 - protein, 2036 aa, Homo sapiens
MDRNYPSAGFGDPLGAGAGWSYERSAKASLVYGSSRTSHPETDILHRQAYAAPHPLQSYATNHHPAGLSGLFDTGLHHAGSAGPDASVMNLISALESRGPQPGPSASSLLSQFRSPSWQTAMHTPGPTELFISGALPGSSTFPSSSALSAYQHPASFGSRPFPVPSSLSLQDPPFSPPANGLLSPHDVLHLKPSQAPTVPSSLGFERLAGGGVLGPAGLGPAQTPPYRPGPPDPPPPPRHLPTQFNLLASSSAAAAAAEQSSPQLYNFSGAAPGPPPPERALPRQDTVIKHYQRPASAQPPPPPPPAHALQHYLSCGGSYPSMGHRANLACSPLGGGEPSPGAGEPSKAGPSGATAGASGRATGPEAAGGGGAGGGGGGYRPIIQSPGYKTGKGGYGAAAGGATRPPPPRSTATPKCQSLGGPAAAYATGKASGAGGAGGQAYSPGQPQGLLGPQAYGQGFGGGQAQDLSKAPSYSGGPPQPPSGPPPPGLATCQSYSPDQLQGQLYGVQGEPYPGPAAHSQGLPTASPSLSYSTGHSPALSGHGGGWGPSSLGGGGEASPSHIIRPLQSPPATGRPPGVGSPGAPGKYLSSVLASAPFLAPPGAGSYAAGAGGYKGKGDGSELLAGPGGPPAERTEDEEFLIQHLLQAPSPPRTSGADGLVGEDGAADASKGLGGSGGAGGPPGTPYELAKEDPQRYHLQSVIRTSASLDEGATAALELGLGRLKEKKKGPERGGETPEGLATSVVHYGAGAKELGAFLQKSPPPPPPTAQSTQPTPHGLLLEAGGPDLPLVLPPPPPQLLPSVLSHAPSPSPSASKVGVHLLEPATRDGAPQPPPPPPPPPPPMPLQLEAHLRSHGLEPAAPSPRLRPEESLDPPGAMQELLGALEPLPPAPGDTGVGPPNSEGKDPAGAYRSPSPQGTKAPRFVPLTSICFPDSLLQDEERSFFPTMEEMFGGGAADDYGKAGPPEDEGDPKAGAGPPPGPPAYDPYGPYCPGRASGAGPETPGLGLDPNKPPELPSTVNAEPLGLIQSGPHQAAPPPPPPPPPPPAPASEPKGGLTSPIFCSTKPKKLLKTSSFHLLRRRDPPFQTPKKLYAQEYEFEADEDKADVPADIRLNPRRLPDLVSSCRSRPALSPLGDIDFCPPNPGPDGPRRRGRKPTKAKRDGPPRPRGRPRIRPLEVPTTAGPASASTPTDGAKKPRGRGRGRGRKAEEAGGTRLEPLKPLKIKLSVPKAGEGLGTSSGDAISGTDHNSLDSSLTREKIEAKIKEVEEKQPEMKSGFMASFLDFLKSGKRHPPLYQAGLTPPLSPPKSVPPSVPARGLQPQPPATPAVPHPPPSGAFGLGGALEAAESEGLGLGCPSPCKRLDEELKRNLETLPSFSSDEEDSVAKNRDLQESISSAISALDDPPLAGPKDTSTPDGPPLAPAAAVPGPPPLPGLPSANSNGTPEPPLLEEKPPPTPPPAPTPQPQPPPPPPPPQPALPSPPPLVAPTPSSPPPPPLPPPPPPAMPSPPPPPPPAAAPLAAPPEEPAAPSPEDPELPDTRPLHLAKKQETAAVCGETDEEAGESGGEGIFRERDEFVIRAEDIPSLKLALQTGREPPPIWRVQKALLQKFTPEIKDGQRQFCATSNYLGYFGDAKNRYQRLYVKFLENVNKKDYVRVCARKPWHRPPVPVRRSGQAKNPVSAGGSSAPPPKAPAPPPKPETPEKTTSEKPPEQTPETAMPEPPAPEKPSLLRPVEKEKEKEKVTRGERPLRGERATSGRQTRPERSLATGQPATSRLPKARPTKVKAEPPPKKRKKWLKEAGGNATAGGGPPGSSSDSESSPGAPSEDERAVPGRLLKTRAMREMYRSYVEMLVSTALDPDMIQALEDTHDELYLPPMRKIDGLLNEHKKKVLKRLSLSPALQDALHTFPQLQVEQSGEGSPEEGAVRLRPAGEPYNRKTLSKLKRSVVRAQEFKVELEKSGYYTLYHSLHHYKYHTFLRCRDQTLAIEGGAEDLGQEEVVQQCMRNQPWLEQLFDSFSDLLAQAQAHSRCG

SEQ ID NO: 13998 - protein, 580 aa, Homo sapiens
MKPAQRNLYRDVMLENYSNLVTVGCQVTKPDVIFKLEQEEEPWVMEEEMFGRHCPEVWEVDEQIKKQQETLVRKVTSISKKILIKEKVIECKKVAKIFPLSSDIVTSRQSFYDCDSLDKGLEHNLDLLRYEKGCVREKQSNEFGKPFYHCASYVVTPFKCNQCGQDFSHKFDLIRHERIHAGEKPYECKECGKAFSRKENLITHQKIHTGEKPYKCNECGKAFIQMSNLIRHHRIHTGEKPYACKDCWKAFSQKSNLIEHERIHTGEKPYECKECGKSFSQKQNLIEHEKIHTGEKPYACNECGRAFSRMSSVTLHMRSHTGEKPYKCNKCGKAFSQCSVFIIHMRSHTGEKPYVCSECGKAFSQSSSLTVHMRNHTAEKPYECKECGKAFSRKENLITHQKIHTGEKPYECSECGKAFIQMSNLIRHQRIHTGEKPYACTVCGKAFSQKSNLTEHEKIHTGEKPYHCNQCGKAFSQRQNLLEHEKIHTGEKPFKCNECGKAFSRISSLTLHVRSHTGEKPYECNKCGKAFSQCSLLIIHMRSHTGEKPFECNECGKAFSQRASLSIHKRGHTGERHQVY

SEQ ID NO: 13999 - protein, 1610 aa, Homo sapiens
MKKEGSSGSFRLQPNTGSLSRAVSWINFSSLSRQTKRLFRSDGELSVCGQQVEVDDENWIYRAQPRKAVSNLDEESRWTVHYTAPWHQQENVFLPTTRPPCVEDLHRQAKLNLKSVLRECDKLRHDGYRSSQYYSQGPTFAANASPFCDDYQDEDEETDQKCSLSSSEEERFISIRRPKTPASSDFSDLNTQTNWTKSLPLPTPEEKMRQQAQTVQADVVPINITASGTGQDDADGHSVYTPDHYSTLGRFNSCRSAGQRSETRDSSCQTEDVKVVPPSMRRIRAQKGQGIAAQMGHFSGSSGNMSVLSDSAGIVFPSRLDSDAGFHSLPRSGARANIQSLEPRLGALGPAGDMNGTFLYQRGHPQADENLGHLGGASGTGTLLRPKSQELRHFESENIMSPACVVSPHATYSTSIIPNATLSSSSEVIAIPTAQSAGQRESKSSGSSHARIKSRDHLISRHAVKGDPQSPGRHWNEGHATILSQDLDPHSPGEPALLSLCDSAVPLNAPANRENGSQAMPYNCRNNLAFPAHPQDVDGKSESSYSGGGGHSSSEPWEYKSSGNGRASPLKPHLATPGYSTPTSNMSSCSLDQTSNKEDAGSLYSEDHDGYCASVHTDSGHGSGNLCNSSDGFGNPRHSVINVFVGRAQKNQGDRSNYQDKSLSRNISLKKAKKPPLPPSRTDSLRRIPKKSSQCNGQVLNESLIATLQHSLQLSLPGKSGSSPSQSPCSDLEEPWLPRSRSQSTVSAGSSMTSATTPNVYSLCGATPSQSDTSSVKSEYTDPWGYYIDYTGMQEDPGNPAGGCSTSSGVPTGNGPVRHVQEGSRATMPQVPGGSVKPKIMSPEKSHRVISPSSGYSSQSNTPTALTPVPVFLKSVSPANGKGKPKPKVPERKSSLISSVSISSSSTSLSSSTSTEGSGTMKKLDPAVGSPPAPPPPPVPSPPFPCPADRSPFLPPPPPVTDCSQGSPLPHSPVFPPPPPEALIPFCSPPDWCLSPPRPALSPILPDSPVSLPLPPPLLPSSEPPPAPPLDPKFMKDTRPPFTNSGQPESSRGSLRPPSTKEETSRPPMPLITTEALQMVQLRPVRKNSGAEAAQLSERTAQEQRTPVAPQYHLKPSAFLKSRNSTNEMESESQPASVTSSLPTPAKSSSQGDHGSAAERGGPVSRSPGAPSAGEAEARPSPSTTPLPDSSPSRKPPPISKKPKLFLVVPPPQKDFAVEPAENVSEALRAVPSPTTGEEGSVHSREAKESSAAQAGSHATHPGTSVLEGGAAGSMSPSRVEANVPMVQPDVSPAPKQEEPAENSADTGGDGESCLSQQDGAAGVPETNAAGSSSEACDFLKEDGNDEVMTPSRPRTTEDLFAAIHRSKRKVLGRRDSDDDHSRNHSPSPPVTPTGAAPSLASPKQVGSIQRSIRKSSTSSDNFKALLLKKGSRSDTSARMSAAEMLKNTDPRFQRSRSEPSPDAPESPSSCSPSKNRRAQEEWAKNEGLMPRSLSFSGPRYGRSRTPPSAASSRYSMRNRIQSSPMTVISEGEGEAVEPVDSIARGALGAAEGCSLDGLAREEMDEGGLLCGEGPAASLQPQAPGPVDGTASAEGREPSPQCGGSLSEES

SEQ ID NO: 14000 - protein, 290 aa, Homo sapiens
NVDGVAATPTAASASCQYRCIECNQEAKELYRDYNHGVLKITICKSCQKPVDKYIEYDPVIILINAILCKAQAYRHILFNTQINIHGKLCIFCLLCEAYLRWWQLQDSNQNTAPDDLIRYAKEWDFYRMFAIAALGWSAVAQSQLTAALNSWAQAILLPRPPQVAGTTEQTAYFIGIFTFLWVERPMTAKKKPNFILLLKALLLSSYGKLLLIPAVIWEHDYTSVCLKLIKVFVLTSNFQAIRVTLNINRKLSFLAVLSGLLLESIMVYFFQSMEWDVGSDYAIFKSQDF

SEQ ID NO: 14001 - protein, 444 aa, Homo sapiens
MAPGRAVAGLLLLAAAGLGGVAEGPGLAFSEDVLSVFGANLSLSAAQLQHLLEQMGAASRVGVPEPGQLHFNQCLTAEEIFSLHGFSNATQITSSKFSVICPAVLQQLNFHPCEDRPKHKTRPSHSEVWGYGFLSVTIINLASLLGLILTPLIKKSYFPKILTFFVGLAIGTLFSNAIFQLIPEAFGFDPKVDSYVEKAVAVFGGFYLLFFFERMLKMLLKTYGQNGHTHFGNDNFGPQEKTHQPKALPAINGVTCYANPAVTEANGHIHFDNVSVVSLQDGKKEPSSCTCLKGPKLSEIGTIAWMITLCDALHNFIDGLAIGASCTLSLLQGLSTSIAILCEEFPHELGDFVILLNAGMSTRQALLFNFLSACSCYVGLAFGILVGNNFAPNIIFALAGGMFLYISLADMFPEMNDMLREKIIKWATDDIKSQLHLLWIYTAR

SEQ ID NO: 14002 - protein, 674 aa, Homo sapiens
MQPRTPLVLCVLLSQVLLLTSAEDLDCTPGFQQKVFHINQPAEFIEDQSILNLTFSDCKGNDKLRYEVSSPYFKVNSDGGLVALRNITAVGKTLFVHARTPHAEDMAELVIVGGKDIQGSLQVVDSDRPERSKFRLTGKGVDQEPKGIFRINENTGSVSVTRTLDREVIAVYQLFVETTDVNGKTLEGPVPLEVIVIDQNDNRPIFREGPYIGHVMEGSPTGTTVMRMTAFDADDPATDNALLRYNIRQQTPDKPSPNMFYIDPEKGDIVTVVSPALLDRETLENPKYELIIEAQDMAGLDVGLTGTATATIMIDDKNDHSPKFTKKEFQATVEEGAVGVIVNLTVEDKDDPTTGAWRAAYTIINGNPGQSFEIHTNPQTNEGMLSVVKPLDYEISAFHTLLIKVENEDPLVPDVSYGPSSTATVHITVLDVNEGPVFYPDPMMVTRQEDLSVGSVLLTVNATDPDSLQHQTIRYSVYKDPAGWLNINPINGTVDTTAVLDRESPFVDNSVYTALFLAIDSGNPPATGTGTLLITLEDVNDNAPFIYPTVAEVCDDAKNLSVVILGASDKDLHPNTDPFKFEIHKQAVPDKVWKISKINNTHALVSLLQNLNKANYNLPIMVTDSGKPPMTNITDLRVQVCSCRNSKVDCNAAGALRFSLPSVLLLSLFSLACL

SEQ ID NO: 14003 - protein, 438 aa, Homo sapiens
MLARVTRKMLRHAKCFQRLAIFGSVRALHKDNRTATPQNFSNYESMKQDFKLGIPEYFNFAKDVLDQWTDKEKAGKKPSNPAFWWINRNGEEMRWSFEELGSLSRKFANILSEACSLQRGDRVILILPRVPEWWLANVACLRTGTVLIPGTTQLTQKDILYRLQSSKANCIITNDVLAPAVDAVASKCENLHSKLIVSENSREGWGNLKELMKHASDSHTCVKTKHNEIMAIFFTSGTSGYPKMTAHTHSSFGLGLSVNGRFWLDLTPSDVMWNTSDTGWAKSAWSSVFSPWIQGACVFTHHLPRFEPTSILQTLSKYPITVFCSAPTVYRMLVQNDITSYKFKSLKHCVSAGEPITPDVTEKWRNKTGLDIYEGYGQTETVLICGNFKGMKIKPGSMGKPSPAFDVKVCTSPSRRMFNNPICTLPTYRLPPYKLSLL

SEQ ID NO: 14004 - protein, 165 aa, Homo sapiens
MDSLGAVSTRLGFDLFKELKKTNDGNIFFSPVGILTAIGMVLLGTRGATASQLEEVFHSEKETKSSRIKAEEKEIENTEAVHQQFQKFLTEISKLTNDYELNITNRLFGEKTYLFLQKYLDYVEKYYHASLEPVDFVNAADESRKKINSWVESKTNDVETEAQRV

SEQ ID NO: 14005 - protein, 493 aa, Homo sapiens
MCLHRRVPSEETYSLDRFAQNPPLFPPPSLPASESRMAHAPLLQRCGAARTGFCKKQQELWQRRKEAAEALGTRKVSVLLATSHSGARPAVSTMDSSAAPTNASNCTDALAYSSCSPAPSPGSWVNLSHLDGNLSDPCGPNRTDLGGRDSLCPPTGSPSMITAITIMALYSIVCVVGLFGNFLVMYVIVRYTKMKTATNIYIFNLALADALATSTLPFQSVNYLMGTWPFGTILCKIVISIDYYNMFTSIFTLCTMSVDRYIAVCHPVKALDFRTPRNAKIINVCNWILSSAIGLPVMFMATTKYRQGSIDCTLTFSHPTWYWENLLKICVFIFAFIMPVLIITVCYGLMILRLKSVRMLSGSKEKDRNLRRITRMVLVVVAVFIVCWTPIHIYVIIKALVTIPETTFQTVSWHFCIALGYTNSCLNPVLYAFLDENFKRCFREFCIPTSSNIEQQNSTRIRQNTRDHPSTANTVDRTNHQLENLEAETAPLP

SEQ ID NO: 14006 - protein, 309 aa, Homo sapiens
MAKERCLKKSFQDSLEDIKKRMKEKRNKNLAEIGKRRSFIAAPCQIITNTSTLLKNYQDNNKMLVLALENEKSKVKEAQDIILQLRKECYYLTCQLYALKGKLTSQQTVEPAQNQEICSSGMDPNSDDSSRNLFVKDLPQIPLEETELPGQGESFQIEDQIPTIPQDTLGVDFDSATPPETQQSPHLSLKDITNVSLYPVVKIRRLSLSPKKNKASPAVALPKRRCTASVNYKEPTLASKLRRGDPFTDLCFLNSPIFKQKKDLRRSKKRALEVSPAKEAIFILYYVREFVSRFPDCRKCKLETHICLR

SEQ ID NO: 14007 - protein, 560 aa, Homo sapiens
MEPAPARSPRPQQDPARPQEPTMPPPETPSEGRQPSPSPSPTERAPASEEEFQFLRCQQCQAEAKCPKLLPCLHTLCSGCLEASGMQCPICQAPWPLGADTPALDNVFFESLQRRLSVYRQIVDAQAVCTRCKESADFWCFECEQLLCAKCFEAHQWFLKHEARPLAELRNQSVREFLDGTRKTNNIFCSNPNHRTPTLTSIYCRGCSKPLCCSCALLDSSHSELKCDISAEIQQRQEELDAMTQALQEQDSAFGAVHAQMHAAVGQLGRARAETEELIRERVRQVVAHVRAQERELLEAVDARYQRDYEEMASRLGRLDAVLQRIRTGSALVQRMKCYASDQEVLDMHGFLRQALCRLRQEEPQSLQAAVRTDGFDEFKVRLQDLSSCITQGKDAAVSKKASPEAASTPRDPIDVDLPEEAERVKAQVQALGLAEAQPMAVVQSVPGAHPVPVYAFSIKGPSYGEDVSNTTTAQKRKCSQTQCPRKVIKMESEEGKEARLARSSPEQPRPSTSKAVSPPHLDGPPSPRSPVIGSEVFLPNSNHVASGAGEAGRERNALW

SEQ ID NO: 14008 - protein, 3587 aa, Homo sapiens
TLSFLAYIIRIYQELVTKYSQQMVKGMLQLLSNCPAETAHLRKELLIAAKHILTTELRNQFIPCMDKLFDESILIGSGYTARETLRPLAYSTLADLVHHVRQHLPLSDLSLAVQLFAKNIDDESLPSSIQTMSCKLLLNLVDCIRSKSEQESGNGRDVLMRMLEVFVLKFHTIARYQLSAIFKKCKPQSELGAVEAALPGVPTAPAAPGPAPSPAPVPAPPPPPPPPPPATPVTPAPVPPFEKQGEKDKEDKQTFQVTDCRSLVKTLVCGVKTITWGITSCKAPGEAQFIPNKQLQPKETQIYIKLVKYAMQALDIYQVQIAGNGQTYIRVANCQTVRMKEEKEVLEHFAGVFTMMNPLTFKEIFQTTVPYMVERISKNYALQIVANSFLANPTTSALFATILVEYLLDRLPEMGSNVELSNLYLKLFKLVFGSVSLFAAENEQMLKPHLHKIVNSSMELAQTAKEPYNYFLLLRALFRSIGGGSHDLLYQEFLPLLPNLLQGLNMLQSGLHKQHMKDLFVELCLTVPVRLSSLLPYLPMLMDPLVSALNGSQTLVSQGLRTLELCVDNLQPDFLYDHIQPVRAELMQALWRTLRNPADSISHVAYRVLGKFGGSNRKMLKESQKLHYVVTEVQGPSITVEFSDCKASLQLPMEKAIETALDCLKSANTEPYYRRQAWEVIKCFLVAMMSLEDNKHALYQLLAHPNFTEKTIPNVIISHRYKAQDTPARKTFEQALTGAFMSAVIKDLRPSALPFVASLIRHYTMVAVAQQCGPFLLPCYQVGSQPSTAMFHSEENGSKGMDPLVLIDAIAICMAYEEKELCKIGEVALAVIFDVASIILGSKERACQLPLFSYIVERLCACCYEQAWYAKLGGVVSIKFLMERLPLTWVLQNQQTFLKALLFVMMDLTGEVSNGAVAMAKTTLEQLLMRCATPLKDEERAEEIVAAQEKSFHHVTHDLVREVTSPNSTVRKQAMHSLQVLAQVTGKSVTVIMEPHKEVLQDMVPPKKHLLRHQPANAQIGLMEGNTFCTTLQPRLFTMDLNVVEHKVFYTELLNLCEAEDSALTKLPCYKSLPSLVPLRIAALNALAACNYLPQSREKIIAALFKALNSTNSELQEAGEACMRKFLEGATIEVDQIHTHMRPLLMMLGDYRSLTLNVVNRLTSVTRLFPNSFNDKFCDQMMQHLRKWMEVVVITHKGGQRSDGNESISECGRCPLSPFCQFEPAMEGVEEMKICSAIINLFHLIPAAPQTLVKPLLEVVMKTERAMLIEAGSPFREPLIKFLTRHPSQTVELFMMEATLNDPQWSRMFMSFLKHKDARPLRDVLAANPNRFITLLLPGGAQTAVRPGSPSTSTMRLDLQFQAIKIISIIVKNDDSWLASQHSLVSQLRRVWVSENFQERHRKENMAATNWKEPKLLAYCLLNYCKRNYGDIELLFQLLRAFTGRFLCNMTFLKEYMEEEIPKNYSIAQKRALFFRFVDFNDPNFGDELKAKVLQHILNPAFLYSFEKGEGEQLLGPPNPEGDNPESITSVFITKVLDPEKQADMLDSLRIYLLQYATLLVEHAPHHIHDNNKNRNSKLRRLMTFAWPCLLSKACVDPACKYSGHLLLAHIIAKFAIHKKIVLQVFHSLLKAHAMEARAIVRQAMAILTPAVPARMEDGHQMLTHWTRKIIVEEGHTVPQLVHILHLIVQHFKVYYPVRHHLVQHMVSAMQRLGFTPSVTIEQRRLAVDLSEVVIKWELQRIKDQQPDSDMDPNSSGEGVNSVSSSIKRGLSVDSAQEVKRFRTATGAISAVFGRSQSLPGADSLLAKPIDKQHTDTVVNFLIRVACQVNDNTNTAGSPGEVLSRRCVNLLKTALRPDMWPKSELKLQWFDKLLMTVEQPNQVNYGNICTGLEVLSFLLTVLQSPAILSSFKPLQRGIAACMTCGNTKVLRAVHSLLSRLMSIFPTEPSTSSVASKYEELECLYAAVGKVIYEGLTNYEKATNANPSQLFGTLMILKSACSNNPSYIDRLISVFMRSLQKMVREHLNPQAASGSTEATSGTSELVMLSLELVKTRLAVMSMEMRKNFIQAILTSLIEKSPDAKILRAVVKIVEEWVKNNSPMAANQTPTLREKSILLVKMMTYIEKRFPEDLELNAQFLDLVNYVYRDETLSGSELTAKLEPAFLSGLRCAQPLIRAKFFEVFDNSMKRRVYERLLYVTCSQNWEAMGNHFWIKQCIELLLAVCEKSTPIGTSCQGAMLPSITNVINLADSHDRAAFAMVTHVKQEPRERENSESKEEDVEIDIELAPGDQTSTPKTKELSEKDIGNQLHMLTNRHDKFLDTLREVKTGALLSAFVQLCHISTTLAEKTWVQLFPRLWKILSDRQQHALAGEISPFLCSGSHQVQRDCQPSALNCFVEAMSQCVPPIPIRPCVLKYLGKTHNLWFRSTLMLEHQAFEKGLSLQIKPKQTTEFYEQESITPPQQEILDSLAELYSLLQEEDMWAGLWQKRCKYSETATAIAYEQHGFFEQAQESYEKAMDKAKKEHERSNASPAIFPEYQLWEDHWIRCSKELNQWEALTEYGQSKGHINPYLVLECAWRVSNWTAMKEALVQVEVSCPKEMAWKVNMYRGYLAICHPEEQQLSFIERLVEMASSLAIREWRRLPHVVSHVHTPLLQAAQQIIELQEAAQINAGLQPTNLGRNNSLHDMKTVVKTWRNRLPIVSDDLSHWSSIFMWRQHHYQAIVTAYENSSQHDPSSNNAMLGVHASASAIIQYGKIARKQGLVNVALDILSRIHTIPTVPIVDCFQKIRQQVKCYLQLAGVMGKNECMQGLEVIESTNLKYFTKEMTAEFYALKGMFLAQINKSEEANKAFSAAVQMHDVLVKAWAMWGDYLENIFVKERQLHLGVSAITCYLHACRHQNESKSRKYLAKVLWLLSFDDDKNTLADAVDKYCIGVPPIQWLAWIPQLLTCLVGSEGKLLLNLISQVGRVYPQAVYFPIRTLYLTLKIEQRERYKSDSGQQQPSSVGNQSHSASDPGPIRATAPMWRCSRIMHMQRELHPTLLSSLEGIVDQMVWFRENWHEEVLRQLQQGLAKCYSVAFEKSGAVSDAKITPHTLNFVKKLVSTFGVGLENVSNVSTMFSSAASESLARRAQATAQDPVFQKLKGQFTTDFDFSVPGSMKLHNLISKLKKWIKILEAKTKQLPKFFLIEEKCRFLSNFSAQTAEVEIPGEFLMPKPTHYYIKIARFMPRVEIVQKHNTAARRLYIRGHNGKIYPYLVMNDACLTESRREERVLQLLRLLNPCLEKRKETTKRHLFFTVPRVVAVSPQMRLVEDNPSSLSLVEIYKQRCAKKGIEHDNPISRYYDRLATVQARGTQASHQVLRDILKEVQSNMVPRSMLKEWALHTFPNATDYWTFRKMFTIQLALIGFAEFVLHLNRLNPEMLQIAQDTGKLNVAYFRFDINDATGDLDANRPVPFRLTPNISEFLTTIGVSGPLTASMIAVARCFAQPNFKVDGILKTVLRDEIIAWHKKTQEDTSSPLSAAGQPENMDSQQLVSLVQKAVTAIMTRLHNLAQFEGGESKVNTLVAAANSLDNLCRMDPAWHPWL

SEQ ID NO: 14009 - protein, 324 aa, Homo sapiens
MLWFRGALGVWVWLAAASQPCKNSNAGRRGQHPRRPAGSCVQRLTMRNTSKELQGATHRYAPCDWYYHVPVKRSEKAVDAPPASQIPGLSNLGDSHSENLPGTRRYWIKETDSEYVKLAKQGGRPDLLKHFAPGTRKGSPVAYSLPDWYIHHSKPPTASQQEVRAVSMPDYMVHEEFNPDQANGSYASRRGPFDFDMKTVWQREAEELEKEKKKLRLPAIDSKYLSKAGTPLGPKNPAGSRLSFPPVNGYKDEWLQQQQRADSDKRTPKTSRASVLSQSPRDLEGPQDAARLQDAEASEGPEDTPESSQSPEESVSASTPAELK

SEQ ID NO: 14010 - protein, 227 aa, Homo sapiens
MPGHPESRKTRRILTMLPRLVLNSFPQVILLPNPPKVLRLQGLLAFSDVVIEFSPEEWACLDPAQRNLYRDVMFENYRNLVSLAILSYSIQDLLPEQDMKDLCQKVTLTRHRSWGLDNLHLVKDWRTVNEGKGQKEYCNRLTQCSSTKSKIFQCIECGRNFSWRSILTEHKRIHTGEKPYKCEECGKVFNRCSNLTKHKRIHTGEKPYKCDECGKVFNWWSQLTNHK

SEQ ID NO: 14011 - protein, 1153 aa, Homo sapiens
MKALDEPPYLTVGTDVSAKYRGAFCEAKIKTAKRLVKVKVTFRHDSSTVEVQDDHIKGPLKVGAIVEVKNLDGAYQEAVINKLTDASWYTVVFDDGDEKTLRRSSLCLKGERHFAESETLDQLPLTNPEHFGTPVIGKKTNRGRRSNHIPEEESSSSSSDEDEDDRKQIDELLGKVVCVDYISLDKKKALWFPALVVCPDCSDEIAVKKDNILVRSFKDGKFTSVPRKDVHEITSDTAPKPDAVLKQAFEQALEFHKSRTIPANWKTELKEDSSSSEAEEEEEEEDDEKEKEDNSSEEEEEIEPFPEERENFLQQLYKFMEDRGTPINKRPVLGYRNLNLFKLFRLVHKLGGFDNIESGAVWKQVYQDLGIPVLNSAAGYNVKCAYKKYLYGFEEYCRSANIEFQMALPEKVVNKQCKECENVKEIKVKEENETEIKEIKMEEERNIIPREEKPIEDEIERKENIKPSLGSKKNLLESIPTHSDQEKEVNIKKPEDNENLDDKDDDTTRVDESLNIKVEAEEEKAKSGDETNKEEDEDDEEAEEEEEEEEEEEDEDDDDNNEEEEFECYPPGMKVQVRYGRGKNQKMYEASIKDSDVEGGEVLYLVHYCGWNVRYDEWIKADKIVRPADKNVPKIKHRKKIKNKLDKEKDKDEKYSPKNCKLRRLSKPPFQTNPSPEMVSKLDLTDAKNSDTAHIKSIEITSILNGLQASESSAEDSEQEDERGAQDMDNNGKEESKIDHLTNNRNDLISKEEQNSSSLLEENKVHADLVISKPVSKSPERLRKDIEVLSEDTDYEEDEVTKKRKDVKKDTTDKSSKPQIKRGKRRYCNTEECLKTGSPGKKEEKAKNKESLCMENSSNSSSDEDEEETKAKMTPTKKYNGLEEKRKSLRTTGFYSGFSEVAEKRIKLLNNSDERLQNSRAKDRKDVWSSIQGQWPKKTLKELFSDSDTEAAASPPHPAPEEGVAEESLQTVAEEESCSPSVELEKPPPVNVDSKPIEEKTVEVNDRKAEFPSSGSNSVLNTPPTTPESPSSVTVTEGSRQQSSVTVSEPLAPNQEEVRSIKSETDSTIEVDSVAGELQDLQSEGNSSPAGFDASVSSSSSNQPEPEHPEKACTGQKRVKDAQGGGSSSKKQKRSHKATVVNNKKKGKGSAPH

SEQ ID NO: 14012 - protein, 791 aa, Homo sapiens
MQLSQDYNNEDEFGRKLRFLLQQLPPVNYSLLKFLCRFLANVASHHEEIWSANSLAAVFGPDVFHIYTDVEDMKEQEIVSRIMAGLLENYYEFFENEEEDFSSNDLSSITEQVNELSEEEEEDEKLEHIEELPEEGAEKSNDMPEVVQLRMTENILESNSVTATSTHISPISILPASTDILERTIRAAVEQHLFDLQSSIDHDLKNLQQQSVVCNNEAESIHCDGEGSNNQIDIADDIINASESNRDCSKPVASTNLDNEAMQQDCVFENEENTQSVGILLEPCSDRGDSEDGCLEREEYLLFDSDKLSHLILDSSSKICDLNANTESEVPGGQSVGVQGEAACVSIPHLDLKNVSDGDKWEASCPITFPLIDFKTMHLQRDGEEPFPAFKSWQEDSESGEAQLSPQAGRMNHHPLEEDCPPVLSHRSLDFGQSQRFLHDPEKLDSSSKALSFTRIRRSSFSSKDEKREDRTPYQLVKKLQKKIRQFEEQFERERNSKPSYSDIAANPKVLKWMTELTKLRKQIKDAKHKNSDGEFVPQTRPRSNTLPKSFGSSLDHEDEENEDEPKVIQKEKKPSKEATLELILKRLKEKRIERCLPEDIKVTKEERHIVKPLYDRYRLVKQMLTRASITPVLGSPSTKRRGQMLQPIIEGETAHFFEEIKEEEEDGVNLSSELGDMLKTAVQVQSSLENSESDVEENQEKLALDLRLSSSRAASMPELLEQLWKARAEKKKLRKTLREFEEAFYQQNGRNAQKEDRVPVLEEYREYKKIKAKLRLLEVLISKQDSSKSI

SEQ ID NO: 14013 - protein, 392 aa, Homo sapiens
MDNYSTGYDVKPPCLYQMPLSGQQSSIKVEDIQMHNYQQHSHLPPQSEEMMPHSGSVYYKPSSPPTPTTPGFQVQHSPMWDDPGSLHNFHQNYVATTHMIEQRKTPVSRLSLFSFKQSPPGTPVSSCQMRFDGPLHVPMNPEPAGSHHVVDGQTFAVPNPIRKPASMGFPGLQIGHASQLLDTQVPSPPSRGSPSNEGLCAVCGDNAACQHYGVRTCEGCKGFFKRTVQKNAKYVCLANKNCPVDKRRRNRCQYCRFQKCLAVGMVKEVVRTDSLKGRRGRLPSKPKSPQEPSPPSPPVSLISALVRAHVDSNPAMTSLDYSRFQANPDYQMSGDDTQHIQQFYDLLTGSMEIIRGWAEKIPGFADLPKADQDLLFESAFLELFVLRLAYRI

SEQ ID NO: 14014 - protein, 741 aa, Homo sapiens
KDEKNTEFQQRFILKRDDASMDRDDNQDGRRSKSIEEREEEYQRVRERIFARETGQNGYLNDIRGNREGLSRTSSSRQSSTDSELKSLEPRPWSSTDSDGSVRSMRPPVTKASSFSGISILTRGDSIGSSKGGSAGRISRPGMALGAPEVCNQVTSSQSVRGLLPCTAQQQQQQQQQQLPALPPTPQQQPPLNNHMISQADDLSNPFGQMSLSRQGSTEAADPSAALFQTPLISQHPQQTSFIMASTGQPLPTSNYSTSSHAPPTQQVLPPQGYMQPPQQIQVSYYPPGQYPNSNQQYRPLSHPVAYSPQRGQQLPQPSQQPGLQPMMPNQQQAAYQGMIGVQQPQNQGLLSSQRSSMGGQMQGLVVQYTPLPSYQVPVGSDSQNVVQPPFQQPMLVPVSQSVQGGLPAAGVPVYYSMIPPAQQNGTSPSVGFLQPPGSEQYQMPQSPSPCSPPQMPQQYSGVSPSGPGVVVMQLNVPNGPQPPQNPSMVQWSHCKYYSMDQRGQKPGDLYSPDSSPQANTQMSSSPVTSPTQSPAPSPVTSLSSVCTGLSPLPVLTQFPRPGGPAQGDGRYSLLGQPLQYNLSICPPLLHGQSTYTVHQGQSGLKHGNRGKRQALKSASTDLGTADVVLGRVLEVTDLPEGITRTEADKLFTQLAMSGAKIQWLKDAQGLPGGGGGDNSGTAENGRHSDLAALYTIVAVFPSPLAAQNASLRLNNSVSRFKLRMAKKNYDLRILERASSQ

SEQ ID NO: 14015 - protein, 1222 aa, Homo sapiens
MAAARRLMALAAGISPRLQPLGPRAAGRQGRSRGFSSSCAHPDHTKEAAEAESGMAPGGPGEGDGSLVNASRDLLKEFPQPKNLLNSVIGRALGISHAKDKLVYVHTNGPKKKKVTLHIKWPKSVEVEGYGSKKIDAERQAAAAACQLFKGWGLLGPRNELFDAAKYRVLADRFGSPADSWWRPEPTMPPTSWRQLNPESIRPGGPGGLSRSLGREEEEDEEEELEEGTIDVTDFLSMTQQDSHAPLRDSRGSSFEMTDDDSAIRALTQFPLPKNLLAKVIQIATSSSTAKNLMQFHTVGTKTKLSTLTLLWPCPMTFVAKGRRKAEAENKAAALACKKLKSLGLVDRNNEPLTHAMYNLASLRELGETQRRPCTIQVPEPILRKIETFLNHYPVESSWIAPELRLQSDDILPLGKDSGPLSDPITGKPYVPLLEAEEVRLSQSLLELWRRRGPVWQEAPQLPVDPHRDTILNAIEQHPVVVISGDTGCGKTTRIPQLLLERYVTEGRGARCNVIITQPRRISAVSVAQRVSHELGPSLRRNVGFQVRLESKPPSRGGALLFCTVGILLRKLQSNPSLEGVSHVIVDEVHERDVNTDFLLILLKGLQRLNPALRLVLMSATGDNERFSRYFGGCPVIKVPGFMYPVKEHYLEDILAKLGKHQYLHRHRHHESEDECALDLDLVTDLVLHIDARGEPGGILCFLPGWQEIKGVQQRLQEALGMHESKYLILPVHSNIPMMDQKAIFQQPPVGVRKIVLATNIAETSITINDIVHVVDSGLHKEERYDLKTKVSCLETVWVSRANVIQRRGRAGRCQSGFAYHLFPRSRLEKMVPFQVPEILRTPLENLVLQAKIHMPEKTAVEFLSKAVDSPNIKAVDEAVILLQEIGVLDQREYLTTLGQRLAHISTDPRLAKAIVLAAIFRCLHPLLVVVSCLTRDPFSSSLQNRAEVDKVKALLSHDSGSDHLAFVRAVAGWEEVLRWQDRSSRENYLEENLLYAPSLRFIHGLIKQFSENIYEAFLVGKPSDCTLASAQCNEYSEEEELVKGVLMAGLYPNLIQVRQGKVTRQGKFKPNSVTYRTKSGNILLHKSTINREATRLRSRWLTYFMAVKSNGSVFVRDSSQVHPLAVLLLTDGDVHIRDDGRRATISLSDSDLLRLEGDSRTVRLLKELRRALGRMVERSLRSELAALPPSVQEEHGQLLALLAELLRGPCGSFDVRKTADD

SEQ ID NO: 14016 - protein, 462 aa, Homo sapiens
MLAVPNMRFGIFLLWWGWVLATESRMHWPGREVHEMSKKGSPILRRSPDITKSPLTKSEQLLRIDDHDFSMRPGFGGPAIPVGVDVQVESLDSISEVDMDFTMTLYLRHYWKDERLSFPSTNNLSMTFDGRLVKKIWVPDMFFVHSKRSFIHDTTTDNVMLRVQPDGKVLYSLRVTVTAMCNMDFSRFPLDTQTCSLEIESYAYTEDDLMLYWKKGNDSLKTDERISLSQFLIQEFHTTTKLAFYSSTGWYNRLYINFTLRRHIFFFLLQTYFPATLMVMLSWVSFWIDRRAVPARVPLGITTVLTMSTIITGVNASMPRVSYIKAVDIYLWVSFVFVFLSVLEYAAVNYLTTVQERKEQKLREKLPCTSGLPPPRTAMLDGNYSDGEVNDLDNYMPENGEKPDRMMVQLTLASERSSPQRKSQRSSYVSMRIDTHAIDKYSRIIFPAAYILFNLIYWSIFS

SEQ ID NO: 14017 - protein, 711 aa, Homo sapiens
MVLTLGESWPVLVGRRFLSLSAADGSDGSHDSWDVERVAEWPWLSGTIRAVSHTDVTKKDLKVCVEFDGESWRKRRWIEVYSLLRRAFLVEHNLVLAERKSPEISERIVQWPAITYKPLLDKAGLGSITSVRFLGDQQRVFLSKDLLKPIQDVNSLRLSLTDNQIVSKEFQALIVKHLDESHLLKGDKNLVGSEVKIYSLDPSTQWFSATVINGNPASKTLQVNCEEIPALKIVDPSLIHVEVVHDNLVTCGNSARIGAVKRKSSENNGTLVSKQAKSCSEASPSMCPVQSVPTTVFKEILLGCTAATPPSKDPRQQSTPQAANSPPNLGAKIPQGCHKQSLPEEISSCLNTKSEALRTKPDVCKAGLLSKSSQIGTGDLKILTEPKGSCTQPKTNTDQENRLESVPQALTGLPKECLPTKASSKAELEIANPPELQKHLEHAPSPSDVSNAPEVKAGVNSDSPNNCSGKKVEPSALACRSQNLKESSVKVDNESCCSRSNNKIQNAPSRKSVLTDPAKLKKLQQSGEAFVQDDSCVNIVAQLPKCRECRLDSLRKDKEQQKDSPVFCRFFHFRRLQFNKHGVLRVEGFLTPNKYDNEAIGLWLPLTKNVVGIDLDTAKYILANIGDHFCQMVISEKEAMSTIEPHRQVAWKRAVKGVREMCDVCDTTIFNLHWVCPRCGFGVCVDCYRMKRKNCQQGENRFDSPPAPLHS

SEQ ID NO: 14018 - protein, 346 aa, Homo sapiens
MRLLFLAVLRPHTGNAVTAQRVRAHLEAAGHVCVLKDAFDFESRSEIANLILAENCEAALALHLYRGGRLLQGHRIPFGVIFGGTDVNEDANQAEKNTVMGRVLEEARFAVAFTESMKEMAQAQWPHAKGKVYVQSQGIATTPNAAFNWNTFLQRSEINQSADNLHIFLLICGLRQVKDPLYLVDAFSAWHQEEPNVHLVIVGPEVDPVFTREVKAKVKRAAGVRLIGEMPQEDLHAVVKNCFAVVNSSVSEGMSAAILEAMDLEVPVLARNIPGNAAVVKHEVTGLLFSNPQEFVHLAKRLVSDPALEKEIVVNGREYVRMYHSWQVERDTYQQLIRKLEGSTED

SEQ ID NO: 14019 - protein, 1012 aa, Homo sapiens
MLLKSIFIVYIFFYSISELSLDSTLHAVNLHCNNISKIEAIDHIWNLQHLDLSSNQISRIEGLNTLTKLCTLNLSCNLITKVEGLEELINLTRLNVSYNHIDDLSGLIPLHGIKHKLRYIDLHSNRIDSIHHLLQCMVGLHFLTNLILEKDGDDNPVCRLPGYRAVILQTLPQLRILDCKNIFGEPVNLTEINSSQLQCLEGLLDNLVSSDSPLNISEDEIIDRMPVITAPIDELVPLEQFASTPSDAVLTSFMSVCQSSEPEKNNHENDLQNEIKLQKLDDQILQLLNETSNSIDNVLEKDPRPKRDTDITSESDYGNRKECNRKVPRRSKIPYDAKTIQTIKHHNKNYNSFVSCNRKMKPPYLKELYVSSSLANCPMLQESEKPKTEIIKVDQSHSEDNTYQSLVEQLDQEREKRWRAEQAENKLMDYIDELHKHANEKEDIHSLALLTTDRLKEIIFRERNSKGQLEVMVHKLQNEIKKLTVELMKAKDQQEDHLKHLRTLEKTLEKMERQKRQQQAAQIRLIQEVELKASAADREIYLLRTSLHREREQAQQLHQLLALKEQEHRKELETREFFTDADFQDALAKEIAKEEKKHEQMIKEYQEKIDVLSQQYMDLENEFRIALTVEARRFQDVKDGFENVATELAKSKHALIWAQRKENESSSLIKDLTCMVKEQKTKLAEVSKLKQETAANLQNQINTLEILIEDDKQKSIQIELLKHEKVQLISELAAKESLIFGLRTERKVWGHELAQQGSSLAQNRGKLEAQIESLSRENECLRKTNESDSDALRIKCKIIDDQTETIRKLKDCLQEKDEHIKRLQEKITEIEKCTQEQLDEKSSQLDEVLEKLERHNERKEKLKQQLKGKEVELEEIRKAYSTLNRKWHDKGELLCHLETQVKEVKEKFENKEKKLKAERDKSIELQKNAMEKLHSMDDAFKRQVDAIVEAHQAEIAQLANEKQKCIDSANLKVHQIEKEMRELLEETCKNKKTMEAKIKQLAFALNEIQQDM

SEQ ID NO: 14020 - protein, 173 aa, Homo sapiens
MLQDLSASVFFPPCSQHRTLAQVPDNDEQFVPDYQAESLAFHGLPLKIKKEPHSPCSEISSACSQEQPFKFSYGEKCLYNVRFRRQLSEPCNSFPPLPTMPREGRPMYQRQMSEPNIPFPPQGFKQEYHDPVYEHNTMVGSAASQSFPPPLMIKQEPRDFAYDSEVPSCHSIY

SEQ ID NO: 14021 - protein, 769 aa, Homo sapiens
MYPQGRHPAPHQPGQPGFKFTVAESCDRIKDEFQFLQAQYHSLKVEYDKLANEKTEMQRHYVMYYEMSYGLNIEMHKQTEIAKRLNTILAQIMPFLSQEHQQQVAQAVERAKQVTMTELNAIIGQQQLQAQHLSHATHGPPVQLPPHPSGLQPPGIPPVTGSSSGLLALGALGSQAHLTVKDEKNHHELDHRERESSANNSVSPSESLRASEKHRGSADYSMEAKKRKAEEKDSLSRYDSDGDKSDDLVVDVSNEDPATPRVSPAHSPPENGLDKARSLKKDAPTSPASVASSSSTPSSKTKDLGHNDKSSTPGLKSNTPTPRNDAPTPGTSTTPGLRSMPGKPPGMDPIASALRTPISITSSYAAPFAMMSHHEMNGSLTSPGAYAGLHNIPPQMSAAAAAAAAAYGRSPMVSFGAVGFDPHPPMRATGLPSSLASIPGGKPAYSFHVSADGQMQPVPFPHDALAGPGIPRHARQINTLSHGEVVCAVTISNPTRHVYTGGKGCVKIWDISQPGSKSPISQLDCLNRDNYIRSCKLLPDGRTLIVGGEASTLTIWDLASPTPRIKAELTSSAPACYALAISPDAKVCFSCCSDGNIAVWDLHNQTLVRQFQGHTDGASCIDISHDGTKLWTGGLDNTVRSWDLREGRQLQQHDFTSQIFSLGYCPTGEWLAVGMESSNVEVLHHTKPDKYQLHLHESCVLSLKFAYCGKWFVSTGKDNLLNAWRTPYGASIFQSKESSSVLSCDISADDKYIVTGSGDKKATVYEVIY

SEQ ID NO: 14022 - protein, 157 aa, Homo sapiens
MELRCGGLLFSSRFDSGNLAHVEKVESLSSDGEGVGGGASALTSGIASSPDYEFNVWTRPDCAETEFENGNRSWFYFSVRGGMPGKLIKINIMNMNKQSKLYSQGMAPFVRTLPTRPRWERIRDRPTFEMTETQFVLSFVHRFVEGRGATTFFAFCY

SEQ ID NO: 14023 - protein, 288 aa, Homo sapiens
LEKFLFILSRKNLSVWKEEAIIEPVIKWTAHDVENRIECLYNLLSYINIDIDPVYLKTALGLQRSCLLTENKIRSLIYNALNPMHKEISQRSTATMYIIGGYYWHPLSEVHIWDPLTNVWIQGAEIPDYTRESYGVTCLGPNIYVTGGYRTDNIEALDTVWIYNSESDEWTEGLPMLNARYYHCAVTLGGCVYALGGYRKGAPAEEAEFYDPLKEKWIPIANMIKGVGNATACVLHDVIYVIGGHCGYRGSCTYDKVQSYNSDINEWSLITSSPHPGKKTWYVGAFSI

SEQ ID NO: 14024 - protein, 526 aa, Homo sapiens
MAAGRRPASALWPERRGSPLRGDLLGFQNVREPSSCGETLSGMRHSKRTYCPDWDDKDWDYGKWRSSSSHKRRKRSHSSAQENKRCKYNHSKMCDSHYLESRSINEKDYHSRRYIDEYRNDYTQGCEPGHRQRDHESRYQNHSSKSSGRSGRSSYKSKHRIHHSTSHRRSHGKSHRRKRTRSVEDDEEGHLICQSGDVLSARYEIVDTLGEGAFGKVVECIDHKAGGRHVAVKIVKNVDRYCEAARSEIQVLEHLNTTDPNSTFRCVQMLEWFEHHGHICIVFELLGLSTYDFIKENGFLPFRLDHIRKMAYQICKSVNFLHSNKLTHTDLKPENILFVQSDYTEAYNPKIKRDERTLINPDIKVVDFGSATYDDEHHSTLVSTRHYRAPEVILALGWSQPCDVWSIGCILIEYYLGFTVFPTHDSKEHLAMMERILGPLPKHMIQKTRKRKYFHHDRLDWDEHSSAGRYVSRRCKPLKEFMLSQDVEHERLFDLIQKMLEYDPAKRITLREALKHPFFDLLKKSI

SEQ ID NO: 14025 - protein, 825 aa, Homo sapiens
MRSGAAPRARPRPPALALPPTGPESLTHFPFSDEDTRRHPPGRSVSFEAENGPTPSPGRSPLDSQASPGLVLHAGAATSQRRESFLYRSDSDYDMSPKTMSRNSSVTSEAHAEDLIVTPFAQVLASLRSVRSNFSLLTNVPVPSNKRSPLGGPTPVCKATLSEETCQQLARETLEELDWCLEQLETMQTYRSVSEMASHKFKRMLNRELTHLSEMSRSGNQVSEYISTTFLDKQNEVEIPSPTMKEREKQQAPRPRPSQPPPPPVPHLQPMSQITGLKKLMHSNSLNNSNIPRFGVKTDQEELLAQELENLNKWGLNIFCVSDYAGGRSLTCIMYMIFQERDLLKKFRIPVDTMVTYMLTLEDHYHADVAYHNSLHAADVLQSTHVLLATPALDAVFTDLEILAALFAAAIHDVDHPGVSNQFLINTNSELALMYNDESVLENHHLAVGFKLLQEDNCDIFQNLSKRQRQSLRKMVIDMVLATDMSKHMTLLADLKTMVETKKVTSSGVLLLDNYSDRIQVLRNMVHCADLSNPTKPLELYRQWTDRIMAEFFQQGDRERERGMEISPMCDKHTASVEKSQVGFIDYIVHPLWETWADLVHPDAQEILDTLEDNRDWYYSAIRQSPSPPPEEESRGPGHPPLPDKFQFELTLEEEEEEEISMAQIPCTAQEALTAQGLSGVEEALDATIAWEASPAQESLEVMAQEASLEAELEAVYLTQQAQSTGSAPVAPDEFSSREEFVVAVSHSSPSALALQSPLLPAWRTLSVSEHAPGLPGLPSTAAEVEAQREHQAAKRACSACAGTFGEDTSALPAPGGGGSGGDPT

SEQ ID NO: 14026 - protein, 194 aa, Homo sapiens
AGPAFLRGVSSEGAVDTDCPAVLLLLNPQHGEPSLQRVPVAKMVCGPSGSQLVLLKLERSVTLNQRVALICLPPEWYVVPPGTKCEIAGWGETKGTGNDTVLNVALLNVISNQECNIKHRGRVRESEMCTEGLLAPVGACEGDYGGPLACFTHNCWVLEGIIIPNRVCARSRWPAVFTRVSVFVDWIHKVMRLG

SEQ ID NO: 14027 - protein, 1163 aa, Homo sapiens
MDRNREAEMELRRGPSPTRAGRGHEVDGDKATCHTCCICGKSFPFQSSLSQHMRKHTGEKPYKCPYCDHRASQKGNLKIHIRSHRTGTLIQGHEPEAGEAPLGEMRASEGLDACASPTKSASACNRLLNGASQADGARVLNGASQADSGRVLLRSSKKGAEGSACAPGEAKAAVQCSFCKSQFERKKDLELHVHQAHKPFKCRLCSYATLREESLLSHIERDHITAQGPGSGEACVENGKPELSPGEFPCEVCGQAFSQTWFLKAHMKKHRGSFDHGCHICGRRFKEPWFLKNHMKAHGPKTGSKNRPKSELDPIATINNVVQEEVIVAGLSLYEVCAKCGNLFTNLDSLNAHNAIHRRVEASRTRAPAEEGAEGPSDTKQFFLQCLNLRPSAAGDSCPGTQAGRRVAELDPVNSYQAWQLATRGKVAEPAEYLKYGAWDEALAGDVAFDKDRREYVLVSQEKRKREQDAPAAQGPPRKRASGPGDPAPAGHLDPRSAARPNRRAAATTGQGKSSECFECGKIFRTYHQMVLHSRVHRRARRERDSDGDRAARARCGSLSEGDSASQPSSPGSACAAADSPGSGLADEAAEDSGEEGAPEPAPGGQPRRCCFSEEVTSTELSSGDQSHKMGDNASERDTGESKAGIAASVSILENSSRETSRRQEQHRFSMDLKMPAFHPKQEVPVPGDGVEFPSSTGAEGQTGHPAEKLSDLHNKEHSGGGKRALAPDLMPLDLSARSTRDDPSNKETASSLQAALVVHPCPYCSHKTYYPEVLWMHKRIWHRVSCNSVAPPWIQPNGYKSIRSNLVFLSRSGRTGPPPALGGKECQPLLLARFTRTQVPGGMPGSKSGSSPLGVVTKAASMPKNKESHSGGPCALWAPGPDGYRQTKPCHGQEPHGAATQGPLAKPRQEASSKPVPAPGGGGFSRSATPTPTVIARAGAQPSANSKPVEKFGVPPAGAGFAPTNKHSAPDSLKAKFSAQPQGPPPAKGEGGAPPLPPREPPSKAAQELRTLATCAAGSRGDAALQAQPGVAGAPPVLHSIKQEPVAEGHEKRLDILNIFKTYIPKDFATLYQGWGVSGPGLEHRGTLRTQARPGEFVCIECGKSFHQPGHLRAHMRAHSVVFESDGPRGSEVHTTSADAPKQGRDHSNTGTVQTVPLRKGT

SEQ ID NO: 14028 - protein, 803 aa, Homo sapiens
MAAAGLVAVAAAAEYSGTVASGGNLPGVHCGPSSGAGPGFGPGSWSRSLDRALEEAAVTGVLSLSGRKLREFPRGAANHDLTDTTRADLSRNRLSEIPIEACHFVSLENLNLYQNCIRYIPEAILNLQALTFLNISRNQLSTLPVHLCNLPLKVLIASNNKLVSLPEEIGHLRHLMELDVSCNEIQTIPSQIGNLEALRDLNVRRNHLVHLPEELAELPLIRLDFSCNKITTIPVCYRNLRHLQTITLDNNPLQSPPAQICIKGKVHIFKYLNIQACKIAPDLPDYDRRPLGFGSCHEELYSSRPYGALDSGFNSVDSGDKRWSGNEPTDEFSDLPLRVAEITKEQRLRRESQYQENRGSLVVTNGGVEHDLDQIDYIDSCTAEEEEAEVRQPKGPDPDSLSSQFMAYIEQRRISHEGSPVKPVAIREFQKTEDMRRYLHQNRVPAEPSSLLSLSASHNQLSHTDLELHQRREQLVERTRREAQLAALQYEEEKIRTKQIQRDAVLDFVKQKASQSPQKQHPLLDGVDGECPFPSRRSQHTDDSALCMSLSGLNQVGCAATLPHSSAFTPLKSDDRPNALLSSPATETVHHSPAYSFPAAIQRNQPQRPESFLFRAGVRAETNKGHASPLPPSAAPTTDSTDSITGQNSRQREEELELIDQLRKHIEYRLKVSLPCDLGAALTDGVVLCHLANHVRPRSVPSIHVPSPAVPKLTMAKCRRNVENFLEACRKIGVPQDNLCSPSDILQLNLSVKRTVETLLSLGAHSEESSFVCLSLQLLGFVAFYCTVMLTLCVLYYWLFPAR

SEQ ID NO: 14029 - protein, 158 aa, Homo sapiens
MGVPRTPSRTVLFERERTGLTYRVPSLLPVPPGPTLLAFVEQRLSPDDSHAHRLVLRRGTLAGGSVRWGALHVLGTAALAEHRSMNPCPVHDAGTGTVFLFFIAVLGHTPEAVQIATGRNAARLCCVASRDAGLSWGSARDLTEEAIGGAVQEEKAGR

SEQ ID NO: 14030 - protein, 4069 aa, Homo sapiens
MASRDSNHAGESFLGSDGDEEATRELETEEESEGEEDETAAESEEEPDSRLSDQDEEGKIKQEYIISDPSFSMVTVQREDSGITWETNSSRSSTPWASEESQTSGVCSREGSTVNSPPGNVSFIVDEVKKVRKRTHKSKHGSPSLRRKGNRKRNSFESQDVPTNKKGSPLTSASQVLTTEKEKSYTGIYDKARKKKTTSNTPPITGAIYKEHKPLVLRPVYIGTVQYKIKMFNSVKEELIPLQFYGTLPKGYVIKEIHYRKGKDASISLEPDLDNSGSNTVSKTRKLVAQSIEDKVKEVFPPWRGALSKGSESLTLMFSHEDQKKIYADSPLNATSALEHTVPSYSSSGRAEQGIQLRHSQSVPQQPEDEAKPHEVEPPSVTPDTPATMFLRTTKEECELASPGTAASENDSSVSPSFANEVKKEDVYSAHHSISLEAASPGLAASTQDGLDPDQEQPDLTSIERAEPVSAKLTPTHPSVKGEKEENMLEPSISLSEPLMLEEPEKEEIETSLPIAITPEPEDSNLVEEEIVELDYPESPLVSEKPFPPHMSPEVEHKEEELILPLLAASSPEHVALSEEEREEIASVSTGSAFVSEYSVPQDLNHELQEQEGEPVPPSNVEAIAEHAVLSEEENEEFEAYSPAAAPTSESSLSPSTTEKTSENQSPLFSTVTPEYMVLSGDEASESGCYTPDSTSASEYSVPSLATKESLKKTIDRKSPLILKGVSEYMIPSEEKEDTGSFTPAVAPASEPSLSPSTTEKTSECQSPLPSTATSEHVVPSEGEDLGSERFTPDSKLISKYAAPLNATQESQKKIINEASQFKPKGISEHTVLSVDGKEVIGPSSPDLVVASEHSFPPHTTEMTSECQAPPLSATPSEYVVLSDEEAVELERYTPSSTSASEFSVPPYATPEAQEEEIVHRSLNLKGASSPMNLSEEDQEDIGPFSPDSAFVSEFSFPPYATQEAEKREFECDSPICLTSPSEHTILSDEDTEEAELFSPDSASQVSIPPFRISETEKNELEPDSLLTAVSASGYSCFSEADEEDIGSTAATPVSEQFSSSQKQKAETFPLMSPLEDLSLPPSTDKSEKAEIKPEIPTTSTSVSEYLILAQKQKTQAYLEPESEDLIPSHLTSEVEKGEREASSSVAAIPAALPAQSSIVKEETKPASPHSVLPDSVPAIKKEQEPTAALTLKAADEQMALSKVRKEEIVPDSQEATAHVSQDQKMEPQPPNVPESEMKYSVLPDMVDEPKKGVKPKLVLNVTSELEQRKLSKNEPEVIKPYSPLKETSLSGPEALSAVKMEMKHDSKITTTPIVLHSASSGVEKQVEHGPPALAFSALSEEIKKEIEPSSSTTTASVTKLDSNLTRAVKEEIPTDSSLITPVDRPVLTKVGKGELGSGLPPLVTSADEHSVLAEEDKVAIKGASPIETSSKHLAWSEAEKEIKFDSLPSVSSIAEHSVLSEVEAKEVKAGLPVIKTSSSQHSDKSEEARVEDKQDLLFSTVCDSERLVSSQKKSLMSTSEVLEPEHELPLSLWGEIKKKETELPSSQNVSPASKHIIPKGKDEETASSSPELENLASGLAPTLLLLSDDKNKPAVEVSSTAQGDFPSEKQDVALAELSLEPEKKDKPHQPLELPNAGSEFSSDLGRQSGSIGTKQAKSPITETEDSVLEKGPAELRSREGKEENRELCASSTMPAISELSSLLREESQNEEIKPFSPKIISLESKEPPASVAEGGNPEEFQPFTFSLKGLSEEVSHPADFKKGGNQEIGPLPPTGNLKAQVMGDILDKLSEETGHPNSSQVLQSITEPSKIAPSDLLVEQKKTEKALHSDQTVKLPDVSTSSEDKQDLGIKQFSLMRENLPLEQSKSFMTTKPADVKETKMEEFFISPKDENWMLGKPENVASQHEQRIAGSVQLDSSSSNELRPGQLKAAVSSKDHTCEVRKQVLPHSAEESHLSSQEAVSALDTSSGNTETLSSKSYSSEEVKLAEEPKSLVLAGNVERNIAEGKEIHSLMESESLLLEKANTELSWPSKEDSQEKIKLPPERFFQKPVSGLSVEQVKSETISSSVKTAHFPAEGVEPALGNEKEAHRSTPPFPEEKPLEESKMVQSKVIDDADEGKKPSPEVKIPTQRKPISSIHAREPQSPESPEVTQNPPTQPKVAKPDLPEEKGKKGISSFKSWMSSLFFGSSTPDNKVAEQEDLETQPSPSVEKAVTVIDPEGTIPTNFNVAEKPADHSLSEVKLKTADEPRGTLVKSGDGQNVKEKSMILSNVEDLQQPKFISEVSREDYGKKEISGDSEEMNINSVVTSADGENLEIQSYSLIGEKLVMEEAKTIVPPHVTDSKRVQKPAIAPPSKWNISIFKEEPRSDQKQKSLLSFDVVDKVPQQPKSASSNFASKNITKESEKPESIILPVEESKGSLIDFSEDRLKKEMQNPTSLKISEEETKLRSVSPTEKKDNLENRSYTLAEKKVLAEKQNSVAPLELRDSNEIGKTQITLGSRSTELKESKADAMPQHFYQNEDYNERPKIIVGSEKEKGEEKENQVYVLSEGKKQQEHQPYSVNVAESMSRESDISLGHSLGETQSFSLVKATSVTEKSEAMLAEAHPEIREAKAVGTQPHPLEESKVLVEKTKTFLPVALSCRDEIENHSLSQEGNLVLEKSSRDMPDHSEEKEQFRESELSKGGSVDITKETVKQGFQEKAVGTQPRPLEESKVLVEKTKTFLPVVLSCHDEIENHSLSQEGNLVLEKSSRDMPDHSEEKEQFKESELWKGGSVDITKESMKEGFPSKESERTLARPFDETKSSETPPYLLSPVKPQTLASGASPEINAVKKKEMPRSELTPERHTVHTIQTSKDDTSDVPKQSVLVSKHHLEAAEDTRVKEPLSSAKSNYAQFISNTSASNADKMVSNKEMPKEPEDTYAKGEDFTVTSKPAGLSEDQKTAFSIISEGCEILNIHAPAFISSIDQEESEQMQDKLEYLEEKASFKTIPLPDDSETVACHKTLKSRLEDEKVTPLKENKQKETHKTKEEISTDSETDLSFIQPTIPSEEDYFEKYTLIDYNISPDPEKQKAPQKLNVEEKLSKEVTEETISFPVSSVESALEHEYDLVKLDESFYGPEKGHNILSHPETQSQNSADRNVSKDTKRDVDSKSPGMPLFEAEEGVLSRTQIFPTTIKVIDPEFLEEPPALAFLYKDLYEEAVGEKKKEEETASEGDSVNSEASFPSRNSDTDDGTGIYFEKYILKDDILHDTSLTQKDQGQGLEEKRVGKDDSYQPIAAEGEIWGKFGTICREKSLEEQKGVYGEGESVDHVETVGNVAMQKKAPITEDVRVATQKISYAVPFEDTHHVLERADEAGSHGNEVGNASPEVNLNVPVQVSFPEEEFASGATHVQETSLEEPKILVPPEPSEERLRNSPVQDEYEFTESLHNEVVPQDILSEELSSESTPEDVLSQGKESFEHISENEFASEAEQSTPAEQKELGSERKEEDQLSSEVVTEKAQKELKKSQIDTYCYTCKCPISATDKVFGTHKDHEVSTLDTAISAVKVQLAEFLENLQEKSLRIEAFVSEIESFFNTIEENCSKNEKRLEEQNEEMMKKVLAQYDEKAQSFEEVKKKKMEFLHEQMVHFLQSMDTAKDTLETIVREAEELDEAVFLTSFEEINERLLSAMESTASLEKMPAAFSLFEHYDDSSARSDQMLKQVAVPQPPRLEPQEPNSATSTTIAVYWSMNKEDVIDSFQVYCMEEPQDDQEVNELVEEYRLTVKESYCIFEDLEPDRCYQVWVMAVNFTGCSLPSERAIFRTAPSTPVIRAEDCTVCWNTATIRWRPTTPEATETYTLEYCRQHSPEGEGLRSFSGIKGLQLKVNLQPNDNYFFYVRAINAFGTSEQSEAALISTRGTRFLLLRETAHPALHISSSGTVISFGERRRLTEIPSVLGEELPSCGQHYWETTVTDCPAYRLGICSSSAVQAGALGQGETSWYMHCSEPQRYTFFYSGIVSDVHVTERPARVGILLDYNNQRLIFINAESEQLLFIIRHRFNEGVHPAFALEKPGKCTLHLGIEPPDSVRHK

SEQ ID NO: 14031 - protein, 220 aa, Homo sapiens
MKQPIMADGPRCKRRKQANPRRKNVVNYDNVVDTGSETDEEDKLHIAEDDGIANPLDQETSPASVPNHESSPHVSQALLPREEEEDEIREGGVEHPWHNNEILQASVDGPDLPPGTPDAFAQLLTCPYCDRGYKRLTSLKEHIKYRHEKNEENFSCPLCSYTFAYRTQLERHMVTHKPGTDQHQMLTQGAGNRKFKCTECGKAFKYKHHLKEHLRIHSGT

SEQ ID NO: 14032 - protein, 133 aa, Homo sapiens
MASEDIAKLAETLAKTQVAGGQLSFKGKSLKLNTAEDAKDVIKEIEDFDSLEALRLEGNTVGVEAARVIAKALEKKSELKRCHWSDMFTGRLRTEIPPALISLGEGLITAGAQLVELDLSDNAFGPDGVQGFE

SEQ ID NO: 14033 - protein, 644 aa, Homo sapiens
MDDIADRMRMDAGEVTLVNHNSVFKTHLLPQTGFPEDQLSLSDQQILSSRQGHLDRSFTCSTRSAAYNPSYYSDNPSSDSFLGSGDLRTFGQSANGQWRNSTPSSSSSLQKSRNSRSLYLETRKTSSGLSNSFAGKSNHHCHVSAYEKSFPIKPVPSPSWSGSCRRSLLSPKKTQRRHVSTAEETVQEEEREIYRQLLQMVTGKQFTIAKPTTHFPLHLSRCLSSSKNTLKDSLFKNGNSCASQIIGSDTSSSGSASILTNQEQLSHSVYSLSSYTPDVAFGSKDSGTLHHPHHHHSVPHQPDNLAASNTQSEGSDSVILLKVKDSQTPTPSSTFFQAELWIKELTSVYDSRARERLRQIEEQKALALQLQNQRLQEREHSVHDSVELHLRVPLEKEIPVTVVQETQKKGHKLTDSEDEFPEITEEMEKEIKNVFRNGNQDEVLSEAFRLTITRKDIQTLNHLNWLNDEIINFYMNMLMERSKEKGLPSVHAFNTFFFTKLKTAGYQAVKRWTKKVDVFSVDILLVPIHLGVHWCLAVVDFRKKNITYYDSMGGINNEACRILLQYLKQESIDKKRKEFDTNGWQLFSKKSQEIPQQMNGSDCGMFACKYADCITKDRPINFTQQHMPYFRKRMVWEILHRKLL

SEQ ID NO: 14034 - protein, 2490 aa, Homo sapiens
MHVSLAEALEVRGGPLQEEEIWAVLNQSAESLQELFRKVSLADPAALGFIISPWSLLLLPSGSVSFTDENISNQDLRAFTAPEVLQNQSLTSLSDVEKIHIYSLGMTLYWGADYEVPQSQPIKLGDHLNSILLGMCEDVIYARVSVRTVLDACSAHIRNSNCAPSFSYVKHLVKLVLGNLSGTDQLSCNSEQKPDRSQAIRDRLRGKGLPTGRSSTSDVLDIQKPPLSHQTFLNKGLSKSMGFLSIKDTQDENYFKDILSDNSGREDSENTFSPYQFKTSGPEKKPIPGIDVLSKKKIWASSMDLLCTADRDFSSGETATYRRCHPEAVTVRTSTTPRKKEARYSDGSIALDIFGPQKMDPIYHTRELPTSSAISSALDRIRERQKKLQVLREAMNVEEPVRRYKTYHGDVFSTSSESPSIISSESDFRQVRRSEASKRFESSSGLPGVDETLSQGQSQRPSRQYETPFEGNLINQEIMLKRQEEELMQLQAKMALRQSRLSLYPGDTIKASMLDITRDPLREIALETAMTQRKLRNFFGPEFVKMTIEPFISLDLPRSILTKKGKNEDNRRKVNIMLLNGQRLELTCDTKTICKDVFDMVVAHIGLVEHHLFALATLKDNEYFFVDPDLKLTKVAPEGWKEEPKKKTKATVNFTLFFRIKFFMDDVSLIQHTLTCHQYYLQLRKDILEERMHCDDETSLLLASLALQAEYGDYQPEVHGVSYFRMEHYLPARVMEKLDLSYIKEELPKLHNTYVGASEKETELEFLKVCQRLTEYGVHFHRVHPEKKSQTGILLGVCSKGVLVFEVHNGVRTLVLRFPWRETKKISFSKKKITLQNTSDGIKHGFQTDNSKICQYLLHLCSYQHKFQLQMRARQSNQDAQDIERASFRSLNLQAESVRGFNMGRAISTGSLASSTLNKLAVRPLSVQAEILKRLSCSELSLYQPLQNSSKEKNDKASWEEKPREMSKSYHDLSQASLYPHRKNVIVNMEPPPQTVAELVGKPSHQMSRSDAESLAGVTKLNNSKSVASLNRSPERRKHESDSSSIEDPGQAYVLGMTMHSSGNSSSQVPLKENDVLHKRWSIVSSPEREITLVNLKKDAKYGLGFQIIGGEKMGRLDLGIFISSVAPGGPADLDGCLKPGDRLISVNSVSLEGVSHHAAIEILQNAPEDVTLVISQPKEKISKVPSTPVHLTNEMKNYMKKSSYMQDSAIDSSSKDHHWSRGTLRHISENSFGPSGGLREGSLSSQDSRTESASLSQSQVNGFFASHLGDQTWQESQHGSPSPSVISKATEKETFTDSNQSKTKKPGISDVTDYSDRGDSDMDEATYSSSQDHQTPKQESSSSVNTSNKMNFKTFSSSPPKPGDIFEVELAKNDNSLGISVTVLFDKGGVNTSVRHGGIYVKAVIPQGAAESDGRIHKGDRVLAVNGVSLEGATHKQAVETLRNTGQVVHLLLEKGQSPTSKEHVPVTPQCTLSDQNAQGQGPEKVKKTTQVKDYSFVTEENTFEVKLFKNSSGLGFSFSREDNLIPEQINASIVRVKKLFPGQPAAESGKIDVGDVILKVNGASLKGLSQQEVISALRGTAPEVFLLLCRPPPGVLPEIDTALLTPLQSPAQVLPNSSKDSSQPSCVEQSTSSDENEMSDKSKKQCKSPSRRDSYSDSSGSGEDDLVTAPANISNSTWSSALHQTLSNMVSQAQSHHEAPKSQEDTICTMFYYPQKIPNKPEFEDSNPSPLPPDMAPGQSYQPQSESASSSSMDKYHIHHISEPTRQENWTPLKNDLENHLEDFELEVELLITLIKSEKGSLGFTVTKGNQRIGCYVHDVIQDPAKSDGRLKPGDRLIKVNDTDVTNMTHTDAVNLLRAASKTVRLVIGRVLELPRIPMLPHLLPDITLTCNKEELGFSLCGGHDSLYQVVYISDINPRSVAAIEGNLQLLDVIHYVNGVSTQGMTLEEVNRALDMSLPSLVLKATRNDLPVVPSSKRSAVSAPKSTKGNGSYSVGSCSQPALTPNDSFSTVAGEEINEISYPKGKCSTYQIKGSPNLTLPKESYIQEDDIYDDSQEAEVIQSLLDVVDEEAQNLLNENNAAGYSCGPGTLKMNGKLSEERTEDTDCDGSPLPEYFTEATKMNGCEEYCEEKVKSESLIQKPQEKKTDDDEITWGNDELPIERTNHEDSDKDHSFLTNDELAVLPVVKVLPSGKYTGANLKSVIRVLRGLLDQGIPSKELENLQELKPLDQCLIGQTKENRRKNRYKNILPYDATRVPLGDEGGYINASFIKIPVGKEEFVYIACQGPLPTTVGDFWQMIWEQKSTVIAMMTQEVEGEKIKCQRYWPNILGKTTMVSNRLRLALVRMQQLKGFVVRAMTLEDIQTREVRHISHLNFTAWPDHDTPSQPDDLLTFISYMRHIHRSGPIITHCSAGIGRSGTLICIDVVLGLISQDLDFDISDLVRCMRLQRHGMVQTEDQYIFCYQVILYVLTRLQAEEEQKQQPQLLK

SEQ ID NO: 14035 - protein, 880 aa, Homo sapiens
GAINMVVRRRKSLGGKVVTPLHINLSGQKDSGISLENGVYAAAVLPGSPAAKEGSLAVGDRIVAINGIALDNKSLNECESLLRSCQDSLTLSLLKEQKCVPASGELSPELQEWAPYSPGHSSRHSNPPLYPSRPSVGTVPRSLTPSTTVSSILRNPIYTVRSHRVGPCSSPPAARDAGPQGLHPSVQHQGRLSLDLSHRTCSDYSEMRATHGSNSLPSSARLGSSSNLQFKAERIKIPSTPRYPRSVVGSERGSVSHSECSTPPQSPLNIDTLSSCSQSQTSASTLPRIAVNPASLGERRKDRPYVEEPRHVKVQKGSEPLGISIVSGEKGGIYVSKVTVGSIAHQAGLEYGDQLLEFNGINLRSATEQQARLIIGQQCDTITILAQYNPHVHQLSSHSRSSSHLDPAGTHSTLQGSGTTTPEHPSVIDPLMEQDEGPSTPPAKQSSSRIAGDANKKTLEPRVVFIKKSQLELGVHLCGGNLHGVFVAEVEDDSPAKGPDGLVPGDLILEYGSLDVRNKTVEEVYVEMLKPRDGVRLKVQYRPEEFTKAKGLPGDSFYIRALYDRLADVEQELSFKKDDILYVDDTLPQGTFGSWMAWQLDENAQKIQRGQIPSKYVMDQEFSRRLSMSEVKDDNSATKTLSAAARRSFFRRKHKHKRSGSKDGKDLLALDAFSSDSIPLFEDSVSLAYQRVQKVDCTALRPVLILGPLLDVVKEMLVNEAPGKFCRCPLEVMKASQQAIERGVKDCLFVDYKRRSGHFDVTTVASIKEITEKNRHCLLDIAPHAIERLHHMHIYPIVIFIHYKSAKHIKEQRDPIYLRDKVTQRHSKEQFEAAQKLEQEYSRYFTGVIQGGALSSICTQILAMVNQEQNKVLWIPACPL

SEQ ID NO: 14036 - protein, 964 aa, Homo sapiens
MSSHHTTFPFDPERRVRSTLKKVFGFDSFKTPLQESATMAVVKGITIVVSPLIALIQDQVDHLLTLKVRVSSLNSKLSAQERKELLADLEREKPQTKILYITPEMAASSSFQPTLNSLVSRHLLSYLVVDEAHCVSQWGHDFRPDYLRLGALRSRLGHAPCVALTATATPQVQEDVFAALHLKKPVAIFKTPCFRANLFYDVQFKELISDPYGNLKDFCLKALGQEADKGLSGCGIVYCRTREACEQLAIELSCRGVNAKAYHAGLKASERTLVQNDWMEEKVPVIVATISFGMGVDKANVRFVAHWNIAKSMAGYYQESGRAGRDGKPSWCRLYYSRNDRDQVSFLIRKEVAKLQEKRGNKASDKATIMAFDALVTFCEELGCRHAAIAKYFGDALPACAKGCDHCQNPTAVRRRLEALERSSSWSKTCIGPSQGNGFDPELYEGGRKGYGDFSRYDEGSGGSGDEGRDEAHKREWNLFYQKQMQLRKGKDPKIEEFVPPDENCPLKEASSRRIPRLTVKAREHCLRLLEEALSSNRQSTRTADEADLRAKAVELEHETFRNAKVANLYKASVLKKVADIHRASKDGQPYDMGGSAKSCSAQAEPPEPNEYDIPPASHVYSLKPKRVGAGFPKGSCPFQTATELMETTRIREQAPQPERGGEHEPPSRPCGLLDEDGSEPLPGPRGEVPGGSAHYGGPSPEKKAKSSSGGSSLAKGRASKKQQLLATAAHKDSQSIARFFCRRVESPALLASAPEAEGACPSCEGVQGPPMAPEKYTGEEDGAGGHSPAPPQTEECLRERPSTCPPRDQGTPEVQPTPAKDTWKGKRPRSQQENPESQPQKRPRPSAKPSVVAEVKGSVSASEQGTLNPTAQDPFQLSAPGVSLKEAANVVVKCLTPFYKEGKFASKELFKGFARHLSHLLTQKTSPGRSVKEEAQNLIRHFFHGRARCESEADWHGLCGPQR

SEQ ID NO: 14037 - protein, 251 aa, Homo sapiens
QIPPRRPARAGAFTKLFEDQSRALSTANENDGYVDMSSFNAFESKQQSADQDAESAYTEPYKVCPISSAAPKEDLTSDEEQRSSEEEDSASRDPSVTHKDFHGAVMRALDDMDHEGRDTLAREELRQGLSELPAIHDLHQGILEELEERLSNWESQQKVADVFLAREQGFDHHATHILQFDRYLGLLSENCLHSPRLAAAVREFEQSVQGGSQTAKHRLLRVVQRLFQYQVLLTDYLNNLCPDSAEYDNTQ

SEQ ID NO: 14038 - protein, 722 aa, Homo sapiens
MLTFRTMKSEPHCTPQLTLEMQKSLNFLFYLEAVQVLLKHSADVNARDKNWQTPLHIAAANKAVKCAEALVPLLSNVNVSDRAGRTALHHAAFSGHGEMVKLLLSRGANINAFDKKDRRAIHWAAYMGHIEVVKLLVSHGAEVTCKDKKSYTPLHAAASSGMISVVKYLLDLGVDMNEPNAYGNTPLHVACYNGQDVVVNELIDCGAIVNQKNEKGFTPLHFAAASTHGALCLELLVGNGADVNMKSKDGKTPLHMTALHGRFSRSQTIIQSGAVIDCEDKNGNTPLHIAARYGHELLINTLITSGADTAKRGIHGMFPLHLAALSGFSDCCRKLLSSGFDIDTPDDFGRTCLHAAAAGGNLECLNLLLNTGADFNKKDKFGRSPLHYAAANCNYQCLFALVGSGASVNDLDERGCTPLHYAATSDTDGKCLEYLLRNDANPGIRDKQGYNAVHYSAAYGHRLCLQLIASETPLDVLMETSGTDMLSDSDNRATISPLHLAAYHGHHQALEVLVQSLLDLDVRNSSGRTPLDLAAFKGHVECVDVLINQGASILVKDYILKRTPIHAAATNGHSECLRLLIGNAEPQNAVDIQDGNGQTPLMLSVLNGHTDCVYSLLNKGANVDAKDKWGRTALHRGAVTGHEECVDALLQHGAKCLLRDSRGRTPIHLSAACGHIGVLGALLQSAASMDANPATADNHGYTALHWACYNELLSMQPPSQTM

SEQ ID NO: 14039 - protein, 281 aa, Homo sapiens
MGEIKVSPDYNWFRGTVPLKKIIVDDDDSKIWSLYDAGPRSIRCPLIFLPPVSGTADVFFRQILALTGWGYRVIAVHLFGASLGGFLAQKFAEYTHKSPRVHSLILCNSFSDTSIFNQTWTANSFWLMPAFMLKKIVLGNFSSGPVDPMMADAIDFMVDRLESLGQSELASRLTLNCQNSYVEPHKIRDIPVTIMDVFDQSALSTEAKEEMYKLYPNARRAHLKTGGNFPYLCRSAEVNLYVQIHLLQFHGTKYAAIDPSMVSAEELEVQKGSLGISQEEQ

SEQ ID NO: 14040 - protein, 538 aa, Homo sapiens
MENGTQILRPTQDPSECTKEVKSLMWVYVLVGNIVRGMGETPILPLGISYIEDFAKFENSPLYIGLVETGAIIGPLIGLLLASFCANVYVDTGFVNTDDLIITPTDTRWVGAWWFGFLICAGVNVLTAIPFFFLPNTLPKEGLETNADIIKNENEDKQKEEVKKEKYGITKDFLPFMKSLSCNPIYMLFILVSVIQFNAFVNMISFMPKYLEQQYGISSSDAIFLMGIYNLPPICIGYIIGGLIMKKFKITVKQAAHIGCWLSLLEYLLYFLSFLMTCENSSVVGINTSYEGIPQDLYVENDIFADCNVDCNCPSKIWDPVCGNNGLSYLSACLAGCETSIGTGINMVFQNCSCIQTSGNSSAVLGLCDKGPDCSLMLQYFLILSAMSSFIYSLAAIPGYMVLLRCMKSEEKSLGVGLHTFCTRVFAGIPAPIYFGALMDSTCLHWGTLKCGESGACRIYDSTTFRYIYLGLPAALRGSSFVPALIILILLRKCHLPGENASSGTELIETKVKGKENECKDIYQKSTVLKDDELKTKL

SEQ ID NO: 14041 - protein, 821 aa, Homo sapiens
MTKMLGKLRIAPSFPQPLDSKPLLSQREAVPPGNIPQRPDRLPMSDTFTDNWTDGSHYDNTGFVAEETTAENANSNPLLSSKSRSTSSHGRRPLIRQDRIVGVPLELEQSTHRHTPETEVPPSNPWQNWTRTPSPFEDRTAFPSKLETTPTTSPLPERKEHIKESTEIPSPFSPGVPWEYHDSNPNRSLSNVFSQIHCRPESSKGVISISKSTERLSPLMKDIKSNKFKKSQSIDEIDIGTYKVYNIPLENYASGSDHLGSHERPDKMLGPEHGMSSMSRSQSVPMLDDEMLTYGSSKGPQQQKASMTKKVYQFDQSFNPQGSVEVKAEKRIPPPFQHNPEYVQQASKNIAKDLISPRAYRGYPPMEQMFSFSQPSVNEDAVVNAQFASQGARAGFLRRADSLVSATEMAMFRRVNEPHELPPTDRYGRPPYRGGLDRQSSVTVTESQFLKRNGRYEDEHPSYQEVKAQAGSFPVKNLTQRRPLSARSYSTESYGASQTRPVSARPTMAALLEKIPSDYNLGNYGDKPSDNSDLKTRPTPVKGEESCGKMPADWRQQLLRHIEARRLDRNAAYKHNTVNLGMLPYGGISAMHAGRSMTLNLQTKSKFDHQELPLQKTPSQQSNILDNGQEDVSPSGQWNPYPLGRRDVPPDTITKKAGSHIQTLMGSQSLQHRSREQQPYEGNINKVTIQQFQSPLPIQIPSSQATRGPQPGRCLIQTKGQRSMDGYPEQFCVRIEKNPGLGFSISGGISGQGNPFKPSDKGIFVTRVQPDGPASNLLQPGDKILQANGHSFVHMEHEKAVLLLKSFQNTVDLVIQRELTV

SEQ ID NO: 14042 - protein, 543 aa, Homo sapiens
MPTQQPAAPSTRAPKPSRSLSGSLCALFSDADSGSGMKAELPPGPGAVGREMTKEEKLQLRKEKKQQKKKRKEEKGAEPETGSAVSAAQCQGPTRELPESGIQLGTPREKVPAGRSKAELRAERRAKQEAERALKQARKGEQGGPPPKASPSTAGETPSGVKRLPEYPQVDDLLLRRLVKKPERQQVPTRKDYGSKVSLFSHLPQYSRQNSLTQFMSIPSSVIHPAMVRLGLQYSQGLVSGSNARCIALLRALQQVIQDYTTPPNEELSRDLVNKLKPYMSFLTQCRPLSASMHNAIKFLNKEITSVGSSKREEEAKSELRAAIDRYVQEKIVLAAQAISRFAYQKISNGDVILVYGCSSLVSRILQEAWTEGRRFRVVVVDSRPWLEGRHTLRSLVHAGVPASYLLIPAASYVLPEVSKVLLGAHALLANGSVMSRVGTAQLALVARAHNVPVLVCCETYKFCERVQTDAFVSNELDDPDDLQCKRGEHVALANWQNHASLRLLNLVYDVTPPELVDLVITELGMIPCSSVPVVLRVKSSDQ

SEQ ID NO: 14043 - protein, 209 aa, Homo sapiens
MEEHGVTQTEHMATIEAHAVAQQVQQVHVATYTEHSMLSADEDSPSSPEDTSYDDSDILNSTAADEVTAHLAAAGPVGMAAAAAVATGKKRKRPHVFESNPSIRKRQQTRLLRKLRATLDEYTTRVGQQAIVLCISPSKPNPVFKVFGAAPLENVVRKYKSMILEDLESALAEHAPAPQEVNSELPPLTIDGIPVSVDKMTQAQLRAFI

SEQ ID NO: 14044 - protein, 2099 aa, Homo sapiens
MATLPSAERRAFALKINRYSSAEIRKQFTLPPNLGQYHRQSISTSGFPSLQLPQFYDPVEPVDFEGLLMTHLNSLDVQLAQELGDFTDDDLDVVFTPKECRTLQPSLPEEGVELDPHVRDCVQTYIREWLIVNRKNQGSPEICGFKKTGSRKDFHKTLPKQTFESETLECSEPAAQAGPRHLNVLCDVSGKGPVTACDFDLRSLQPDKRLENLLQQVSAEDFEKQNEEARRTNRQAELFALYPSVDEEDAVEIRPVPECPKEHLGNRILVKLLTLKFEIEIEPLFASIALYDVKERKKISENFHCDLNSDQFKGFLRAHTPSVAASSQARSAVFSVTYPSSDIYLVVKIEKVLQQGEIGDCAEPYTVIKESDGGKSKEKIEKLKLQAESFCQRLGKYRMPFAWAPISLSSFFNVSTLEREVTDVDSVVGRSSVGERRTLAQSRRLSERALSLEENGVGSNFKTSTLSVSSFFKQEGDRLSDEDLFKFLADYKRSSSLQRRVKSIPGLLRLEISTAPEIINCCLTPEMLPVKPFPENRTRPHKEILEFPTREVYVPHTVYRNLLYVYPQRLNFVNKLASARNITIKIQFMCGEDASNAMPVIFGKSSGPEFLQEVYTAVTYHNKSPDFYEEVKIKLPAKLTVNHHLLFTFYHISCQQKQGASVETLLGYSWLPILLNERLQTGSYCLPVALEKLPPNYSMHSAEKVPLQNPPIKWAEGHKGVFNIEVQAVSSVHTQDNHLEKFFTLCHSLESQVTFPIRVLDQKISEMALEHELKLSIICLNSSRLEPLVLFLHLVLDKLFQLSVQPMVIAGQTANFSQFAFESVVAIANSLHNSKDLSKDQHGRNCLLASYVHYVFRLPEVQRDVPKSGAPTALLDPRSYHTYGRTSAAAVSSKLLQARVMSSSNPDLAGTHSAADEEVKNIMSSKIADRNCSRMSYYCSGSSDAPSSPAAPRPASKKHFHEELALQMVVSTGMVRETVFKYAWFFFELLVKSMAQHVHNMDKRDSFRRTRFSDRFMDDITTIVNVVTSEIAALLVKPQKENEQAEKMNISLAFFLYDLLSLMDRGFVFNLIRHYCSQLSAKLSNLPTLISMRLEFLRILCSHEHYLNLNLFFMNADTAPTSPCPSISSQNSSSCSSFQDQKIASMFDLTSEYRQQHFLTGLLFTELAAALDAEGEGISKVQRKAVSAIHSLLSSHDLDPRCVKPEVKVKIAALYLPLVGIILDALPQLCDFTVADTRRYRTSGSDEEQEGAGAINQNVALAIAGNNFNLKTSGIVLSSLPYKQYNMLNADTTRNLMICFLWIMKNADQSLIRKWIADLPSTQLNRILDLLFICVLCFEYKGKQSSDKVSTQVLQKSRDVKARLEEALLRGEGARGEMMRRRAPGNDRFPGLNENLRWKKEQTHWRQANEKLDKTKAELDQEALISGNLATEAHLIILDMQENIIQASSALDCKDSLLGGVLRVLVNSLNCDQSTTYLTHCFATLRALIAKFGDLLFEEEVEQCFDLCHQVLHHCSSSMDVTRSQACATLYLLMRFSFGATSNFARVKMQVTMSLASLVGRAPDFNEEHLRRSLRTILAYSEEDTAMQMTPFPTQVEELLCNLNSILYDTVKMREFQEDPEMLMDLMYRIAKSYQASPDLRLTWLQNMAEKHTKKKCYTEAAMCLVHAAALVAEYLSMLEDHSYLPVGSVSFQNISSNVLEESVVSEDTLSPDEDGVCAGQYFTESGLVGLLEQAAELFSTGGLYETVNEVYKLVIPILEAHREFRKLTLTHSKLQRAFDSIVNKDHKRMFGTYFRVGFFGSKFGDLDEQEFVYKEPAITKLPEISHRLEAFYGQCFGAEFVEVIKDSTPVDKTKLDPNKAYIQITFVEPYFDEYEMKDRVTYFEKNFNLRRFMYTTPFTLEGRPRGELHEQYRRNTVLTTMHAFPYIKTRISVIQKEEFVLTPIEVAIEDMKKKTLQLAVAINQEPPDAKMLQMVLQGSVGATVNQGPLEVAQVFLAEIPADPKLYRHHNKLRLCFKEFIMRCGEAVEKNKRLITADQREYQQELKKNYNKLKENLRPMIERKIPELYKPIFRVESQKRDSFHRSSFRKCETQLSQGS

SEQ ID NO: 14045 - protein, 769 aa, Homo sapiens
MRLWKAVVVTLAFMSVDICVTTAIYVFSHLDRSLLEDIRHFNIFDSVLDLWAACLYRSCLLLGATIGVAKNSALGPRRLRASWLVITLVCLFVGIYAMVKLLLFSEVRRPIRDPWFWALFVWTYISLGASFLLWWLLSTVRPGTQALEPGAATEAEGFPGSGRPPPEQASGATLQKLLSYTKPDVAFLVAASFFLIVAALGETFLPYYTGRAIDGIVIQKSMDQFSTAVVIVCLLAIGSSFAAGIRGGIFTLIFARLNIRLRNCLFRSLVSQETSFFDENRTGDLISRLTSDTTMVSDLVSQNINVFLRNTVKVTGVVVFMFSLSWQLSLVTFMGFPIIMMVSNIYGKYYKRLSKEVQNALARASNTAEETISAMKTVRSFANEEEEAEVYLRKLQQVYKLNRKEAAAYMYYVWGSGLTLLVVQVSILYYGGHLVISGQMTSGNLIAFIIYEFVLGDCMESVGSVYSGLMQGVGAAEKVFEFIDRQPTMVHDGSLAPDHLEGRVDFENVTFTYRTRPHTQVLQNVSFSLSPGKVTALVGPSGSGKSSCVNILENFYPLEGGRVLLDGKPISAYDHKYLHRVISLVSQEPVLFARSITDNISYGLPTVPFEMVVEAAQKANAHGFIMELQDGYSTETGEKGAQLSGGQKQRVAMARALVRNPPVLILDEATSALDAESEYLSPQIQQAIHGNLQKHTVLIIAHRLSTVEHAHLIVVLDKGRVVQQGTHQQLLAQGGLYAKLVQRQMLGLQPAADFTAGHNEPVANGSHKA

SEQ ID NO: 14046 - protein, 375 aa, Homo sapiens
MMEDDGQPRTLYVGNLSRDVTEVLILQLFSQIGPCKSCKMITEHTSNDPYCFVEFYEHRDAAAALAAMNGRKILGKEVKVNWATTPSSQKKDTSNHFHVFVGDLSPEITTEDIKSAFAPFGKISDARVVKDMATGKSKGYGFVSFYNKLDAENAIVHMGGQWLGGRQIRTNWATRKPPAPKSTQENNTKQLRFEDVVNQSSPKNCTVYCGGIASGLTDQLMRQTFSPFGQIMEIRVFPEKGYSFVRFSTHESAAHAIVSVNGTTIEGHVVKCYWGKESPDMTKNFQQVDYSQWGQWSQVYGNPQQYGQYMANGWQVPPYGVYGQPWNQQGFGVDQSPSAAWMGGFGAQPPQGQAPPPVIPPPNQAGYGMASYQTQ

SEQ ID NO: 14047 - protein, 1446 aa, Homo sapiens
SRGSIYHSVEGPLTGHGESIQDSRTLPFKTHPSQASFVSALGGEDDVIEHLYIVEGEKTVESEQITPQQPVMNCYQTYLTQFQVINWSVKHPTNKRTSKSSLHRPLDLDTPTSEESSSSFEQLSVPTFKVIKQGLTANSLLDRGMQLSGSTSNTPYTPLEKKLADNTDDETLTEEWTLDQPVSQTRTTAIVEVKGTVDIVLTPLVAEALDRYIEAMVHCASTRHPAAIVDDLHAKVLREAVQNSKTTFSENLSSKQDIRGTKTEQSTIGTTNQGQAQTNLTMKQDNVTIKGLQTNVSIPKVNLCLLQASVEESPTTAPSRSVTHVSLVALCFDRIATQVRMNRGVVEETSNNAEPGRTSNFDRYVHATKMQPQSSGSLRSNAGAEKGKEIAAKLNIHRVHGQLRGLDTTDIGTCAITAIPFEKSKVLFTLEELDEFTFVDETDQQAVPDVTRIGPSQEKWGWIMFECGLENLTIKGGRQSGAVLYNSFGIMGKASDTERGGVLTSNNSSDSPTGSGYNTDVSDDNLPCDRTSPSSDLNGNSVSDEQDEGVESDDLKKDLPLMPPPPDSCSMKLTIKEIWFSFAAPTNVRSHTHAFSRQLNLLSTATPAVGAWLVPIDQLKSSLNKLETEGTLRICAVMGCIMTEALENKSVHFPLRSKYNRLTKVARFLQENPSCLLCNILHHYLHQANYSIIDDATMSDGLPALVTLKKGLVALARQWMKFIVVTPAFKGVSLHRPAQPLKPQIAMDHEHEDGLGLDNGGGLQSDTSADGAEFEFDAATVSEHTMLLEGTANRPPPGSSGPVTGAEIMRKLSKTHTHSDSALKIKGIHPYHSLSYTSGDTATDSPVHVGRAGMPVKDSPRKESLLSYLTGSFPSLHNLLEGTPQRSSAAVKSSSLTRTGNTVATDMLSEHPLLSEPSSVSFYNWMSNAVGNRGSVLQESPVTKSGHNSLPTGVAPNLPTIPSASDFNTVLSSDQNTLDGTHSQHSTSQDDVAGVEEANQGFPAVQLADAQVVFKPLLSHTGIQSQDTMPFCYRMYFGEHLSFSGTLDCLRADIVDSDTAKERKGKRARRQGHVNLPPLEFKPALMLGTFSISAVVMEKSVCTPQNSTSALSFHDLSKRYYNTFHCNFTISCQSISQHVDMALVRLIHQFSTMIDDIKATQTDIKLSRYTAGSASPTPTFKTRKHRDFRSSDFSRSSRGSLNGGNRVNNAKNKRTNNENNKKESRNKNSLGRSERRTSKVSRKGSKDVVDHMTIHMDDSDSITVSEQSEPSAECWQNMYKLLNFYSLISDPTGILEKSSETFGPAGVRSPTEPTCKVVFENEQDNSSLTKTQRKRSLVTSEPQHVTLIVFGIGMVNRTHLEADIGGLTMESELKRIHGSFTLKEKMKDVLHQKMTETCATAHIGGVNIVLLEGITPNIQLEDFPTSPTSTAKQEFLYVILFFFMAL

SEQ ID NO: 14048 - protein, 85 aa, Homo sapiens
MLPPQKKPWESMAKGLVLGALFTSFLLLVYSYAVPPLHAGLASTTPEAAASCSPPALEPEAVIRANGSAGECQPRRNIVFLKTHK

SEQ ID NO: 14049 - protein, 705 aa, Homo sapiens
MQRAGSSGGRGECDISGAGRLGLEEAARLSCAVHTSPGGGRRPGQAAGMSAKERPKGKVIKDSVTLLPCFYFVELPILASSVVSLYFLELTDVFKPVHSGFSCYDRSLSMPYIEPTQEAIPFLMLLSLAFAGPAITIMVGEGILYCCLSKRRNGVGLEPNINAGGCNFNSFLRRAVRFVGVHVFGLCSTALITDIIQLSTGYQAPYFLTVCKPNYTSLNVSCKENSYIVEDICSGSDLTVINSGRKSFPSQHATLAAFAAVYVSGLYAVGNFLPSDESMFQHRDALRSLTDLNQDPNRLLSAKNGSSSDGIAHTEGILNRNHRDASSLTNLKRANADVEIITPRSPMGKENMVTFSNTLPRANTPSVEDPVRRNASIHASMDSARSKQLLTQWKNKNESRKLSLQVIEPEPGQSPPRSIEMRSSSEPSRVGVNGDHHGPGNQYLKIQPGAVPGCNNSMPGGPRVSIQSRPGSSQLVHIPEETQENISTSPKSSSARAKWLKAAEKTVACNRSNSQPRIMQVIAMSKQQGVLQSSPKNTEGSTVSCTGSIRYKTLTDHEPSGIVRVEAHPENNRPIIQIPSTEGEGSGSWKWKAPEKGSLRQTYELNDLNRDSESCESLKDSFGSGDRKRSNIDSNEHHHHGITTIRVTPVEGSEIGSETLSISSSRDSTLRRKGNIILIPERSNSPENTRNIFYKGTSPTRAYKD

SEQ ID NO: 14050 - protein, 447 aa, Homo sapiens
MDFLLGNPFSSPVGQRIEKATDGSLQSEDWALNMEICDIINETEEGPKDALRAVKKRIVGNKNFHEVMLALTVLETCVKNCGHRFHVLVASQDFVESVLVRTILPKNNPPTIVHDKVLNLIQTVFNSETQSGQDSVGTDSSQQEDSGQHAAPLPAPPILSGDTPIAPTPEQIGKLRSELEMVSGNVRVMSEMLTELVPTQAEPADLELLQELNRTCRAMQQRVLELIPQIANEQLTEELLIVNDNLNNVFLRHERFERFRTGQTTKAPSEAEPAADLIDMGPDPAATGNLSSQLAGMNLGSSSVRAGLQSLEASGRLEDEFDMFALTRGSSLADQRKEVKYEAPQATDGLAGALDARQQSTGAIPVTQACLMEDIEQWLSTDVGNDAEEPKGVTSEEFDKFLEERAKAADRLPNLSSPSAEGPPGPPSGPAPRKKTQEKDDDMLFAL

SEQ ID NO: 14051 - protein, 73 aa, Homo sapiens
MSNPSAPPPYEDRNPLYPGPPPPGGYGQPSVLPGGYPAYPGYPQPGYGHPAGYPQPMPPTHPMPMNYGPGHGY

SEQ ID NO: 14052 - protein, 297 aa, Homo sapiens
MGGSALNQGVLEGDDAPGQSLYERLSQRMLDISGDRGVLKDVIREGAGDLVAPDASVLDITLWGMELGLLSMRRGELARFLFKPNYAYGTLGCPPLIPPNTTVLFEIELLDFLDCAESDKFCALSAEQQDQFPLQKVLKVAATEREFGNYLFRQNRFYDAKVRYKRALLLLRRRSAPPEEQHLVEAAKLPVLLNLSFTYLKLDRPTIALCYGEQALIIDQKNAKALFRCGQACLLLTEYQKARDFLVRAQKEQPFNHDINNELKKLASCYRDYVDKEKEMWHRMFAPCGDGSTAGES

SEQ ID NO: 14053 - protein, 258 aa, Homo sapiens
MAKERCLKKSFQDSLEDIKKRMKEKRNKNLAEIGKRRSFIAAPCQIITNTSTLLKNYQDNNKMLVLALENEKSKVKEAQDIILQLRKECYYLTCQLYALKGKLTSQQTVEPAQNQEICSSGMDPNSDDSSRNLFVKDLPQIPLEETELPGQGESFQIEATPPETQQSPHLSLKDITNVSLYPVVKIRRLSLSPKKNKASPAVALPKRRCTASVNYKEPTLASKLRRGDPFTDLCFLNSPIFKQKKDLRRSKKSMKQIQ

SEQ ID NO: 14054 - protein, 725 aa, Homo sapiens
MAAAGLVAVAAAAEYSGTVASGGNLPGVHCGPSSGAGPGFGPGSWSRSLDRALEEAAVTGVLSLSGRKLREFPRGAANHDLTDTTRADLSRNRLSEIPIEACHFVSLENLNLYQNCIRYIPEAILNLQALTFLNISRNQLSTLPVHLCNLPLKVLIASNNKLVSLPEEIGHLRHLMELDVSCNEIQTIPSQIGNLEALRDLNVRRNHLVHLPEELAELPLIRLDFSCNKITTIPVCYRNLRHLQTITLDNNPLQSPPAQICIKGKVHIFKYLNIQACKIAPDLPDYDRRPLGFGSCHEELYSSRPYGALDSGFNSVDSGDKRWSGNEPTDEFSDLPLRVAEITKEQRLRRESQYQENRGSLVVTNGGVEHDLDQIDYIDSCTAEEEEAEGSPVKPVAIREFQKTEDMRRYLHQNRVPAEPSSLLSLSASHNQLSHTDLELHQRREQLVERTRREAQLAALQYEEEKIRTKQIQRDAVLDFVKQKASQSPQKQHPLLDGVDGECPFPSRRSQHTDDSALCMSDDRPNALLSSPATETVHHSPAYSFPAAIQRNQPQRPESFLFRAGVRAETNKGHASPLPPSAAPTTDSTDSITGQNSRQREEELELIDQLRKHIEYRLKVSLPCDLGAALTDGVVLCHLANHVRPRSVPSIHVPSPAVPKLTMAKCRRNVENFLEACRKIGVPQEQLCLPLHILEEKGLSQVAVTVQALLELAPPKQQQHQLSAV

SEQ ID NO: 14055 - protein, 411 aa, Homo sapiens
HSLSGPEVHGVIDEMDRRAKSEAPAISSAIDRGDTETTMPSISSDRAALCAGCGGKISDRYYLLAVDKQWHMRCLKCCECKLNLESELTCFSKDGSIYCKEDYYSPSLHGPYRRFSVQRCARCHLGISASEMVMRARDLVYHLNCFTCTTCNKMLTTGDHFGMKDSLVYCRLHFEALLQGEYPAHFNHADVAAAAAAAAAAKSAGLGAAGANPLGLPYYNGVGTVQKGRPRKRKSPGPGADLAAYNAALSCNENDAEHLDRDQPYPSSQKTKRMRTSFKHHQLRTMKSYFAINHNPDAKDLKQLAQKTGLTKRVLQVWFQNARAKFRRNLLRQENTGVDKSTDAALQTGTPSGPASELSNASLSPSSTPTTLTDLTSPTLPTVTSVLTSVPGNLEGHEPHSPSQTTLTNLF

SEQ ID NO: 14056 - protein, 342 aa, Homo sapiens
QSGEQESEYEQEQGEDELVYHKSDGSELYTQEYPEEGQYEGHEAELTEDQIEYVEEPEEEQLYTDEVLDIEINEPLDEFTGGMETLELQKDIKEESDEEEEDDEESGRLRFKTERKEGTIIRLSDVTRERRNIPETLELSAEAKAALLEFEERERQHKQGRYSSRRGGRRGGPLMCRGVGDQRRESTERGRMKDHRPALLPTQPPVVTHSPRLIPPQPQAPPPPPPPPQQQPIRSLFQPQPLQPLLPVQHPHHPSPPQGMHMPPQLETPRMMMTPPPVTPQQPKNIHINPHFKGTVVTPVQVPLLPVPSQPRPAVGPQRFPGPPEFPQHTPGPVPNSFSQPP

SEQ ID NO: 14057 - protein, 720 aa, Homo sapiens
MSINLTVDIYIYLLSNARSVCGKQRSKQLYFLFSPKHYWRISHISLQRGFHTNIIRCKWTKSEAHSCSKHCYSPSNHGLHIGILKLSTSAPKGLTKVNICMSRIKSTLNSVSKAVFGNQNEMISRLAQFKPSSQILRKVSDSGWLKQKNIKQAIKSLKKYSDKSAEKSPFPEEKSHIIDKEEDIGKRSLFHYTSSITTKFGDSFYFLSNHINSYFKRKEKMSQQKENEHFRDKSELEDKKVEEGKLRSPDPGILAYKPGSESVHTVDKPTSPSAIPDVLQVSTKQSIANFLSRPTEGVQALVGGYIGGLVPKLKYDSKSQSEEQEEPAKTDQAVSKDRNAEEKKRLSLQREKIIARVSIDNRTRALVQALRRTTDPKLCITRVEELTFHLLEFPEGKGVAVKERIIPYLLRLRQIKDETLQAAVREILALIGYVDPVKGRGIRILSIDGGGTRGVVALQTLRKLVELTQKPVHQLFDYICGVSTGAILAFMLGLFHMPLDECEELYRKLGSDVFSQNVIVGTVKMSWSHAFYDSQTWENILKDRMGSALMIETARNPTCPKVAADGGLLLNNPSALAMHECKCLWPDVPLECIVSLGTGRYESDVRNTVTYTSLKTKLSNVINSATDTEEVHIMLDGLLPPDTYFRFNPVMCENIPLDESRNEKLDQLQLEGLKYIERNEQKMKKVAKILSQEKTTLQKINDWIKLKTDMYEGLPFFSKL

SEQ ID NO: 14058 - protein, 202 aa, Homo sapiens
MAAENEASQESALGAYSPVDYMSITSFPRLPEDEPAPAAPLRGRKDEDAFLGDPDTAGHRCPACPGVHAKMRKDPDSFLKSARLQRLPSSSSEMGSQDGSPLRETRKDPFSAAAAECSCRQDGLTVIVTACLTFATGVTVALVMQIYFGDPQIFQQGAVVTDAARCTSLGIEVLSKQGSSVDAAVAAALCLGIVAPHSSGLG

SEQ ID NO: 14059 - protein, 179 aa, Homo sapiens
RDAGDAGEGGSSAQNLPLLRPGRREGAVDWPPAVSKAMYFYRRMRPYRWNNDMNNIKPLEGVKILDLTRVLAGPFATMNLGDLGAEVIKVERPGAGDDTRTWGPPFVGTESTYYLSVNRNKKSIAVNIKDPKGVKIIKELAAVCDVFVENYVPGKLSAMGLGYEDIDEIAPHIIYCSIT

SEQ ID NO: 14060 - protein, 438 aa, Homo sapiens
MDTSPLCFSILLVLCIFIQSSALGQSLKPEPFGRRAQAVETNKTLHEMKTRFLLFGETNQGCQIRINHPDTLQECGFNSSLPLVMIIHGWSESVQLSRSHVHLIGYSLGAHVSGFAGSSIGGTHKIGRITGLDAAGPLFEGSAPSNRLSPDDANFVDAIHTFTREHMGLSVGIKQPIGHYDFYPNGGSFQPGCHFLELYRHIAQHGFNAITQTIKCSHERSVHLFIDSLLHAGTQSMAYPCGDMNSFSQGLCLSCKKGRCNTLGYHVRQEPRSKSKRLFLVTRAQSPFKVYHYQFKIQFINQTETPIQTTFTMSLLGTKEKMQKIPITLGKGIASNKTYSFLITLDVDIGELIMIKFKWENSAVWANVWDTVQTIIPWSTGPRHSGLVLKTIRVKAGETQQRMTFCSENTDDLLLRPTQEKIFVKCEIKSKTSKRKIR

SEQ ID NO: 14061 - protein, 701 aa, Homo sapiens
MRRRTQPPIGHTLCVSLSCQHRGLIHPQSRAVGGDAMTPILTVLICLGLSLGPRTHVQAGHLPKPTLWAEPGSVITQGSPVTLRCQGGQETQEYRLYREKKTAPWITRIPQELVKKGQFPIPSITWEHTGRYRCYYGSDTAGRSESSDPLELVVTGAYIKPTLSAQPSPVVNSGGNVTLQCDSQVAFDGFILCKEGEDEHPQCLNSQPHARGSSRAIFSVGPVSPSRRWWYRCYAYDSNSPYEWSLPSDLLELLVLGVSKKPSLSVQPGPIVAPEETLTLQCGSDAGYNRFVLYKDGERDFLQLAGAQPQAGLSQANFTLGPVSRSYGGQYRCYGAHNLSSEWSAPSDPLDILIAGQFYDRVSLSVQPGPTVASGENVTLLCQSQGWMQTFLLTKEGAADDPWRLRSTYQSQKYQAEFPMGPVTSAHAGTYRCYGSQSSKPYLLTHPSDPLELVVSGPSGGPSSPTTGPTSTSAGPEDQPLTPTGSDPQSAPGLGSGAGTRAAGLGRHLGVVIGILVAVILLLLLLLLLFLILRHRRQGKHWTSTQRKADFQHPAGAVGPEPTDRGLQWRSSPAADAQEENLYAAVKHTQPEDGVEMDTRQSPHDEDPQAVTYAEVKHSRPRREMASPPSPLSGEFLDTKDRQAEEDRQMDTEAAASEAPQDVTYAQLHSLTLRREATEPPPSQEGPSPAVPSIYATLAIH

SEQ ID NO: 14062 - protein, 645 aa, Homo sapiens
MAEAVAAPISPWTMAATIQAMERKIESQAARLLSLEGRTGMAEKKLADCEKTAVEFGNQLEGKWAVLGTLLQEYGLLQRRLENVENLLRNRNFWILRLPPGSKGESPKEWGKLEDWQKELYKHVMRGNYETLVSLDYAISKPEVLSQIEQGKEPCNWRRPGPKIPDVPVDPSPGSGPPVPAPDLLMQIKQEGELQLQEQQALGVEAWAAGQPDIGEEPWGLSQLDSGAGDISTDATSGVHSNFSTTIPPTSWQTDLPPHHPSSACSDGTLKLNTAASTEADVKIVIKTEVQEEEVVATPVHPTDLEAHGTLFGPGQATRFFPSPAQEGAWESQGSSFPSQDPVLGLREPARPERDMGELSPAVAQEETPPGDWLFGGVRWGWNFRCKPPVGLNPRTGPEGLPYSSPDNGEAILDPSQAPRPFNEPCKYPGRTKGFGHKPGLKKHPAAPPGGRPFTCATCGKSFQLQVSLSAHQRSCGAPDGSGPGTGGGGSGSGGGGGGSGGGSARDGSALRCGECGRCFTRPAHLIRHRMLHTGERPFPCTECEKRFTERSKLIDHYRTHTGVRPFTCTVCGKSFIRKDHLRKHQRNHAAGAKTPARGQPLPTPPAPPDPFKSPASKGPLASTDLVTDWTCGLSVLGPTDGGDM

SEQ ID NO: 14063 - protein, 258 aa, Homo sapiens
MGPWSRVRVAKCQMLVTCFFILLLGLSVATMVTLTYFGAHFAVIRRASLEKNPYQAVHQWAFSAGLSLVGLLTLGAVLSAAATVREAQGLMAGGFLCFSLAFCAQVQVVFWRLHSPTQVEDAMLDTYDLVYEQAMKGTSHVRRQELAAIQDVFLCCGKKSPFSRLGSTEADLCQGEEAAREDCLQGIRSFLRTHQQVASSLTSIGLALTLGPQGQIHPDPTSMWPPAPGAQPLEMLPGWTHTLSPLRSSCYWSKRMLG

SEQ ID NO: 14064 - protein, 1216 aa, Homo sapiens
MALAGLCALLACCWGPAAVLATAAGDVDPSKELECKLKSITVSALPFLRENDLSIMHSPSASEPKLLFSVRNDFPGEMVVVDDLENTELPYFVLEISGNTEDIPLVRWRQQWLENGTLLFHIHHQDGAPSLPGQDPTEEPQHESAEEELRILHISVMGGMIALLLSILCLVMILYTRRRWCKRRRVPQPQKSASAEAANEIHYIPSVLIGGHGRESLRNARVQGHNSSGTLSIRETPILDGYEYDITDLRHHLQRECMNGGEDFASQVTRTLDSLQGCNEKSGMDLTPGSDNAKLSLMNKYKDNIIATSPVDSNHQQATLLSHTSSSQRKRINNKARAGSAFLNPEGDSGTEAENDPQLTFYTDPSRSRRRSRVGSPRSPVNKTTLTLISITSCVIGLVCSSHVNCPLVVKITLHVPEHLIADGSRFILLEGSQLDASDWLNPAQVVLFSQQNSSGPWAMDLCARRLLDPCEHQCDPETGECLCYEGYMKDPVHKHLCIRNEWGTNQGPWPYTIFQRGFDLVLGEQPSDKIFRFTYTLGEGMWLPLSKSFVIPPAELAINPSAKCKTDMTVMEDAVEVREELMTSSSFDSLEVLLDSFGPVRDCSKDNGGCSKNFRCISDRKLDSTGCVCPSGLSPMKDSSGCYDRHIGVDCSDGFNGGCEQLCLQQMAPFPDDPTLYNILMFCGCIEDYKLGVDGRSCQLITETCPEGSDCGESRELPMNQTLFGEMFFGYNNHSKEVAAGQVLKGTFRQNNFARGLDQQLPDGLVVATVPLENQCLEEISEPTPDPDFLTGMVNFSEVSGYPVLQHWKVRSVMYHIKLNQVAISQALSNALHSLDGATSRADFVALLDQFGNHYIQEAIYGFEESCSIWYPNKQVQRRLWLEYEDISKGNSPSDESEERERDPKVLTFPEYITSLSDSGTKHMAAGVRMECHSKGRCPSSCPLCHVTSSPDTPAEPVLLEVTKAAPIYELVTNNQTQRLLQEATMSSLWCSGTGDVIEDWCRCDSTAFGADGLPTCAPLPQPVLRLSTVHEPSSTLVVLEWEHSEPPIGVQIVDYLLRQEKVTDRMDHSKVETETVLSFVDDIISGAKSPCAMPSQVPDKQLTTISLIIRCLEPDTIYMFTLWGVDNTGRRSRPSDVIVKTPCPVVDDVKAQEIADKIYNLFNGYTSGKEQQTAYNTLLDLGSPTLHRVLYHYNQHYESFGEFTWRCEDELGPR

SEQ ID NO: 14065 - protein, 233 aa, Homo sapiens
MLPKRRRARVGSPSGDAASSTPPSTRFPGVAIYLVEPRMGRSRRAFLTGLARSKGFRVLDACSSEATHVVMEETSAEEAVSWQERRMAAAPPGCTPPALLDISWLTESLGAGQPVPVECRHRLEELLEHGVCEEVERVRRSERYQTMKLFTQIFGVGVKTADRWYREGLRTLDDLREQPQKLTQQQKAGLQHHQDLSTPVLRSDVDALQQVVEEAVGQALPGATVTLTGGFRR

SEQ ID NO: 14066 - protein, 2875 aa, Homo sapiens
MGNENSTSDNQRTLSAQTPRSAQPPGNSQNIKRKQQDTPGSPDHRDASSIGSVGLGGFCTASESSASLDPCLVSPEVTEPRKDPQGARGPEGSLLPSPPPSQEREHPSSSMPFAECPPEGCLASPAAAPEDGPQTQSPRREPAPNAPGDIAAAFPAERDSSTPYQEIAAVPSAGRERQPKEEGQKSSFSFSSGIDQSPGMSPVPLREPMKAPLCGEGDQPGGFESQEKEAAGGFPPAESRQGVASVQVTPEAPAAAQQGTESSAVLEKSPLKPMAPIPQDPAPRASDRERGQGEAPPQYLTDDLEFLRACHLPRSNSGAAPEAEVNAASQESCQQPVGAYLPHAELPWGLPSPALVPEAGGSGKEALDTIDVQGHPQTGMRGTKPNQVVCVAAGGQPEGGLPVSPEPSLLTPTEEAHPASSLASFPAAQIPIAVEEPGSSSRESVSKAGMPVSADAAKEVVDAGLVGLERQVSDLGSKGEHPEGDPGEVPAPSPQERGEHLNTEQSHEVQPGVPPPPLPKEQSHEVQPGAPPPPLPKAPSESARGPPGPTDGAKVHEDSTSPAVAKEGSRSPGDSPGGKEEAPEPPDGGDPGNLQGEDSQAFSSKRDPEVGKDELSKPSSDAESRDHPSSHSAQPPRKGGAGHTDGPHSQTAEADASGLPHKLGEEDPVLPPVPDGAGEPTVPEGAIWEGSGLQPKCPDTLQSREGLGRMESFLTLESEKSDFPPTPVAEVAPKAQEGESTLEIRKMGSCDGEGLLTSPDQPRGPACDASRQEFHAGVPHPPQGENLAADLGLTALILDQDQQGIPSCPGEGWIRGAASEWPLLSSEKHLQPSQAQPETSIFDVLKEQAQPPENGKETSPSHPGFKDQGADSSQIHVPVEPQEDNNLPTHGGQEQALGSELQSQLPKGTLSDTPTSSPTDMVWESSLTEESELSAPTRQKLPALGEKRPEGACGDGQSSRVSPPAADVLKDFSLAGNFSRKETCCTGQGPNKSQQALADALEEGSQHEEACQRHPGASEAADGCSPLWGLSKREMASGNTGEAPPCQPDSVALLDAVPCLPALAPASPGVTPTQDAPETEACDETQEGRQQPVPAPQQKMECWATSDAESPKLLASFPSAGEQGGEAGAAETGGSAGAGDPGKQQAPEKPGEATLSCGLLQTEHCLTSGEEASTSALRESCQAEHPMASCQDALLPARELGGIPRSTMDFSTHQAVPDPKELLLSGPPEVAAPDTPYLHVDSAAQRGAEDSGVKAVSSADPRAPGESPCPVGEPPLALENAASLKLFAGSLAPLLQPGAAGGEIPAVQASSGSPKARTTEGPVDSMPCLDRMPLLAKGKQATGEEKAATAPGAGAKASGEGMAGDAAGETEGSMERMGEPSQDPKQGTSGGVDTSSEQIATLTGFPDFREHIAKIFEKPVLGALATPGEKAGAGRSAVGKDLTRPLGPEKLLDGPPGVDVTLLPAPPARLQVEKKQQLAGEAEISHLALQDPASDKLLGPAGLTWERNLPGAGVGKEMAGVPPTLREDERPEGPGAAWPGLEGQAYSQLERSRQELASGLPSPAATQELPVERAAAFQVAPHSHGEEAVAQDRIPSGKQHQETSACDSPHGEDGPGDFAHTGVPGHVPRSTCAPSPQREVLTVPEANSEPWTLDTLGGERRPGVTAGILEMRNALGNQSTPAPPTGEVADTPLEPGKVAGAAGEAEGDITLSTAETQACASGDLPEAGTTRTFSVVAGDLVLPGSCQDPACSDKAPGMEGTAALHGDSPARPQQAKEQPGPERPIPAGDGKVCVSSPPEPDETHDPKLQHLAPEELHTDRESPRPGPSMLPSVPKKDAPRVMDKVTSDETRGAEGTERSAKDIGLWKAMMPSLDTDTLDVLERRVVLIQHEFLHKKEANGHSRFMYSSPVADDIIQPAAPADLESPTLAASSYHGDVVGQVSTDLIAQRSSDSEEAFETPESTTPVKAPPAPPPPPPEVIPEPEVSTQPPPEEPGCGSETVPVPDGPRSDSVEGSPFRPPSHSFSAVFDEDKPIASSGTYNLDFDNIELVDTFQTLEPRASDAKNQEGKVNTRRKSTDSVPISKSTLSRSLSLQASDFDGASSSGNPEAVALAPDAYSTGSSSASSTLKRTKKPRPPSLKKKQTTKKPTETPPVKETQQEPDEESLVPSGENLASETKTESAKTEGPSPALLEETPLEPAVGPKAACPLDSESAEGVVPPASGGGRVQNSPPVGRKTLPLTTAPEAGEVTPSDSGGQEDSPAKGLSVRLEFDYSEDKSSWDNQQENPPPTKKIGKKPVAKMPLRRPKMKKTPEKLDNTPASPPRSPAEPNDIPIAKGTYTFDIDKWDDPNFNPFSSTSKMQESPKLPQQSYNFDPDTCDESVDPFKTSSKTPSSPSKSPASFEIPASAMEANGVDGDGLNKPAKKKKTPLKTDTFRVKKSPKRSPLSDPPSQDPTPAATPETPPVISAVVHATDEEKLAVTNQKWTCMTVDLEADKQDYPQPSDLSTFVNETKFSSPTEELDYRNSYEIEYMEKIGSSLPQDDDAPKKQALYLMFDTSQESPVKSSPVRMSESPTPCSGSSFEETEALVNTAAKNQHPVPRGLAPNQESHLQVPEKSSQKELEAMGLGTPSEAIEIREAAHPTDVSISKTALYSRIGTAEVEKPAGLLFQQPDLDSALQIARAEIITKEREVSEWKDKYEESRREVMEMRKIVAEYEKTIAQMIEDEQREKSVSHQTVQQLVLEKEQALADLNSVEKSLADLFRRYEKMKEVLEGFRKNEEVLKRCAQEYLSRVKKEEQRYQALKVHAEEKLDRANAEIAQVRGKAQQEQAAHQASLRKEQLRVDALERTLEQKNKEIEELTKICDELIAKMGKS

SEQ ID NO: 14067 - protein, 226 aa, Homo sapiens
MPQHGPWQTRMRKISNHGSLRVAKVAYPLGLCVGVFIYVAYIKWHRATATQAFFSITRAAPGARWGQQAHSPLGTAADGHEVFYGIMFDAGSTGTRVHVFQFTRPPRETPTLTHETFKALKPGLSAYADDVEKVKKVFKASPFLVGDDCVSIMNGTDEGVSAWITINFLTGSLKTPGGSSVGMLDLGGGSTQIAFLPRVEGTLQASPPGYLTALRMFNRTYKLYSY

SEQ ID NO: 14068 - protein, 99 aa, Homo sapiens
MDSFDLALLQEWDLESLCVYEPDRNALRRKERERRNQETQQDDGTFNSSYSLFSEPYKTNKGDELSNRIQNTLGNYDEMKDFLTDRSNQSHLVGVPKPG

SEQ ID NO: 14069 - protein, 265 aa, Homo sapiens
MLPPQKKPWESMAKGLVLGALFTSFLLLVYSYAVPPLHAGLASTRTPEAAASCSPPALEPEAVIRANGSAGECQPRRNIVFLKTHKTASSTLLNILFRFGQKHRLKFAFPNGRNDFDYPTFFARSLVQDYRPGACFNIICNHMRFHYDEVRGLVPTNAIFITVLRDPARLFESSFHYFGPVVPLTWKLSAGDKLTEFLQDPDRYYDPNGFNAHYLRNLLFFDLGYDNSLDPSSPQVQEHILEVERRFHLVLLQEYFDESLVLLKD

SEQ ID NO: 14070 - protein, 422 aa, Homo sapiens
MGRTYIVEETVGQYLSNINLQGKAFVSGLLIGQCSSQKDYVILATRTPPKEEQSENLKHPKAKLDNLDEEWATEHACQLMFAVEKSINRKRLWNFTEEEVSERVTLHICASTKKIFCRTYDIHDPKSSARPADWKYQSGLSSSWLSLECTVHINIHIPLSATSVSYTLEKNTKNGLTRWAKEIENGVYLINGQVKDEDCDLLEGQKKSSRGNTQATSHSFDVRVLTQLLLNSDHRSTATVQICSGSVNLKGAVKCRAYIHSSKPKVKDAVQAVKRDILNTVADRCEMLFEDLLLNEIPEKKDSEKEFHVLPYRVFVPLPGSTVMLCDYKFDDESAEEIRDHFMEMLDHTIQIEDLEIAEETNTACMSSSMNSQASLDNTDDEQPKQPIKTTMLLKIQQNIGVIAAFTVAVLAAGISFHYFSD

SEQ ID NO: 14071 - protein, 452 aa, Homo sapiens
MNSGILQVFQRALTCPICMNYFLDPVTIDCGHSFCRPCLYLNWQDTAVLAQCSECKKTTRQRNLNTDICLKNMAFIARKASLRQFLSSEEQICGMHRETKKMFCEVDKSLLCLPCSNSQEHRNHIHCPIEWAAEERREELLKKMQSLWEKACENLRNLNMETTRTRCWKDYVSLRIEAIRAEYQKMPAFLHEEEQHHLERLRKEGEDIFQQLNESKARMEHSRELLRGMYEDLKQMCHKADVELLQAFGDILHRYESLLLQVSEPVNPELSAGPITGLLDSLSGFRVDFTLQPERANSHIFLCGDLRSMNVGCDPQDDPDITGKSECFLVWGAQAFTSGKYYWEVHMGDSWNWAFGVCNNYWKEKRQNDKIDGEEGLFLLGCVKEDTHCSLFTTSPLVVQYVPRPTSTVGLFLDCEGRTVSFVDVDQSSLIYTIPNCSFSPPLRPIFCCSHF

SEQ ID NO: 14072 - protein, 823 aa, Homo sapiens
MDLDKPSVWGSLKQRTRPLLINLSKKKVKKNPSKPPDLRARHHLDRRLSLSVPDLLEAEALAPEGRPYSGPQSSYTSVPSSLSTAGIFPKSSSSSLKQSEEELDWSQEEASHLHVVETDSEEAYASPAERRRVSSNGIFDLQKTSLGGDAPEEPEKLCGSSDLNASMTSQHFEEQSVPGEASDGLSNLPSPFAYLLTIHLKEGRNLVVRDRCGTSDPYVKFKLNGKTLYKSKVIYKNLNPVWDEIVVLPIQSLDQKLRVKVYDRDLTTSDFMGSAFVILSDLELNRTTEHILKLEDPNSLEDDMGVIVLNLNLVVKQGDFKRHRWSNRKRLSASKSSLIRNLRLSESLKKNQLWNGIISITLLEGKNVSGGSMTEMFVQLKLGDQRYKSKTLCKSANPQWQEQFDFHYFSDRMGILDIEVWGKDNKKHEERLGTCKVDISALPLKQANCLELPLDSCLGALLMLVTLTPCAGVSVSDLCVCPLADLSERKQITQRYCLQNSLKDVKDVGILQVKVLKAADLLAADFSGKSDPFCLLELGNDRLQTHTVYKNLNPEWNKVFTFPIKDIHDVLEVTVFDEDGDKPPDFLGKVAIPLLSIRDGQPNCYVLKNKDLEQAFKGVIYLEMDLIYNPVKASIRTFTPREKRFVEDSRKLSKKILSRDVDRVKRITMAIWNTMQFLKSCFQWESTLRSTIAFAESEKKGLIERIYMVQDIVSTVQNVLEEIASFGERIKNTFNWTVPFLSSLACLILAAATIILYFIPLRYIILIWGINKFTKKLRNPYSIDNNELLDFLSRVPSDVQKVQYAELKLCSSHSPLRKKRSAL

SEQ ID NO: 14073 - protein, 172 aa, Homo sapiens
MAPRRARGCRTLGLPALLLLLLLRPPATRGITCPPPMSVEHADIWVKSYSLYSRERYICNSGFKRKAGTSSLTECVLNKATNVAHWTTPSLKCIKPAASSPSSNNTAATTAAIVPGSQLMPSKSPSTGTTEISSHESSHGTPSQTTAKNWELTASASHQPPGVYPQGHSDTT

SEQ ID NO: 14074 - protein, 1093 aa, Homo sapiens
MGTGDFICISMTGGAPWGFRLQGGKEQKQPLQVAKIRNQSKASGSGLCEGDEVVSINGNPCADLTYPEVIKLMESITDSLQMLIKRPSSGISEALISENENKNLEHLTHGGYVESTTLQIRPATKTQCTEFFLAPVKTEVPLAENQRSGPDCAGSLKEETGPSYQRAPQMPDSQRGRVAEELILREKVEAVQPGPVVELQLSLSQERHKGASGPLVALPGAEKSKSPDPDPNLSHDRIVHINSIPTNEKADPFLRSSKIIQISSGRELRVIQESEAGDAGLPRVEVILDCSDRQKTEGCRLQAGKECVDSPVEGGQSEAPPSLVSFAVSSEGTEQGEDPRSEKDHSRPHKHRARHARLRRSESLSEKQVKEAKSKCKSIALLLTDAPNPNSKGVLMFKKRRRRARKYTLVSYGTGELEREADEEEEGDKEDTCEVAFLGASESEVDEELLSDVDDNTQVVNFDWDSGLVDIEKKLNRGDKMEMLPDTTGKGALMFAKRRERMDQITAQKEEDKVGGTPSREQDAAQTDGLRTTTSYQRKEEESVRTQSSVSKSYIEVSHGLGHVPQQNGFSGTSETANIQRMVPMNRTAKPFPGSVNQPATPFSPTRNMTSPIADFPAPPPYSAVTPPPDAFSRGVSSPIAGPAQPPPWPQPAPWSQPAFYDSSERIASRDERISVPAKRTGILQEAKRRSTTKPMFTFKEPKVSPNPELLSLLQNSEGKRGTGAGGDSGPEEDYLSLGAEACNFMQSSSAKQKTPPPVAPKPAVKSSSSQPVTPVSPVWSPGVAPTQPPAFPTSNPSKGTVVSSIKIAQPSYPPARPASTLNVAGPFKGPQAAVASQNYTPKPTVSTPTVNAVQPGAVGPSNELPGMSGRGAQLFAKRQSRMEKYVVDSDTVQAHAARAQSPTPSLPASWKYSSNVRAPPPVAYNPIHSPSYPLAALKSQPSAAQPSKMGKKKGKKPLNALDVMKHQPYQLNASLFTFQPPDAKDGLPQKSSVKVNSALAMKQALPPRPVNAASPTNVQASSVYSVPAYTSPPSFFAEASSPVSASPVPVGIPTSPKQESASSSYFVAPRPKFSAKKSGVTIQVWKPSVVEE

SEQ ID NO: 14075 - protein, 72 aa, Homo sapiens
MRLLLALLGVLLSVPGPPVLSLEASEEVELASIHLSLCLRERTGLAGRRALSWAAELVSPAWLPAWSSKSRS

SEQ ID NO: 14076 - protein, 379 aa, Homo sapiens
LCLPIRSANIPDPLTPSESTQELHASDMPEYSVTNEFCRKHFLIGILLREVGFALQEDQDVRHLALAVLKNLMAKHSFDDRYREPRKQAQIASLYMPLYGMLLDNMPRIYLKDLYPFTVNTSNQGSRDDLSTNGGFQSQTAIKHANSVDTSFSKDVLNSIAVNHADSRASLASLDSNPSTNEKSSEKTDNCEKIPRPLSLIGSTLRFDKLDQAETRSLLMCFLHIMKTISYETLIAYWQRAPSPEVSDFFSILDVCLQNFRYLGKRNIIRKIAAAFKFVQSTQNNGTLKGSNPSCQTSGLLSQWMHSTSSHEGHKQHRSQTLPIIRGKNALSNPKLLQMLDNTMTSNSNEIDIVHHVDTEANIATEVCLTILDLLSLFT

SEQ ID NO: 14077 - protein, 438 aa, Homo sapiens
MAGGGSDLSTRGLNGGVSQVANEMNHLPAHSQSLQRLFTEDQDVDEGLVYDTVFKHFKRHKLEISNAIKKTFPFLEGLRDRELITNKMFEDSEDSCRNLVPVQRVVYNVLSELEKTFNLSVLEALFSEVNMQEYPDLIHIYKSFKNAIQDKLSFQESDRKEREERPDIKLSLKQGEVPESPEARKESDQACGKMDTVDIANNSTLGKPKRKRRKKKGHGWSRMGTRTQKNNQQNDNSKADGQLVSSEKKANMNLKDLSKIRGRKRGKPGTHFTQSDRAPQKRVRSRASRKHKDETVDFQAPLLPVTCGGVKGILHKEKLEQGTLAKCIQTEDGKWFTPMEFEIKGGYARSKNWRLSVRCGGWPLRRLMEEGSLPNPPRIYYRNKKRILKSQNNSSVDPCMRNLDECEVCRDGGELFCCDTCSRVFHEDCHIPPVESEK

SEQ ID NO: 14078 - protein, 523 aa, Homo sapiens
MAALLRRLLQRERPSAASGRPVGRREANLGTDAGVAVRVRFAPSPTGFLHLGGLRTALYNYIFAKKYQGSFILRLEDTDQTRVVPGAAENIEDMLEWAGIPPDESPRRGGPAGPYQQSQRLELYAQATEALLKTGAAYPCFCSPQRLELLKKEALRNHQTPRYDNRCRNMSQEQVAQKLAKDPKPAIRFRLEQVVPAFQDLVYGWNRHEVASVEGDPVIMKSDGFPTYHLACVVDDHHMGISHVLRGSEWLVSTAKHLLLYQALGWQPPHFAHLPLLLNRDGSKLSKRQGDVFLEHFAADGFLPDSLLDIITNCGSGFAENQMGRTLPELITQFNLTQVTCHSALLDLEKLPEFNRLHLQRLVSNESQRRQLVGKLQVLVEEAFGCQLQNRDVLNPVYVERILLLRQGHICRLQDLVSPVYSYLWTRPAVGRAQLDAISEKVDVIAKRVLGLLERSSMSLTQDMLNGELKKLSEGLEGTKYSNVMKLLRMALSGQQQGPPVAEMMLALGPKEVRERIQKVVSS

SEQ ID NO: 14079 - protein, 409 aa, Homo sapiens
MTSTNSVKLEMQSDEECDRKPLSREDEIRGHDEGSSLEEPLIESSEVADNRKVQELQGEGGIRLPNGERPFHCNQCGASFTQKGNLLRHIKLHSGEKPFKCPFCSYACRRRDALTGHLRTHSVGKPHKCNYCGRSYKQRSSLEEHKERCHNYLQNVSMEAAGQVMSHHGEKLMRFSYPDIHFDMNLTYEKEAELMQSHMMDQAINNAITYLGAEALHPLMQHPPSTIAEVAPVISSAYSQVYHPNRIERPISRETADSHENNMDGPISLIRPKSRPQEREASPSNSCLDSTDSESSHDDHQSYQGHPALNPKRKQSPAYMKEDVKALDTTKAPKGSLKDIYKVFNGEGEQIRAFKCEHCRVLFLDHVMYTIHMGCHGYRDPLECNICGYRSQDRYEFSSHIVRGEHTFH

SEQ ID NO: 14080 - protein, 752 aa, Homo sapiens
MSKNSEFINLSFLLDHEKEMILGVLKRDEYLKKVEDKRIRKLKNELLEAKRRSGKTQQEASRVCVHCHRNLGLIFDRGDPCQACSLRVCRECRVAGPNGSWKCTVCDKIAQLRIITGEWFFEEKAKRFKQVNVLGTDVVRQSILRRSPGAEEVQSQEQTRQDAEKSDTSPVAGKKASHDGPKRKGFLLSKFRSATRGEIITPKTDTGRSYSLDLDGQHFRSLKSPPGSDRGSTGSSDLNDQEPGPRTPKSSRSNGVTPGTQSSPAPSTRTVTSVISREYGFENSMDLAAIEGTSQELTKSHRRNTSGTPSIAVSGTSLSSDQSRSELDLSESFTEDSEDTVSIRSKSVPGALDKDSLEETEESIDALVSSQLSTNTHRLASGLSTSSQAGSDRKWTYLNVPDADSDTTSLNSMMSVYSETGDYGNVKVSGEILLHISYCYKTGGLYIFVKNCRNLAIGDEKKQRTDAYVKSYLLPDKSRNNKRKTKIRTGTNPEFNETLKYTISHTQLETRTLQLSVWHYDRFGRNSFLGEVEIPFDSWNFENPTDEWFVLQPKVEFAPDIGLQYKGELTVVLRYIPPEENLMLPPEQLQGNKTFKKGKKKESPVISGGILEVFIKEAKNLTAVKSGGTSDSFVKGYLLPDDSKATKHKTLVIKKSVNPQWNHTFMFSGIHPQDIKNVCLELTIWDKEAFSSNIFLGGVRLNSGSGVSHGKNVDWMDSQGEEQRLWQKMANNPGTPFEGVLMLRSSMGKCRL

SEQ ID NO: 14081 - protein, 548 aa, Homo sapiens
MRMCTPIRGLLMALAVMFGTAMAFAPIPRITWEHREVHLVQFHEPDIYNYSALLLSEDKDTLYIGAREAVFAVNALNISEKQHEVYWKVSEDKKAKCAEKGKSKQTECLNYIRVLQPLSATSLYVCGTNAFQPACDHLNLTSFKFLGKNEDGKGRCPFDPAHSYTSVMVDGELYSGTSYNFLGSEPIISRNSSHSPLRTEYAIPWLNEPSFVFADVIRKSPDSPDGEDDRVYFFFTEVSVEYEFVFRVLIPRIARVCKGDQGGLRTLQKKWTSFLKARLICSRPDSGLVFNVLRDVFVLRSPGLKVPVFYALFTPQLNNVGLSAVCAYNLSTAEEVFSHGKYMQSTTVEQSHTKWVRYNGPVPKPRPGACIDSEARAANYTSSLNLPDKTLQFVKDHPLMDDSVTPIDNRPRLIKKDVNYTQIVVDRTQALDGTVYDVMFVSTDRGALHKAISLEHAVHIIEETQLFQDFEPVQTLLLSSKKVLQTFALSGRRMGELWRPVSLCRPMHCPMAGPMHSAGCRTPSGKALSIAALSSPQQGTRLRRCRLL

SEQ ID NO: 14082 - protein, 129 aa, Homo sapiens
MFEDSEDSCRNLVPVQRVVYNVLSELEKTFNLSVLEALFSEVNMQEYPDLIHIYKSFKNAIQDKLSFQESDRKEREERPDIKLSLKQGEVPESPEARKESDQACGKMDTVDIANNSTLGKPKRKRSKNK

SEQ ID NO: 14083 - protein, 690 aa, Homo sapiens
MSISALGGRTKGKPLPPGEEERNNVLKQMKVRTTLKGDKSWITKQDESEGRTIELPSGRSRATSFSSAGEVPKPRPPSTRAPTGYIIRGVFTKPIDSSSQPQQQFPKANGTPKSAASLVRTANAGPPRPSSSGYKMTTEDYKKLAPYNIRRSSTSGDTEEEEEEEVVPFSSDEQKRRSEAASGVLRRTAPREHSYVLSAAKKSTGSPTQETQAPFIAKRVEVVEEDGPSEKSQDPPALARSTPGSNSADGGRTKASRAIWIECLPSMPSPAGSQELSSRGEEIVRLQILTPRAGLRLVAPDVEGMRSSPGNKDKEAPCSRELQRDLAGEEAFRAPNTDAARSSAQLSDGNVGSGATGSRPEGLAAVDIGSERGSSSATSVSAVPADRKSNSTAAQEDAKADPKGALADYEGKDVATRVGEAWQERPGAPRGGQGDPAVPAQQPADPSTPERQSSPSGSEQLVRRESCGSSVLTDFEGKDVATKVGEAWQDRPGAPRGGQGDPAVPTQQPADPSTPEQQNSPSGSEQFVRRESCTSRVRSPSSCMVTVTVTATSEQPHIYIPAPASELDSSSTTKGILFVKEYVNASEVSSGKPVSARYSNVSSIEDSFAMEKKPPCGSTPYSERTTGGICTYCNREIRDCPKITLEHLGICCHEYCFKCGICSKPMGDLLDQIFIHRDTIHCGKCYEKLF

SEQ ID NO: 14084 - protein, 385 aa, Homo sapiens
MSLILNILREMLEYFGVPVEQVLLIWENKDYGSTRSIVRIIGKMLPLEPCRRPNFELIPLLNSVDSDNCGSMVPSFADILYVANDEEASYLRFRNSIWKNEEEKVEIFHPLRLVRDPLSPAVRQKETVKNDLPVNEAAIRKIAALENELTFLRSQIAAIVEMQELKNSTNSSSFGLSDERISLGQLSSSRAAHLSVDPDQLPGSVLSPPPPPPLPPQFSSLQPPCFPPVQPGSNNICDSDNPATEMSKQNPAANKTNYSHHSKSQRNKDIPNMLDVLKDMNKVKLRAIERSPGGRPIHKRKRQNSHWDPVSLISHALKQKFAFQEDDSFEKENRSWESSPFSSPETSRFGHHISQSEGQRTKEEMVNTKAVDQGISNTSLLNSRI

SEQ ID NO: 14085 - protein, 267 aa, Homo sapiens
CILCCQCSCCQNWIQPIVPDKIRATSMENITSSIFDVISKGKVAPTFSYWSFRNDGLKASDVLPILKEKVAFVSGGRDKRGGPILTFPARSNHDRIRQEDLRKLVTYLASVPSEDVCKRGFTVIIDMRGSKWDLIKPLLKTLQEAFPAEIHVALIIKPDNFWQKQKTNFGSSKFIFETSMVSVEGLTKLVDPSQLTEEFDGSLDYNHEEWIELRLSLEEFFNSAVHLLSRLEDLQEMLARKEFPVDVEGSRRLIDEHTQLKKKVLKA

SEQ ID NO: 14086 - protein, 357 aa, Homo sapiens
SVTLYSGEDYPDTAPVIHGVDVINSTLVKVTWSTVPKDRVHGRLKGYQINWWKTKSLLDGRTHPKEVNILRFSGQRNSGMVPSLDAFSEFHLTVLAYNSKGAGPESEPYIFQTPEGVPEQPTFLKVIKVDKDTATLSWGLPKKLNGNLTGYLLQYQIINDTYEIGELNDINITTPSKPSWHLSNLNATTKYKFYLRACTSQGCGKPITEESSTLGEGKYAGLYDDISTQGWFIGLMCAIALLTLLLLTVCFVKRNRGGKYSVKEKEDLHPDPEIQSVKDETFGEYSDSDEKPLKGSLRSLNRDMQPTESADSLVEYGEGDHGLFSEDGSFIGAYAGSKEKGSVESNGSSTATFPLRA

SEQ ID NO: 14087 - protein, 1165 aa, Homo sapiens
MRPSGTAGAALLALLAALCPASRALEEKKVCQGTSNKLTQLGTFEDHFLSLQRMFNNCEVVLGNLEITYVQRNYDLSFLKTIQEVAGYVLIALNTVERIPLENLQIIRGNMYYENSYALAVLSNYDANKTGLKELPMRNLQGQKCDPSCPNGSCWGAGEENCQKLTKIICAQQCSGRCRGKSPSDCCHNQCAAGCTGPRESDCLVCRKFRDEATCKDTCPPLMLYNPTTYQMDVNPEGKYSFGATCVKKCPRNYVVTDHGSCVRACGADSYEMEEDGVRKCKKCEGPCRKVCNGIGIGEFKDSLSINATNIKHFKNCTSISGDLHILPVAFRGDSFTHTPPLDPQELDILKTVKEITGFLLIQAWPENRTDLHAFENLEIIRGRTKQHGQFSLAVVSLNITSLGLRSLKEISDGDVIISGNKNLCYANTINWKKLFGTSGQKTKIISNRGENSCKATGQVCHALCSPEGCWGPEPRDCVSCRNVSRGRECVDKCNLLEGEPREFVENSECIQCHPECLPQAMNITCTGRGPDNCIQCAHYIDGPHCVKTCPAGVMGENNTLVWKYADAGHVCHLCHPNCTYGCTGPGLEGCPTNGPKIPSIATGMVGALLLLLVVALGIGLFMRRRHIVRKRTLRRLLQERELVEPLTPSGEAPNQALLRILKETEFKKIKVLGSGAFGTVYKGLWIPEGEKVKIPVAIKELREATSPKANKEILDEAYVMASVDNPHVCRLLGICLTSTVQLITQLMPFGCLLDYVREHKDNIGSQYLLNWCVQIAKGMNYLEDRRLVHRDLAARNVLVKTPQHVKITDFGLAKLLGAEEKEYHAEGGKVPIKWMALESILHRIYTHQSDVWSYGVTVWELMTFGSKPYDGIPASEISSILEKGERLPQPPICTIDVYMIMVKCWMIDADSRPKFRELIIEFSKMARDPQRYLVIQGDERMHLPSPTDSNFYRALMDEEDMDDVVDADEYLIPQQGFFSSPSTSRTPLLSSLSATSNNSTVACIDRNGLQSCPIKEDSFLQRYSSDPTGALTEDSIDDTFLPVPEYINQSVPKRPAGSVQNPVYHNQPLNPAPSRDPHYQDPHSTAVGNPEYLNTVQPTCVNSTFDSPAHWAQKGSHQISLDNPDYQQDFFPKEAKPNGIFKGSTAENAEYLRVAPQSSEFIGA

SEQ ID NO: 14088 - protein, 380 aa, Homo sapiens
MAGSDVDSEGPARRGGAARRPGAPGGPGSEAAAGCPEPLSTAEAPAESATLPAWMRLYFYGMHGITLDVLVSSARRFARSPDLRMLGFSSPYRCLLHSLTHFALEKVYLQQRRCPNAFVFNFLLYPSAHVGLQTLAGQALLLSLGGGAGVAVAPGALDLALQYVLALYHCQVFLKRFLRLRYGRQRRRQQQQQQQQQQQQRRGALPVPPGARVPTAAGARRRRPRGPRGAGGAPSQGLPDLPRFLFFGMHGFLDEIFFTFFFNVLGQGDGTTSGHTSLWSFFMYGSCSFVVEKLYFHLHYSRGWGTWKRVPIYVIFIYVWELSWGLGLRTCGACSWDYSHYPLNFMGLITLMYLPGWIFLSVYQDLISNVLWRVQYVPAN

SEQ ID NO: 14089 - protein, 221 aa, Homo sapiens
MRRVLRLLLGCFLTELCARVCRAQERAGHGQLAQLGGVLLLAGGNRSGAASGEASEGAEASDAPPTRAPTPDFCRGYFDVMGQWDPPFNCSSGDFIFCCGTCGFRFCCTFKKRRLNQSTCTNYDTPLWLNTGKPPARKDDPLHDPTKDKTNLIVYIICGVVAVMVLVGIFTKLGLEKAHRPQREHMSRLYDNLLFMEAQISFQEDEPAPGEWSVGLQTWTV

SEQ ID NO: 14090 - protein, 543 aa, Homo sapiens
MASGGGGGNTGAGGGPGMGLSLGLGLGLSLGMSEATSEAEEEAATAEAVGRLATTLWLRLRGWEAVLAAAQRLLVWEKPLHSLVTAAALNGLFWLLSSSSLRPFFLLSVSLLAYFLLDLWQPRFLPDVSASSPEEPHSDSEGAGSGARPHLLSVPELCRYLAESWLTFQIHLQELLQYKRQNPAQFCVRVCSGCAVLAVLGHYVPGIMISYIVLLSILLWPLVVYHELIQRMYTRLEPLLMQLDYSMKAEANALHHKHDKRKRQGKNAPPGGDEPLAETESESEAELAGFSPVVDVKKTALALAITDSELSDEEASILESGGFSVSRATTPQLTDVSEDLDQQSLPSEPEETLSRDLGEGEEGELAPPEDLLGRPQALSRQALDSEEEEEDVAAKETLLRLSSPLHFVNTHFNGAGSPPDGVKCSPGGPVETLSPETVSGGLTALPGTLSPPLCLVGSDPAPSPSILPPVPQDSPQPLPAPEEEEALTTEDFELLDQGELEQLNAELGLEPETPPKPPDAPPLGPDIHSLVQSDQEAQAVAEP

SEQ ID NO: 14091 - protein, 1325 aa, Homo sapiens
MEAVSRVFPALAGQAPEEQGEIIKVKVKEEDHTWDQESALRRNLSYTRELSRQRFRQFCYQETPGPREALSQLRELCRQWLNPEIHTKEQILELLVLEQFLTILPEELQSWVREHNPESGEEVVTLLEDLERELDEPRQQVSQGTYGQEVSMEEMIPLDSAKESLGTQLQSMEDRMECESPEPHPLQDNGSFLWFSMMSQSMGGDNLSSLDTNEAEIEPENMREKFFRSLARLLENKSNNTKIFSKAKYCQLIKEVKEAKAKAKKESVDYRRLARFDVILVQGNEKLIEAVNGETDKIRYYLHSEDLFDILHNTHLSIGHGGRTRMEKELQAKYKNITKEVIMLYLTLCKPCQQKNSKLKKVLTSKSIKEVSSRCQVDLIDMQLNPDGEYRFILHYQDLCTKLTFLRSLKSKRPTEVAHALLDIFTIIGAPSVLQSDNGREFSSQVVSELSNIWPELKIVHGKSQTCQSQSSAEQTEDIRKRIFSWMQTNNSSHWTEFLWFIQMSQNQPYHRSMQQTPCESAFSSEAKLGLSHSQLTEELVASLHTENELDQADKELENTLRAQYEENIETGTDSSDIEENLSVTPKVAEKSPPESRLRFLSCVVCEKECTGVNSCISCDGNIHAICGVPSQHGTEGCGRQITCSLCYETSTMKRKHDEIQRSLPVKPSKMLKPSGTPFSPDKVGDWMAKQASLDFFVKKRHAFSEHSSSNKRNVNNRSYPEEGKTKRVHASFTRKYDPSYIEFGFVAVIDGEVLKPQCIICGDVLANEAMKPSKLKRHLYSKHKEISSQPKEFFERKSSELKSQPKQVFNVSHINISALRASYKVALPVAKSKTPYTIAETLVKDCIKEVCLEMLGESAAKKVAQVPLSNDTIARRIQELANDMEDQLIEQIKLAKYFSLQLDECRDIANMIILLVYVRFEHDDDIKEEFFFSASLPTNTTSSELYEAVKNYIVNKCGLEFKFCVGVCSDGAASMTGKHSEVVTQIKELAPECKTTHCFIHRESLAMKKISAELNSVLNDIVKIVNYIKSNSLNSRLFSLLCDNMEADHKQLLLHAEIRWLSRGKVLSRMFEIRNELLVFLQGKKPMWSQLFKDVNWTARLAYLSDIFSIFNDLNASMQGKNATYFSMADKVEGQKQKLEAWKNRISTDCYDMFHNLTTIINEVGNDLDIAHLRKVISEHLTNLLECFEFYFPSKEDPRIGNLWIQNPFLSSKDNLNLTVTLQDKLLKLATDEGLKISFENTASLPSFWIKAKNDYPELAEIALKLLLLFPSTYLCETGFSTLSVIKTKHRNSLNIHYPLRVALSSIQPRLDKLTSKKQAHLSH

SEQ ID NO: 14092 - protein, 1384 aa, Homo sapiens
MSGGASATGPRRGPPGLEDTTSKKKQKDRANQESKDGDPRKETGSRYVAQAGLEPLASGDPSASASHAAGITGSRHRTRLFFPSSSGSASTPQEEQTKEGACEDPHDLLATPTPELLLDWRQSAEEVIVKLRVGVGPLQLEDVDAAFTDTDCVVRFAGGQQWGGVFYAEIKSSCAKVQTRKGSLLHLTLPKKVPMLTWPSLLKKPLGTQELVPGLRCQENGQELSPIALEPGPEPHRAKQEARNQKRAQGRGEVGAGAGPGAQAGPSAKRAVHLCRGPEGDGSRDDPGPRGDAPPFVADPATQVEADEQLCIPPLNSQTCLLGSEENLAPLAGEKAVPPGNDPVSPAMVRSRNPGKDDCAKEEMAVAADAATLVDEPESMVNLAFVKNDSYEKGPDSVVVHVYVKEICRDTSRVLFREQDFTLIFQTRDGNFLRLHPGCGPHTTFRWQVKLRNLIEPEQCTFCFTASRIDICLRKRQSQRWGGLEAPAARGAVGGAKVAVPTGPTPLDSTPPGGAPHPLTGQEEARAVEKDKSKARSEDTGLDSVATRTPMEHVTPKPETHLASPKPTCMVPPMPHSPVSGDSVEEEEEEEKKVCLPGFTGLVNLGNTCFMNSVIQSLSNTRELRDFFHDRSFEAEINYNNPLGTGGRLAIGFAVLLRALWKGTHHAFQPSKLKAIVASKASQFTGYAQHDAQEFMAFLLDGLHEDLNRIQNKPYTETVDSDGRPDEVVAEEAWQRHKMRNDSFIVDLFQGQYKSKLVCPVCAKVSITFDPFLYLPVPLPQKQKVLPVFYFAREPHSKPIKFLVSVSKENSTASEVLDSLSQSVHVKPENLRLAEVIKNRFHRVFLPSHSLDTVSPSDTLLCFELLSSELAKERVVVLEVQQRPQVPSVPISKCAACQRKQQSEDEKLKRCTRCYRVGYCNQLCQKTHWPDHKGLCRPENIGYPFLVSVPASRLTYARLAQLLEGYARYSVSVFQPPFQPGRMALESQSPGCTTLLSTGSLEAGDSERDPIQPPELQLVTPMAEGDTGLPRVWAAPDRGPVPSTSGISSEMLASGPIEVGSLPAGERVSRPEAAVPGYQHPSEAMNAHTPQFFIYKIDSSNREQRLEDKGDTPLELGDDCSLALVWRNNERLQEFVLVASKELECAEDPGSAGEAARAGHFTLDQCLNLFTRPEVLAPEEAWYCPQCKQHREASKQLLLWRLPNVLIVQLKRFSFRSFIWRDKINDLVEFPVRNLDLSKFCIGQKEEQLPSYDLYAVINHYGGMIGGHYTACARLPNDRSSQRSDVGWRLFDDSTVTTVDESQVVTRYAYVLFYRRRNSPVERPPRAGHSEHHPDLGPAAEAAASQGLGPGQAPEVAPTRTAPERFAPPVDRPAPTYSNMEEVD

SEQ ID NO: 14093 - protein, 174 aa, Homo sapiens
MKKKLVVLGLLAVVLVLVIVGLCLWLPSASKEPDNHVYTRAAVAADAKQCSKIGRDALRDGGSAVDAAIAALLCVGLMNAHSMGIGGGLFLTIYNSTTRKAEVINAREVAPRLAFATMFNSSEQSQKGGLSVAVPGEIRGYELAHQRHGRLPWARLFQPSIQLARQGFPVGKGL

SEQ ID NO: 14094 - protein, 337 aa, Homo sapiens
MPDSNFAERSEEQVSGAKVIAQALKTQDVEYIFGIVGIPVTEIAIAAQQLGIKYIGMRNEQAVDICAEELGNNVKPAVTLLGNIHAVTKQLLEELDKTPWQYPPESKWWKTLREKMKSNEAASKELASKKSLPMNYYTVFYHVQEQLPRDCFVVSEGANTMDIGRTVLQNYLPRHRLDAGTFGTMGVGLGFAIAAAVVAKDRSPGQWIICVEGDSAFGFSGMEVETICRYNLPIILLVVNNNGIYQGFDTDTWKEMLKFQDATAVVPPMCLLPNSHYEQVMTAFGGKGYFVQTPEELQKSLRQSLADTTKPSLINIMIEPQATRKAQDFHWLTRSNM

SEQ ID NO: 14095 - protein, 553 aa, Homo sapiens
MSTETELQVAVKTSAKKDSRKKGQDRSEATLIKRFKGEGVRYKAKLIGIDEVSAARGDKLCQDSMMKLKGVVAGARSKGEHKQKIFLTISFGGIKIFDEKTGALQHHHAVHEISYIAKDITDHRAFGYVCGKEGNHRFVAIKTAQAAEPVILDLRDLFQLIYELKQREELEKKAQKDKQCEQAVYQVPTSQKKEGVYDVPKSQPVSNGYSFEDFEERFAAATPNRNLPTDFDEIFEATKAVTQLELFGDMSTPPDITSPPTPATPGDAFIPSSSQTLPASADVFSSVPFGTAAVPSGYVAMGAVLPSFWGQQPLVQQQMVMGAQPPVAQVMPGAQPIAWGQPGLFPATQQPWPTVAGQFPPAAFMPTQTVMPLPAAMFQGPLTPLATVPGTSDSTRSSPQTDKPRQKMGKETFKDFQMAQPPPVPSRKPDQPSLTCTSEAFSSYFNKVGVAQDTDDCDDFDISQLNLTPVTSTTPSTNSPPTPAPRQSSPSKSSASHASDPTTDDIFEEGFESPSKSEEQEAPDGSQASSNSDPFGEPSGEPSGDNISPQAGS

SEQ ID NO: 14096 - protein, 164 aa, Homo sapiens
MSRPLLITFTPATDPSDLWKDGQQQPQPEKPESTLDGAAARAFYEALIGDESSAPDSQRSQTEPARERKRKKRRIMKAPAAEAVAEGASGRHGQGRSLEAEDKMTHRILRAAQEGDLPELRRLLEPHEAGGAGGNINARDAFWWTPLMCAARAGQGAAVSYLLG

SEQ ID NO: 14097 - protein, 534 aa, Homo sapiens
MDTQAGSVDEENGRQLGEVELQCGICTKWFTADTFGIDTSSCLPFMTNYSFHCNVCHHSGNTYFLRKQANLKEMCLSALANLTWQSRTQDEHPKTMFSKDKDIIPFIDKYWECMTTRQRPGKMTWPNNIVKTMSKERDVFLVKEHPDPGSKDPEEDYPKFGLLDQDLSNIGPAYDNQKQSSAVSTSGNLNGGIAAGSSGKGRGAKRKQQDGGTTGTTKKARSDPLFSAQRLPPHGYPLEHPFNKDGYRYILAEPDPHAPDPEKLELDCWAGKPIPGDLYRACLYERVLLALHDRAPQLKISDDRLTVVGEKGYSMVRASHGVRKGAWYFEITVDEMPPDTAARLGWSQPLGNLQAPLGYDKFSYSWRSKKGTKFHQSIGKHYSSGYGQGDVLGFYINLPEDTETAKSLPDTYKDKALIKFKSYLYFEEKDFVDKAEKSLKQTPHSEIIFYKNGVNQGVAYKDIFEGVYFPAISLYKSCTVSINFGPCFKYPPKDLTYRPMSDMGWGAVVEHTLADVLYHVETEVDGRRSPPWEP

SEQ ID NO: 14098 - protein, 984 aa, Homo sapiens
DFPFTREEALQADKKLNLFIGASVDPAGVTMIDAVKIYGKTKEQFGWPDEPPEEFPSASVSNICPSNLNQSNGTGDSDSAAPTTTSGTVLERLVVSSLEALESCFAVGPIIEKERNKNAAQELATLLLSLPAPASVQQQSKSLLASLHTSRSAYHSHKDQALLSKAVQCLNTSSKEGKDLDPEVFQRLVITARSIAIMRPNNLVHFTESKLPQMETDCFFPRCACWSLGIVGILIGAPLETPSPEGMDEGKEPQKQLEGDCCSFITQLVNHFWKLHASKPKNAFLAPACLPGLTHIEATVNALVDIIHGYCTCELDCINTASKIYMQMLLCPDPAVSFSCKQALIRVLRPRNKRRHVTLPSSPRSNTPMGDKDDDDDDDADEKMQSSGIPNGGHIRQESQEQSEVDHGDFEMVSESMVLETAENVNNGNPSPLEALLAGAEGFPPMLDIPPDADDETMVELAIALSLQQDQQAPASDDEGSTAATDGSTLRTSPADHGGSVGSESGGSAVDSVAGEHSVSGRSSAYGDATAEGHPAGPGSVSSSTGAISTTTGHQEGDGSEGEGEGETEGDVHTSNRLHMVRLMLLERLLQTLPQLRNVGGVRAIPYMQVILMLTTDLDGEDEKDKGALDNLLSQLIAELGMDKKDVSKKNERSALNEVHLVVMRLLSVFMSRTKSGSKSSICESSSLISSATAAALLSSGAVDYCLHVLKSLLEYWKSQQNDEEPVATSQLLKPHTTSSPPDMSPFFLRQYVKGHAADVFEAYTQLLTEMVLRLPYQIKKITDTNSRIPPPVFDHSWFYFLSEYLMIQQTPFVRRQVRKLLLFICGSKEKYRQLRDLHTLDSHVRGIKKLLEEQGIFLRASVVTASSGSALQYDTLISLMEHLKACAEIAAQRTINWQKFCIKDDSVLYFLLQVSFLVDEGVSPVLLQLLSCALCGSKVLAALAASSGSSSASSSSAPVAASSGQATTQSKSSTKKSKKEEKE

SEQ ID NO: 14099 - protein, 690 aa, Homo sapiens
MPVPWFLLSLALGRSPVVLSLERLVGPQDATHCSPGLSCRLWDSDILCLPGDIVPAPGPVLAPTHLQTELVLRCQKETDCDLCLRVAVHLAVHGHWEEPEDEEKFGGAADSGVEEPRNASLQAQVVLSFQAYPTARCVLLEVQVPAALVQFGQSVGSVVYDCFEAALGSEVRIWSYTQPRYEKELNHTQQLPDCRGLEVWNSIPSCWALPWLNVSADGDNVHLVLNVSEEQHFGLSLYWNQVQGPPKPRWHKNLTGPQIITLNHTDLVPCLCIQVWPLEPDSVRTNICPFREDPRAHQNLWQAARLQLLTLQSWLLDAPCSLPAEAALCWRAPGGDPCQPLVPPLSWENVTVDVNSSEKLQLQECLWADSLGPLKDDVLLLETRGPQDNRSLCALEPSGCTSLPSKASTRAARLGEYLLQDLQSGQCLQLWDDDLGALWACPMDKYIHKRWALVWLACLLFAAALSLILLLKKDHAKAAARGRAALLLYSADDSGFERLVGALASALCQLPLRVAVDLWSRRELSAQGPVAWFHAQRRQTLQEGGVVVLLFSPGAVALCSEWLQDGVSGPGAHGPHDAFRASLSCVLPDFLQGRAPGSYVGACFDRLLHPDAVPALFRTVPVFTLPSQLPDFLGALQQPRAPRSGRLQERAEQVSRALQPALDSYFHPPGTPAPGRGVGPGAGPGAGDGT

SEQ ID NO: 14100 - protein, 289 aa, Homo sapiens
MWNATPSEEPGFNLTLADLDWDASPGNDSLGDELLQLFPAPLLAGVTATCVALFVVGIAGNLLTMLVVSRFRELRTTTNLYLSSMAFSDLLIFLCMPLDLVRLWQYRPWNFGDLLCKLFQFVSESCTYATVLTITALSVERYFAICFPLRAKVVVTKGRVKLVIFVIWAVAFCSAGPIFVLVGVEHENGTDPWDTNECRPTEFAVRSGLLTVMVWVSSIFFFLPVFCLTVLYSLIGRKLWRRRRGDAVVGASLRDQNHKQTVKMLGGSQRALRLSLAGPILSLCLLPSL

SEQ ID NO: 14101 - protein, 114 aa, Homo sapiens
MTPNSMTENGLTAWDKPKHCPDREHDWKLVGMSEACLHRKSHSERRSTLKNEQSSPHLIQTTWTSSIFHLDHDDVNDQSVSSAQTFQTEEKKCKGYIPSYLDKDELCVVCGDKA

SEQ ID NO: 14102 - protein, 575 aa, Homo sapiens
GTVRAVVLQTGFNTAKGDLVRSILYPKPVNFQLYRDAIRFLLCLVGTATIGMIYTLCVYVLSGEPPEEVVRKALDVITIAVPPALPAALTTGIIYAQRRLKKRGIFCISPQRINVCGQLNLVCFDKTGTLTRDGLDLWGVVSCDRNGFQEVHSFASGQALPWGPLCAAMASCHSLILLDGTIQGDPLDLKMFEATTWEMAFSGDDFHIKGVPAHAMVVKPCRTASQVPVEGIAILHQFPFSSALQRMTVIVQEMGGDRLAFMKGAPERVASFCQPETVPTSFVSELQIYTTQGFRVIALAYKKLENDHHATTLTRETVESDLIFLGLLILENRLKEETKPVLEELISARIRTVMITGDNLQTAITVARKSGMVSESQKVILIEANETTGSSSASISWTLVEEKKHIMYGNQDNYINIRDEVSDKGREGSYHFALTGKSFHVISQHFSSLLPKILINGTIFARMSPGQKSSLVEEFQKLDYFVGMCGDGANDCGALKMAHVGISLSEQEASVASPFTSKTPNIECVPHLIKEGRAALVTSFCMFKYMALYSMIQRQTAFQITSFCSRIWPLQLLLV

SEQ ID NO: 14103 - protein, 142 aa, Homo sapiens
MAPGVARGPTPYWRLRLGGAALLLLLIPVAAAQEPPGAACSQNTNKTCEECLKNVSACLKKKTRMLDLKTTKALQHISPDASCEVHAPQPSPAGRPRGHCGLLTLASEPASLPGQAAGELPLKDSPLVLQTGDLLFPVHLCF

SEQ ID NO: 14104 - protein, 737 aa, Homo sapiens
MDICEGRLTCPLNSAVVLASYAVQSHFGDYNSSIHHPGYLSDSHFIPDQNEDFLTKVESLHEQHSGLKQSEAESCYINIARTLDFYGVELHSGRDLHNLDLMIGIASAGVAVYRKYICTSFYPWVNILKISFKRKKFFIHQRQKQAESREHIVAFNMLNYRSCKNLWKSCVEHHTFFQAKKLLPQEKNVLSQYWTMGSRNTKKRSPRLRHEIRKPRHSSADNLANEMTYITETEDVFYTYKGSLAPQDSDSEVSQNRSPHQESLSENNPAQSYLTQKSSSSVSPSSNAPGSCSPDGVDQQLLDDFHRVTKGGSTEDASQYYCDKNDNGDSYLVLIRITPDEDGKFGFNLKGGVDQKMPLVVSRINPESPADTCIPKLNEGDQIVLINGRDISEHTHDQVVMFIKASRESHSRELALVIRRRAVRSFADFKSEDELNQLFPEAIFPMCPEGGDTLEGSMAQLKKGLESGTVLIQFEQLYRKKPGLAITFAKLPQNLDKNRYKDVLPYDTTRVLLQGNEDYINASYVNMEIPAANLVNKYIATQGPLPHTCAQFWQVVWDQKLSLIVMLTTLTERGRTKCHQYWPDPPDVMNHGGFHIQCQSEDCTIAYVSREMLVTNTQTGEEHTVTHLQYVAWPDHGVPDDSSDFLEFVNYVRSLRVDSEPVLVHCSAGIGRTGVLVTMETAMCLTERNLPIYPLDIVRKMRDQRAMMVQTSSQYKFVCEAILRVYEEGLVQMLDPS

SEQ ID NO: 14105 - protein, 126 aa, Homo sapiens
EHHLQRAISAQQVFREKKESMVIPVPEAESNVNYYNRLYKGEFKQPKQFIHIQRIWGHYQPETTLKFLLVCFVHLFLDHSISFNLGCRSAQGSVLRKIFCFSFLPKGKLRNTKFFAFPFCMANLFL

SEQ ID NO: 14106 - protein, 611 aa, Homo sapiens
MPGGKRGLVAPQNTFLENIVRRSSESSFLLGNAQIVDWPVVYSNDGFCKLSGYHRADVMQKSSTCSFMYGELTDKKTIEKVRQTFDNYESNCFEVLLYKKNRTPVWFYMQIAPIRNEHEKVVLFLCTFKDITLFKQPIEDDSTKGWTKFARLTRALTNSRSVLQQLTPMNKTEVVHKHSRLAEVLQLGSDILPQYKQEAPKTPPHIILHYCAFKTTWDWVILILTFYTAIMVPYNVSFKTKQNNIAWLVLDSVVDVIFLVDIVLNFHTTFVGPGGEVISDPKLIRMNYLKTWFVIDLLSCLPYDIINAFENVDEGISSLFSSLKVVRLLRLGRVARKLDHYLEYGAAVLVLLVCVFGLVAHWLACIWYSIGDYEVIDEVTNTIQIDSWLYQLALSIGTPYRYNTSAGIWEGGPSKDSLYVSSLYFTMTSLTTIGFGNIAPTTDVEKMFSVAMMMVGSLLYATIFGNVTTIFQQMYANTNRYHEMLNNVRDFLKLYQVPKGLSERVMDYIVSTWSMSKGIDTEKVLSICPKDMRADICVHLNRKVFNEHPAFRLASDGCLRALAVEFQTIHCAPGDLIYHAGESVDALCFVVSGSLEVIQDDEVVAILDHLS

SEQ ID NO: 14107 - protein, 172 aa, Homo sapiens
MNHLPEDMENALTGSQSSHASLRNIHSINPTQLMARIESYEGREKKGISDVRRTFCLFVTFDLLFVTLLWIIELNVNGGIENTLEKEVMQYDYYSSYFDIFLLAVFRFKVLILAYAVCRLRHWWAIALTTAVTSAFLLAKVILSKLFSQGAFGYVLPIISFILAWIETWFLD

SEQ ID NO: 14108 - protein, 1011 aa, Homo sapiens
MGAYARASGVCARGCLDSAGPWTMSRALRPPLPPLCFFLLLLAAAGARAGGYETCPTVQPNMLNVHLLPHTHDDVGWLKTVDQYFYGIKNDIQHAGVQYILDSVISALLADPTRRFIYVEIAFFSRWWHQQTNATQEVVRDLVRQGRLEFANGGWVMNDEAATHYGAIVDQMTLGLRFLEDTFGNDGRPRVAWHIDPFGHSREQASLFAQMGFDGFFFGRLDYQDKWVRMQKLEMEQVWRASTSLKPPTADLFTGVLPNGYNPPRNLCWDVLCVDQPLVEDPRSPEYNAKELVDYFLNVATAQGRYYRTNHTVMTMGSDFQYENANMWFKNLDKLIRLVNAQQAKGSSVHVLYSTPACYLWELNKANLTWSVKHDDFFPYADGPHQFWTGYFSSRPALKRYERLSYNFLQVCNQLEALVGLAANVGPYGSGDSAPLNEAMAVLQHHDAVSGTSRQHVANDYARQLAAGWGPCEVLLSNALARLRGFKDHFTFCQQLNISICPLSQTAARFQVIVYNPLGRKVNWMVRLPVSEGVFVVKDPNGRTVPSDVVIFPSSDSQAHPPELLFSASLPALGFSTYSVAQVPRWKPQARAPQPIPRRSWSPALTIENEHIRATFDPDTGLLMEIMNMNQQLLLPVRQTFFWYNASIGDNESDQASGAYIFRPNQQKPLPVSRWAQIHLVKTPLVQEVHQNFSAWCSQVVRLYPGQRHLELEWSVGPIPVGDTWGKEVISRFDTPLETKGRFYTDSNGREILERRRDYRPTWKLNQTEPVAGNYYPVNTRIYITDGNMQLTVLTDRSQGGSSLRDGSLELMVHRRLLKDDGRGVSEPLMENGSGAWVRGRHLVLLDTAQAAAAGHRLLAEQEVLAPQVVLAPGGGAAYNLGAPPRTQFSGLRRDLPPSVHLLTLASWGPEMVLLRLEHQFAVGEDSGRNLSAPVTLNLRDLFSTFTITRLQETTLVANQLREAASRLKWTTNTGPTPHQTPYQLDPANITLEPMEIRTFLASVQWKEVDG

SEQ ID NO: 14109 - protein, 89 aa, Homo sapiens
MSRPLLITFTPATDPSDLWKDGQQQPQPEKPESTLDGAAARAFYEALIGDESSAPDSQRSQTEPARERKRKKRRIMKAPAAEAVAEGAS

SEQ ID NO: 14110 - protein, 1114 aa, Homo sapiens
MEAAVGVPDGGDQGGAGPREDATPMDAYLRKLGLYRKLVAKDGSCLFRAVAEQVLHSQSRHVEVRMACIHYLRENREKFEAFIEGSFEEYLKRLENPQEWVGQVEISALSLMYRKDFIIYREPNVSPSQVTENNFPEKVLLCFSNGNHYDIVYPIKYKESSAMCQSLLYELLYEKVFKTDVSKIVMELDTLEVADEDNSEISDSEDDSCKSKTAAAAADVNGFKPLSGNEQLKNNGNSTSLPLSRKVLKSLNPAVYRNVEYEIWLKSKQAQQKRDYSIAAGLQYEVGDKCQVRLDHNGKFLNADVQGIHSENGPVLVEELGKKHTSKNLKAPPPESWNTVSGKKMKKPSTSGQNFHSDVDYRGPKNPSKPIKAPSALPPRLQHPSGVRQHAFSSHSSGSQSQKFSSEHKNLSRTPSQIIRKPDRERVEDFDHTSRESNYFGLSPEERREKQAIEESRLLYEIQNRDEQAFPALSSSSVNQSASQSSNPCVQRKSSHVGDRKGSRRRMDTEERKDKDSIHGHSQLDKRPEPSTLENITDDKYATVSSPSKSKKLECPSPAEQKPAEHVSLSNPAPLLVSPEVHLTPAVPSLPATVPAWPSEPTTFGPTGVPAPIPVLSVTQTLTTGPDSAVSQAHLTPSPVPVSIQAVNQPLMPLPQTLSLYQDPLYPGFPCNEKGDRAIVPPYSLCQTGEDLPKDKNILRFFFNLGVKAYSCPMWAPHSYLYPLHQAYLAACRMYPKVPVPVYPHNPWFQEAPAAQNESDCTCTDAHFPMQTEASVNGQMPQPEIGPPTFSSPLVIPPSQVSESHGQLSYQADLESETPGQLLHADYEESLSGKNMFPQPSFGPNPFLGPVPIAPPFFPHVWYGYPFQGFIENPVMRQNIVLPSDEKGELDLSLENLDLSKDCGSVSTVDEFPEARGEHVHSLPEASVSSKPDEGRTEQSSQTRKADTALASIPPVAEGKAHPPTQILNRERETVPVELEPKRTIQSLKEKTEKVKDPKTAADVVSPGANSVDSRVQRPKEESSEDENEVSNILRSGRSKQFYNQTYGSRKYKSDWGYSGRGGYQHVRSEESWKGQPSRSRDEGYQYHRNVRGRPFRGDRRRSGMGDGHRGQHT

SEQ ID NO: 14111 - protein, 731 aa, Homo sapiens
MTHFEDIEPACCRSRAPSPCELPSDPLLSMKQPIMADGPRCKRRKQANPRRKNVVNYDNVVDTGSETDEEDKLHIAEDDGIANPLDQETSPASVPNHESSPHVSQALLPREEEEDEIREGGVEHPWHNNEILQASVDGPEEMKEDYDTMGPEATIQTAINNGTVKNANCTSDFEEYFAKRKLEERDGHAVSIEEYLQRSDTAIIYPEAPEELSRLGTPEANGQEENDLPPGTPDAFAQLLTCPYCDRGYKRLTSLKEHIKYRHEKNEENFSCPLCSYTFAYRTQLERHMVTHKPGTDQHQMLTQGAGNRKFKCTECGKAFKYKHHLKEHLRIHSGEKPYECPNCKKRFSHSGSYSSHISSKKCIGLISVNGRMRNNIKTGSSPNSVSSSPTNSAITQLRNKLENGKPLSMSEQTGLLKIKTEPLDFNDYKVLMATHGFSGTSPFMNGGLGATSPLGVHPSAQSPMQHLGVGMEAPLLGFPTMNSNLSEVQKVLQIVDNTVSRQKMDCKAEEISKLKGYHMKDPCSQPEEQGVTSPNIPPVGLPVVSHNGATKSIIDYTLEKVNEAKACLQSLTTDSRRQISNIKKEKLRTLIDLVTDDKMIENHNISTPFSCQFCKESFPGPIPLHQHERYLCKMNEEIKAVLQPHENIVPNKAGVFVDNKALLLSSVLSEKGMTSPINPYKDHMSVLKAYYAMNMEPNSDELLKISIAVGLPQEFVKEWFEQRKVYQYSN

SEQ ID NO: 14112 - protein, 264 aa, Homo sapiens
MEKARPLWANSLQFVFACISYAVGLGNVWRFPYLCQMYGGGVASVVVSFFLSMYYNVINAWAFWYLFHSFQDPLPWSVCPLNGNHTGYDEECEKASSTQYFWYRKTLNISPSLQENGGVQWEPALCLLLAWLVVYLCILRGTESTGKVVYFTASLPYCVLIIYLIRGLTLHGATNGLMYMFTPKIEQLANPKAWINAATQIFFSLGLGFGSLIAFASYNEPSNNCQKHAIIVSLINSFTSIFASIVTFSIYGFKATFNYENCLK

SEQ ID NO: 14113 - protein, 107 aa, Homo sapiens
MESKEPQLKGIVTRLFSQQGYFLQMHPDGTIDGTKDENSDYTLFNLIPVGLRVVAIQGVKASLYVAMNGEGYLYSSDVFTPECKFKESVFENYYVIYSSTLYRQQES

SEQ ID NO: 14114 - protein, 424 aa, Homo sapiens
MSTSLGSNLSELDRLLLELNAVQHNPPGFPADEANSSPPLPGALSPLYGVPETNSPLGGKAGPLTKEKPKRNGGRGLEDVRPSVESLLDELESSVPSPVPAITVNQGEMSSPQRVTSTQQQTRISASSATRELDELMASLSDFKFMAQGKTGSSSPPGGPPKPGSQLDSMLGSLQSDLNKLGVATVAKGVCGACKKPIAGQVVTAMGKTWHPEHFVCTHCQEEIGSRNFFERDGQPYCEKDYHNLFSPRCYYCNGPILDKVVTALDRTWHPEHFFCAQCGAFFGPEGFHEKDGKAYCRKDYFDMFAPKCGGCARAILENYISALNTLWHPECFVCRECFTPFVNGSFFEHDGQPYCEVHYHERRGSLCSGCQKPITGRCITAMAKKFHPEHFVCAFCLKQLNKGTFKEQNDKPYCQNCFLKLFC

SEQ ID NO: 14115 - protein, 2968 aa, Homo sapiens
MDGRDFGPQRSVHGPPPPLLSGLAMDSHRVGAATAGRLPASGLPGPLPPGKYMAGLNLHPHPGEAFLGSFVASGMGPSASSHGSPVPLPSDLSFRSPTPSNLPMVQLWAAHAHEGFSHLPSGLYPSYLHLNHLEPPSSGSPLLSQLGQPSIFDTQKGQGPGGDGFYLPTAGAPGSLHSHAPSARTPGGGHSSGAPAKGSSSRDGPAKERAGRGGEPPPLFGKKDPRARGEEASGPRGVVDLTQEARAEGRQDRGPPRLAERLSPFLAESKTKNAALQPSVLTMCNGGAGDVGLPALVAEAGRGGAKEAARQDEGARLLRRTETLLPGPRPCPSPLPPPPAPPKGPPAPPAATPAGVYTVFREQGREHRVVAPTFVPSVEAFDERPGPIQIASQARDARAREREAGRPGVLQAPPGSPRPLDRPEGLREKNSVIRSLKRPPPADAPTVRATRASPDPRAYVPAKELLKPEADPRPCERAPRGPAGPAAQQAAKLFGLEPGRPPPTGPEHKWKPFELGNFAATQMAVLAAQHHHSRAEEEAAVVAASSSKKAYLDPGAVLPRSAATCGRPVADMHSAAHGSGEASAMQSLIKYSGSFARDAVAVRPGGCGKKSPFGGLGTMKPEPAPTSAGASRAQARLPHSGGPAAGGGRQLKRDPERPESAKAFGREGSGAQGEAEVRHPPVGIAVAVARQKDSGGSGRLGPGLVDQERSLSLSNVKGHGRADEDCVDDRARHREERLLGARLDRDQEKLLRESKELADLARLHPTSCAPNGLNPNLMVTGGPALAGSGRWSADPAAHLATHPWLPRSGNASMWLAGHPYGLGPPSLHQGMAPAFPPGLGGSLPSAYQFVRDPQSGQLVVIPSDHLPHFAELMERATVPPLWPALYPPGRSPLHHAQQLQLFSQQHFLRQQEFLYLQQQAAQALELQRSAQLVQERLKAQEHRAEMEEKGSKRGLEAAGKAGLATAGPGLLPRKPPGLAAGPAGTYGKAVSPPPSPRASPVAALKAKVIQKLEDVSKPPAYAYPATPSSHPTSPPPASPPPTPGITRKEEAPENVVEKKDLELEKEAPSPFQALFSDIPPRYPFQALPPHYGRPYPFLLQPTAAADADGLAPDVPLPADGPERLALSPEDKPIRLSPSKITEPLREGPEEEPLAEREVKAEVEDMDEGPTELPPLESPLPLPAAEAMATPSPAGGCGGGLLEAQALSATGQSCAEPSECPDFVEGPEPRVDSPGRTEPCTAALDLGVQLTPETLVEAKEEPVEVPVAVPVVEAVPEEGLAQVAPSESQPTLEMSDCDVPAGEGQCPSLEPQEAVPVLGSTCFLEEASSDQFLPSLEDPLAGMNALAAAAELPQARPLPSPGAAGAQALEKLEAAESLVLEQSFLHGITLLSEIAELELERRSQEMGGAERALVARPSLESLLAAGSHMLREVLDGPVVDPLKNLRLPRELKPNKKYSWMRKKEERMYAMKSSLEDMDALELDFRMRLAEVQRQYKEKQRELVKLQRRRDSEDRREEPHRSLARRGPGRPRKRTHAPSALSPPRKRGKSGHSSGKLSSKSLLTSDDYELGAGIRKRHKGSEEEHDALIGMGKARGRNQTWDEHEASSDFISQLKIKKKKMASDQEQLASKLDKALSLTKQDKLKSPFKFSDSAGGKSKTSGGCGRYLTPYDSLLGKNRKALAKGLGLSLKSSREGKHKRAAKTRKMEVGFKARGQPKSAHSPFASEVSSYSYNTDSEEDEEFLKDEWPAQGPSSSKLTPSLLCSMVAKNSKAAGGPKLTKRGLAAPRTLKPKPATSRKQPFCLLLREAEARSSFSDSSEESFDQDESSEEEDEEEELEEEDEASGGGYRLGARERALSPGLEESGLGLLARFAASALPSPTVGPSLSVVQLEAKQKARKKEERQSLLGTEFEYTDSESEVKVRKRSPAGLLRPKKGLGEPGPSLAAPTPGARGPDPSSPDKAKLAVEKGRKARKLRGPKEPGFEAGPEASDDDLWTRRRSERIFLHDASAAAPAPVSTAPATKTSRCAKGGPLSPRKDAGRAKDRKDPRKKKKGKEAGPGAGLPPPRAPALPSEARAPHASSLTAAKRSKAKAKGKEVKKENRGKGGAVSKLMESMAAEEDFEPNQDSSFSEDEHLPRGGAVERPLTPAPRSCIIDKDELKDGLRVLIPMDDKLLYAGHVQTVHSPDIYRVVVEGERGNRPHIYCLEQLLQEAIIDVRPASTRFLPQGTRIAAYWSQQYRCLYPGTVVRGLLDLEDDGDLITVEFDDGDTGRIPLSHIRLLPPDYKIQCAEPSPALLVPSAKRRSRKTSKDTGEGKDGGTAGSEEPGAKARGRGRKPSAKAKGDRAATLEEGNPTDEVPSTPLALEPSSTPGSKKSPPEPVDKRAKAPKARPAPPQPSPAPPAFTSCPAPEPFAELPAPATSLAPAPLITMPATRPKPKKARAAEESGAKGPRRPGEEAELLVKLDHEGVTSPKSKKAKEALLLREDPGAGGWQEPKSLLSLGSYPPAAGSSEPKAPWPKATDGDLAQEPGPGLTFEDSGNPKSPDKAQAEQDGAEESESSSSSSSGSSSSSSSSSSSGSETEGEEEGDKNGDGGCGTGGRNCSAASSRAASPASSSSSSSSSSSSSSSSSSSSSSSSSSSSSSSSSSSSSSSSSSSSSSSSSSSSSSSSSSTTDEDSSCSSDDEAAPAPTAGPSAQAALPTKATKQAGKARPSAHSPGKKTPAPQPQAPPPQPTQPLQPKAQAGAKSRPKKREGVHLPTTKELAKRQRLPSVENRPKIAAFLPARQLWKWFGKPTQRRGMKGKARKLFYKAIVRGKEMIRIGDCAVFLSAGRPNLPYIGRIQSMWESWGNNMVVRVKWFYHPEETSPGKQFHQGQHWDQKSSRSLPAALRVSSQRKDFMERALYQSSHVDENDVQTVSHKCLVVGLEQYEQMLKTKKYQDSEGLYYLAGTYEPTTGMIFSTDGVPVLC

SEQ ID NO: 14116 - protein, 127 aa, Homo sapiens
METPLDVLSRAASLVHADDEKREAALRGEPRIQTLPVASALSSHRTGPPPISPSKRKFSMEPGDEDLDCDNDHVSKMSRIFNPHLNKTANGDCRRDPRERSRSPIERAVAPTMSLHGSHLYTSLPSL

SEQ ID NO: 14117 - protein, 211 aa, Homo sapiens
MDHAEENEILAATQRYYVERPIFSHPVLQERLHTKDKVPDSIADKLKQAFTCTPKKIRNIIYMFLPITKWLPAYKFKEYVLGDLVSGISTGVLQLPQGPFAVISLMIGGVAVRLVPDDIVIPGGVNATNGTEARDALRVKVAMSVTLLSGIIQFCLGVCRFGFVAIYLTEPLVRGFTTAAAVHVFTSMLKYLFGVKTKRYSGIFSVVYASG

SEQ ID NO: 14118 - protein, 499 aa, Homo sapiens
MDTSPLCFSILLVLCIFIQSSALGQSLKPEPFGRRAQAVETNKTLHEMKTRFLLFGETNQGCQIRINHPDTLQECGFNSSLPLVMIIHGWSVDGVLENWIWQMVAALKSQPAQPVNVGLVDWITLAHDHYTIAVRNTRLVGKEVAALLRWLEESVQLSRSHVHLIGYSLGAHVSGFAGSSIGGTHKIGRITGLDAAGPLFEGSAPSNRLSPDDANFVDAIHTFTREHMGLSVGIKQPIGHYDFYPNGGSFQPGCHFLELYRHIAQHGFNAITQTIKCSHERSVHLFIDSLLHAGTQSMAYPCGDMNSFSQGLCLSCKKGRCNTLGYHVRQEPRSKSKRLFLVTRAQSPFKVYHYQFKIQFINQTETPIQTTFTMSLLGTKEKMQKIPITLGKGIASNKTYSFLITLDVDIGELIMIKFKWENSAVWANVWDTVQTIIPWSTGPRHSGLVLKTIRVKAGETQQRSPNRINLGRLNCSLLFCTELFSHDSLAHWSSAASEL

SEQ ID NO: 14119 - protein, 798 aa, Homo sapiens
MHGGRSCGPRTRREPSSGEEAAPVTAMAAESALQVVEKLQARLAANPDPKKLLKYLKKLSTLPITVDILAETGVGKTVNSLRKHEHVGSFARDLVAQWKKLVPVERNAEPDEQDFEKSNSRKRPRDALQKEEEMEGDYQETWKATGSRSYSPDHRQKKHRKLSELERPHKVSHGHERRDERKRCHRMSPTYSSDPESSDYGHVQSPPSCTSPHQMYVDHYRSLEEDQEPIVSHQKPGKGHSNAFQDRLGASQERHLGEPHGKGVVSQNKEHKSSHKDKRPVDAKSDEKASVVSREKSHKALSKEENRRPPSGDNAREKPPSSGVKKEKDREGSSLKKKCLPPSEAASDNHLKKPKHRDPEKAKLDKSKQGLDSFDTGKGAGDLLPKVKEKGSNNLKTPEGKVKTNLDRKSLGSLPKVEETDMEDEFEQPTMSFESYLSYDQPRKKKKKIVKTSATALGDKGLKKNDSKSTGKNLDSVQKLPKVNKTKSEKPAGADLAKLRKVPDVLPVLPDLPLPAIQANYRPLPSLELISSFQPKRKAFSSPQEEEEAGFTGRRMNSKMQVYSGSKCAYLPKMMTLHQQCIRVLKNNIDSIFEVGGVPYSVLEPVLERCTPDQLYRIEEYNHVLIEETDQLWKVHCHRDFKEERPEEYESWREMYLRLQDAREQRLRVLTKNIQFAHANKPKGRQAKMAFVNSVAKPPRDVRRRQEKFGTGGAAVPEKIKIKPAPYPMGSSHASASSISFNPSPEEPAYDGPSTSSAHLAPVVSSTVSYDPRKPTVKKIAPMMAKTIKAFKNRFSRR

SEQ ID NO: 14120 - protein, 611 aa, Homo sapiens
MEPAPARSPRPQQDPARPQEPTMPPPETPSEGRQPSPSPSPTERAPASEEEFQFLRCQQCQAEAKCPKLLPCLHTLCSGCLEASGMQCPICQAPWPLGADTPALDNVFFESLQRRLSVYRQIVDAQAVCTRCKESADFWCFECEQLLCAKCFEAHQWFLKHEARPLAELRNQSVREFLDGTRKTNNIFCSNPNHRTPTLTSIYCRGCSKPLCCSCALLDSSHSELKCDISAEIQQRQEELDAMTQALQEQDSAFGAVHAQMHAAVGQLGRARAETEELIRERVRQVVAHVRAQERELLEAVDARYQRDYEEMASRLGRLDAVLQRIRTGSALVQRMKCYASDQEVLDMHGFLRQALCRLRQEEPQSLQAAVRTDGFDEFKVRLQDLSSCITQGKDAAVSKKASPEAASTPRDPIDVDLPEEAERVKAQVQALGLAEAQPMAVVQSVPGAHPVPVYAFSIKGPSYGEDVSNTTTAQKRKCSQTQCPRKVIKMESEEGKEARLARSSPEQPRPSTSKAVSPPHLDGPPSPRSPVIGSEVFLPNSNHVASGAGEAEERVVVISSSEDSDAENSVSGPEVQPRTPASPHFRSQGAQPQQVTLRLALRLGNFPVRH

SEQ ID NO: 14121 - protein, 182 aa, Homo sapiens
MRLILFFGALFGHIYCLETFVGDQVLEIVPSNEEQIKNLLQLEAQEHLQLDFWKSPTTPGETAHVRVPFVNVQAVKVFLESQGIAYSIMIEDVQVLLDKENEEMLFNRRRERSGNFNFGAYHTLEEISQEMDNLVAEHPGLVSKVNIGSSFENRPMNVLKKSSGRMQKDDGQLNPKPQRQTP

SEQ ID NO: 14122 - protein, 528 aa, Homo sapiens
MQPEEGTGWLLELLSEVQLQQYFLRLRDDLNVTRLSHFEYVKNEDLEKIGMGRPGQRRLWEAVKRRKALCKRKSWMSKVFSGKRLEAEFPPHHSQSTFRKTSPAPGGPAGEGPLQSLTCLIGEKDLRLLEKLGDGSFGVVRRGEWDAPSGKTVSVAVKCLKPDVLSQPEAMDDFIREVNAMHSLDHRNLIRLYGVVLTPPMKMVTELAPLGSLLDRLRKHQGHFLLGTLSRYAVQVAEGMGYLESKRFIHRDLAARNLLLATRDLVKIGDFGLMRALPQNDDHYVMQEHRKVPFAWCAPESLKTRTFSHASDTWMFGVTLWEMFTYGQEPWIGLNGSQILHKIDKEGERLPRPEDCPQDIYNVMVQCWAHKPEDRPTFVALRDFLLEAQPTDMRALQDFEEPDKLHIQMNDVITVIEGRAENYWWRGQNTRTLCVGPFPRNVVTSVAGLSAQDISQPLQNSFIHTGHGDSDPRHCWGFPDRIDECPFSAFSPGHPPAETCGQVLWTGRREACASDPRLHPVSSRTKGL

SEQ ID NO: 14123 - protein, 436 aa, Homo sapiens
MGKRLDQPQMYPQYTYYYPHYLQTKSYAPAPHPMAPPSPSTNSSSNNSSNNSSGEQLSKTNLYIRGLPPGTTDQDLIKLCQPYGKIVSTKAILDKNTNQCKGYGFVDFDSPAAAQKAVASLKANGVQAQMAKQQEQDPTNLYISNLPISMDEQELENMLKPFGHVISTRILRDANGVSRGVGFARMESTEKCEVVIQHFNGKYLKTPPGIPAPSEPLLCKFADGGQKKRQNQSKYTQNGRPWPREGEAGMALTYDPTAAIQNGFYSSPYSIATNRMIPQTSITPFIAASPVSTYQVQSTSWMPHPPYVMQPTGAVITPTMDHPMSMQPANMMGPLTQQMNHLSLGTTGTIQSQDRIMILHQLLCQYMTAAAPMQGTYIPQYTPVPPTAVSIEGVVADTSPQTVAPSSQDTSGQQQQIAVDTSNEHAPAYSYQQSKP

SEQ ID NO: 14124 - protein, 574 aa, Homo sapiens
MGNSEGCNTKKEGDLIAAQARLKDLEALLNSKEAALSTALSEKRTLEGELHDLRGQVAKLEAALGEAKKQLQDEMLRRVDAENRLQTMKEELDFQKNIYSEELRETKRRHETRLVEIDNGKQREFESRLADALQELRAQHEDQVEQYKKELEKTYSAKLDNARQSAERNSNLVGAAHEELQQSRIRIDSLSAQLSQLQKQLAAKEAKLRDLEDSLARERDTSRRLLAEKEREMAEMRARMQQQLDEYQELLDIKLALDMEIHAYRKLLEGEEERLRLSPSPTSQRSRGRASSHSSQTQGGGSVTKKRKLESTESRSSFSQHARTSGRVAVEEVDEEGKFVRLRNKSNEDQSMGNWQIKRQNGDDPLLTYRFPPKFTLKAGQVVTIWAAGAGATHSPPTDLVWKAQNTWGCGNSLRTALINSTGEEVAMRKLVRSVTVVEDDEDEDGDDLLHHHHGSHCSSSGDPAEYNLRSRTVLCGTCGQPADKASASGSGAQVGGPISSGSSASSVTVTRSYRSVGGSGGGSFGDNLVTRSYLLGNSSPRTQSPQNCSIIQEMGMRWEVEEGRRKVSLSCLP

SEQ ID NO: 14125 - protein, 613 aa, Homo sapiens
SGLIMNYCRNPDAVAAPYCYTRDPGVRWEYCNLTQCSDAEGTAVAPPTVTPVPSLEAPSEQAPTEQRPGVQECYHGNGQSYRGTYSTTVTGRTCQAWSSMTPHSHSRTPEYYPNAGLIMNYCRNPDPVAAPYCYTRDPSVRWEYCNLTQCSDAEGTAVAPPTITPIPSLEAPSEQAPTEQRPGVQECYHGNGQSYQGTYFITVTGRTCQAWSSMTPHSHSRTPAYYPNAGLIKNYCRNPDPVAAPWCYTTDPSVRWEYCNLTRCSDAEWTAFVPPNVILAPSLEAFFEQALTEETPGVQDCYYHYGQSYRGTYSTTVTGRTCQAWSSMTPHQHSRTPENYPNAGLTRNYCRNPDAEIRPWCYTMDPSVRWEYCNLTQCLVTESSVLATLTVVPDPSTEASSEEAPTEQSPGVQDCYHGDGQSYRGSFSTTVTGRTCQSWSSMTPHWHQRTTEYYPNGGLTRNYCRNPDAEISPWCYTMDPNVRWEYCNLTQCPVTESSVLATSTAVSEQAPTEQSPTVQDCYHGDGQSYRGSFSTTVTGRTCQSWSSMTPHWHQRTTEYYPNGGLTRNYCRNPDAEIRPWCYTMDPSVRWEYCNLTQCPVMESTLLTTPTVVP

SEQ ID NO: 14126 - protein, 84 aa, Homo sapiens
MSNPSAPPPYEDRNPLYPGPPPPGGYGQPSVLPGGYPAYPGYPQPGYGHPAGYPQPMPPTHPMPMNYGPGHGYDGEERAVSDSF

SEQ ID NO: 14127 - protein, 363 aa, Homo sapiens
MNIRGDTGHKACECQEYGPKPWKSQQPKKAFRYHPSLRTQERDHTGKKPYACKECGKNIIYHSSIQRHMVVHSGDGPYKCKFCGKAFHCLSLYLIHERTHTGEKPYECKQCGKSFSYSATHRIHERTHIGEKPYECQECGKAFHSPRSCHRHERSHMGEKAYQCKECGKAFMCPRYVRRHERTHSRKKLYECKQCGKALSSLTSFQTHIRMHSGERPYECKTCGKGFYSAKSFQRHEKTHSGEKPYKCKQCGKAFTRSGSFRYHERTHTGEKPYECKQCGKAFRSAPNLQLHGRTHTGEKPYQCKECGKAFRSASQLRIHRRIHTGEKPYECKKCGKAFRYVQNFRFHERTQTHKNALWRKTL

SEQ ID NO: 14128 - protein, 481 aa, Homo sapiens
MAGPEGFQYRALYPFRRERPEDLELLPGDVLVVSRAALQALGVAEGGERCPQSVGWMPGLNERTRQRGDFPGTYVEFLGPVALARPGPRPRGPRPLPARPRDGAPEPGLTLPDLPEQFSPPDVAPPLLVKLVEAIERTGLDSESHYRPELPAPRTDWSLSDVDQWDTAALADGIKSFLLALPAPLVTPEASAEARRALREAAGPVGPALEPPTLPLHRALTLRFLLQHLGRVASRAPALGPAVRALGATFGPLLLRAPPPPSSPPPGGAPDGSEPSPDFPALLVEKLLQEHLEEQEVAPPALPPKPPKAKPASTVLANGGSPPSLQDAEWYWGDISREEVNEKLRDTPDGTFLVRDASSKIQGEYTLTLRKGGNNKLIKVFHRDGHYGFSEPLTFCSVVDLINHYRHESLAQYNAKLDTRLLYPVSKYQQDQIVKEDSVEAVGAQLKVYHQQYQDKSREYDQLYEEYTRTSQGLLGSPRRC

SEQ ID NO: 14129 - protein, 432 aa, Homo sapiens
DYVTVQLQNGEIWELSRCSRNKRENTSSLGYEYTGSKKEFPCVDGYIYDQNTWKSTAVTQWNLVCDRKWLAMLIQPLFMFGVLLGSVTFGYFSDRLGRRVVLWATSSSMFLFGIAAAFAVDYYTFMAARFFLAMVASGYLVVGFVYVMEFIGMKSRTWASVHLHSFFAVGTLLVALTGYLVRTWWLYQMILSTVTVPFILCCWVLPETPFWLLSEGRYEEAQKIVDIMAKWNRASSCKLSELLSLDLQGPVSNSPTEVQKHNLSYLFYNWSITKRTLTVWLIWFTGSLGFYSFSLNSVNLGGNEYLNLFLLGVVEIPAYTFVCIAMDKVGRRTVLAYSLFCSALACGVVMVIPQKHYILGVVTAMVGKFAIGAAFGLIYLYTAELYPTIVRSLAVGSGSMVCRLASILAPFSVDLSSIWIFIPQLLGQHLQE

SEQ ID NO: 14130 - protein, 546 aa, Homo sapiens
MHSMISSVDVKSEVPVGLEPISPLDLRTDLRMMMPVVDPVVREKQLQQELLLIQQQQQIQKQLLIAEFQKQHENLTRQHQAQLQEHIKELLAIKQQQELLEKEQKLEQQRQEQEVERHRREQQLPPLRGKDRGRERAVASTEVKQKLQEFLLSKSATKDTPTNGKNHSVSRHPKLWYTAAHHTSLDQSSPPLSGTSPSYKYTLPGAQDAKDDFPLRKTESSVSSSSPGSGPSSPNNGPTGSVTENETSVLPPTPHAEQMVSQQRILIHEDSMNLLSLYTSPSLPNITLGLPAVPSQLNASNSLKEKQKCETQTLRQGVPLPGQYGGSIPASSSHPHVTLEGKPPNSSHQALLQHLLLKEQMRQQKLLVAGGVPLHPQSPLATKERISPGIRGTHKLPRHRPLNRTQSAPLPQSTLAQLVIQQQHQQFLEKQKQYQQQIHMNKLLSKSIEQLKQPGSHLEEAEEELQGDQAMQEDRAPSSGNSTRSDSSACVDDTLGQVGAVKVKEEPVDSDEDAQIQEMESGEQAAFMQQVIGKDLAPGFVIKVII

SEQ ID NO: 14131 - protein, 772 aa, Homo sapiens
MQELEELRKQLGSVATGSTLQQSLELKRKMLRDKQNKKNSGQHLPIFPAWVYERPALIGDFLIGAGISTDTALPIGTLPLASQESAVVEDLLYVLVGVDGRYVSAQPLAGRQSRTFLVDPNLDLSIRELVHRILPVAASYSAVTRFIEEKSSFEYGQVNHALAAAMRTLVKEHLILVSQLEQLHRQGLLSLQKLWFYIQPAMRTMDILASLATSVDKGECLGGSTLSLLHDRSFSYTGDSQAQELCLYLTKAASAPYFEVLEKWIYRGIIHDPYSEFMVEEHELRKERIQEDYNDKYWDQRYTIVQQQIPSFLQKMADKILSTGKYLNVVRECGHDVTCPVAKEIIYTLKERAYVEQIEKAFNYASKVLLDFLMEEKELVAHLRSIKRYFLMDQGDFFVHFMDLAEEELRKPVEDITPPRLEALLELALRMSTANTDPFKDDLKIDLMPHDLITQLLRVLAIETKQEKAMAHADPTELALSGLEAFSFDYIVKWPLSLIINRKALTRYQMLFRHMFYCKHVERQLCSVWISNKTAKQHSLHSAQWFAGAFTLRQRMLNFVQNIQYYMMFEVMEPTWHILEKNLKSASNIDDVLGHHTGFLDTCLKDCMLTNPELLKVFSKLMSVCVMFTNCMQKFTQSMKLDGELGGQTLEHSTVLGLPAGAEERARKELARKHLAEHADTVQLVSGFEATINKFDKNFSAHLLDLLARLSIYSTSDCEHGMASVISRLDFNGFYTERLERLSAERSQKATPQVPVLRGPPAPAPRVAVTAQ

SEQ ID NO: 14132 - protein, 620 aa, Homo sapiens
MGPLMVLFCLLFLYPAGHCPNPGISLGAVRTGFRFGHGDKVRYRCSSNLVLTGSSERECQGNGVWSGTEPICRQPYSYDFPEDVAPALGTSFSHMLGATNPTQKTKESLGRKIQIQRSGHLNLYLLLDCSQSVSENDFLIFKESASLMVDRIFSFEINVSVAIITFASEPKVLMSVLNDNSRDMTEVISSLENANYKDHENGTGTNTYAALNSVYLMMNNQMRLLGMETMAWQEIRHAIILLTDGKSNMGGSPKTAVDHIREILNINQKRNDYLDIYAIGVGKLDVDWRELNELGSKKDGERHAFILQDTKALHQVFEHMLDVSKLTDTICGVGNMSANASDQERTPWHVTIKPKSQETCRGALISDQWVLTAAHCFRDGNDHSLWRVNVGDPKSQWGKEFLIEKAVISPGFDVFAKKNQGILEFYGDDIALLKLAQKVKMSTHARPICLPCTMEANLALRRPQGSTCRDHENELLNKQSVPAHFVALNGSKLNINLKMGVEWTSCAEVVSQEKTMFPNLTDVREVVTDQFLCSGTQEDESPCKGESGGAVFLERRFRFFQVGLVSWGLYNPCLGSADKNSRKRAPRSKVPPPRDFHINLFRMQPWLRQHLGDVLNFLPL

SEQ ID NO: 14133 - protein, 928 aa, Homo sapiens
MEPRDGSPEARSSDSESASASSSGSERDAGPEPDKAPRRLNKRRFPGLRLFGHRKAITKSGLQHLAPPPPTPGAPCSESERQIRSTVDWSESATYGEHIWFETNVSGDFCYVGEQYCVARMLKSVSRRKCAACKIVVHTPCIEQLEKINFRCKPSFRESGSRNVREPTFVRHHWVHRRRQDGKCRHCGKGFQQKFTFHSKEIVAISCSWCKQAYHSKVSCFMLQQIEEPCSLGVHAAVVIPPTWILRARRPQNTLKASKKKKRASFKRKSSKKGPEEGRWRPFIIRPTPSPLMKPLLVFVNPKSGGNQGAKIIQSFLWYLNPRQVFDLSQGGPKEALEMYRKVHNLRILACGGDGTVGWILSTLDQLRLKPPPPVAILPLGTGNDLARTLNWGGGYTDEPVSKILSHVEEGNVVQLDRWDLHAEPNPEAGPEDRDEGATDRLPLDVFNNYFSLGFDAHVTLEFHESREANPEKFNSRFRNKMFYAGTAFSDFLMGSSKDLAKHIRVVCDGMDLTPKIQDLKPQCVVFLNIPRYCAGTMPWGHPGEHHDFEPQRHDDGYLEVIGFTMTSLAALQVGGHGERLTQCREVVLTTSKAIPVQVDGEPCKLAASRIRIALRNQATMVQKAKRRSAAPLHSDQQPVPEQLRIQVSRVSMHDYEALHYDKEQLKEASVPLGTVVVPGDSDLELCRAHIERLQQEPDGAGAKSPTCQKLSPKWCFLDATTASRFYRIDRAQEHLNYVTEIAQDEIYILDPELLGASARPDLPTPTSPLPTSPCSPTPRSLQGDAAPPQGEELIEAAKRNDFCKLQELHRAGGDLMHRDEQSRTLLHHAVSTGSKDVVRYLLDHAPPEILDAVEENGETCLHQAAALGQRTICHYIVEAGASLMKTDQQGDTPRQRAEKAQDTELAAYLENRQHYQMIQREDQETAV

SEQ ID NO: 14134 - protein, 863 aa, Homo sapiens
MDLNSASTVVLQVLTQATSQDTAVLKPAEEQLKQWETQPGFYSVLLNIFTNHTLDINVRWLAVLYFKHGIDRYWRRVAPHALSEEEKTTLRAGLITNFNEPINQIATQIAVLIAKVARLDCPRQWPELIPTLIESVKVQDDLRQHRALLTFYHVTKTLASKRLAADRKLFYDLASGIYNFACSLWNHHTDTFLQEVSSGNEAAILSSLERTLLSLKVLRKLTVNGFVEPHKNMEVMGFLHGIFERLKQFLECSRSIGTDNVCRDRLEKTIILFTKVLLDFLDQHPFSFTPLIQRSLEFSVSYVFTEVGEGVTFERFIVQCMNLIKMIVKNYAYKPSKNFEDSSPETLEAHKIKMAFFTYPTLTEICRRLVSHYFLLTEEELTMWEEDPEGFTVEETGGDSWKYSLRPCTEVLFIDIFHEYNQTLTPVLLEMMQTLQGPTNVEDMNALLIKDAVYNAVGLAAYELFDSVDFDQWFKNQLLPELQVIHNRYKPLRRRVIWLIGQWISVKFKSDLRPMLYEAICNLLQDQDLVVRIETATTLKLTVDDFEFRTDQFLPYLETMFTLLFQLLQQVTECDTKMHVLHVLSCVIERVNMQIRPYVGCLVQYLPLLWKQSEEHNMLRCAILTTLIHLVQGLGADSKNLYPFLLPVIQLSTDVSQPPHVYLLEDGLELWLVTLENSPCITPELLRIFQNMSPLLELSSENLRTCFKIINGYIFLSSTEFLQTYAVGLCQSFCELLKEITTEGQVQVLKVVENALKVNPILGPQMFQPILPYVFKGIIEGERYPVVMSTYLGVMGRVLLQNTSFFSSLLNEMAHKFNQEMDQLLGNMIEMWVDRMDNITQPERRKLSALALLSLLPSDNSQF

SEQ ID NO: 14135 - protein, 141 aa, Homo sapiens
MKSYAGFLTVNKTYNSNLFFWFFPAQIQPEDAPVVLWLQGGPGGSSMFGLFVEHGPYVVTSNMTLRDRDFPWTTTLSMLYIDNPVGTGFSFTDDTHGYAVNEDDVARDLYSALIQFFQIFPEYKNNDFYVTGESYAGKYVP

SEQ ID NO: 14136 - protein, 448 aa, Homo sapiens
MKSLSLLLAVALGLATAVSAGPAVIECWFVEDASGKGLAKRPGALLLRQGPGEPPPRPDLDPELYLSVHDPAGALQAAFRRYPRGAPAPHCEMSRFVPLPASAKWASGLTPAQNCPRALDGAWLMVSISSPVLSLSSLLRPQPEPQQEPVLITMATVVLTVLTHTPAPRVRLGQDALLDLSFAYMPPTSEAASSLAPGPPPFGLEWRRQHLGKGHLLLAATPGLNGQMPAAQEGAVAFAAWDDDEPWGPWTGNGTFWLPTVQPFQEGTYLATIHLPYLQGQVTLELAVYKPPKVSLMPATLARAAPGEAPPELLCLVSHFYPSGGLEVEWELRGGPGGRSQKAEGQRWLSALRHHSDGSVSLSGHLQPPPVTTEQHGARYACRIHHPSLPASGRSAEVTLEVAGLSGPSLEDSVGLFLSAFLLLGLFKALGWAAVYLSTCKDSKKKAE

SEQ ID NO: 14137 - protein, 563 aa, Homo sapiens
MDDFERRRELRRQKREEMRLEAERIAYQRNDDDEEEAARERRRRARQERLRQKQEEESLGQVTDQVEVNAQNSVPDEEAKTTTTNTQVEGDDEAAFLERLARREERRQKRLQEALERQKEFDPTITDASLSLPSRRMQNDTAENETTEKEEKSESRQERYEIEETETVTKSYQKNDWRDAEENKKEDKEKEEEEEEKPKRGSIGENQGEEKGTKVQAKREKLQEDKPTFKKEEIKDEKIKKDKEPKEEVKSFMDRKKGFTEVKSQNGEFMTHKLKHTENTFSRPGGRASVDTKEAEGAPQVEAGKRLEELRRRRGETESEEFEKLKQKQQEAALELEELKKKREERRKVLEEEEQRRKQEEADRKLREEEEKRRLKEEIERRRAEAAEKRQKMPEDGLSDDKKPFKCFTPKGSSLKIEERAEFLNKSVQKSGVKSTHQAAIVSKIDSRLEQYTSAIEGTKSAKPTKPAASDLPVPAEGVRNIKSMWEKGNVFSSPTAAGTPNKETAGLKVGVSSRINEWLTKTPDGNKSPAPKPSDLRPGDVSSKRNLWEKQSVDKVTSPTKV

SEQ ID NO: 14138 - protein, 684 aa, Homo sapiens
MDDSGELGGLETMETLTELGDELTLGDIDEMLQFVSNQVGEFPDLFSEQLCSSFPGSGGSGSSSGSSGSSSSSSNGRGSSSGAVDPSVQRSFTQVTLPSFSPSAASPQAPTLQVKVSPTSVPTTPRATPILQPRPQPQPQPQTQLQQQTVMITPTFSTTPQTRIIQQPLIYQNAATSFQVLQPQVQSLVTSSQVQPVTIQQQVQTVQAQRVLTQTANGTLQTLAPATVQTVAAPQVQQVPVLVQPQIIKTDSLVLTTLKTDGSPVMAAVQNPALTALTTPIQTAALQVPTLVGSSGTILTTMPVMMGQEKVPIKQVPGGVKQLEPPKEGERRTTHNIIEKRYRSSINDKIIELKDLVMGTDAKMHKSGVLRKAIDYIKYLQQVNHKLRQENMVLKLANQKNKLLKGIDLGSLVDNEVDLKIEDFNQNVLLMSPPASDSGSQAGFSPYSIDSEPGSPLLDDAKVKDEPDSPPVALGMVDRSRILLCVLTFLCLSFNPLTSLLQWGGAHDSDQHPHSGSGRSVLSFESGSGGWFDWMMPTLLLWLVNGVIVLSVFVKLLVHGEPVIRPHSRSSVTFWRHRKQADLDLARGVYGKKSGATHSIEEELNIHISRGTRTRTLLSSRRFCSCCRQPTNLPGSFGPGTAHLPPGPGLQPLLERDPLQPAEATPGALAAQESLPVPAGHASH

SEQ ID NO: 14139 - protein, 536 aa, Homo sapiens
MGPLQFRDVAIEFSLEEWHCLDTAQRNLYRNVMLENYRNLVFLGIVVSKPDLITCLEQGKKPLTMKKHEMVANPSVTCSHFARDLWPEQSIKDSFQKVTLRRYENYGHDNLQFKKGCESVDECKVHKRGYNGLNQYLTTTQSKIFQCDKYVKVIHKFSNSNRHKIRHTGKKPFKCIECGKAFNQSSTLTTHKKIHTGEKPFKCEECGKAFNWSSHLTTHKRIHTGEKRYKCEDCGKAFSRFSYLTAHKIIHSGEKPYKCEECGKAFKRSSNLTTHKIIHTGEKPYKCEECGKAFKRSSILTAHKIIHSGEKPYKCEECGKAFKHPSVLTTHKRIHTGEKPYKCEECGRAFKYFSSLTTHKIIHSGEKPYKCEECGKAFNWSSHLTTHKRIHTGEKPYKCEECGEAFKYSSSLTTHKIIHTGQQPFKCEECGKAFKCFSILTTHKRIHTGEKPYKCEECGKAFNSSSHLTAHKRIHTGEKPYKCERCGKAFKRSFILTRHKRIHTGEKPYKCEECGKGFKCPSTLTTHKVIHTGEKL

SEQ ID NO: 14140 - protein, 259 aa, Homo sapiens
MALRRPPRLRLCARLPDFFLLLLFRGCLIGAVNLKSSNRTPVVQEFESVELSCIITDSQTSDPRIEWKKIQDEQTTYVFFDNKIQVKPVTPVCRVPKAVPVGKMATLHCQESEGHPRPHYSWYRNDVPLPTDSRANPRFRNSSFHLNSETGTLVFTAVHKDDSGQYYCIASNDAGSARCEEQEMEVYDLNIGGIIGGVLVVLAVLALITLGICCAYRRGYFINNKQDGESYKNPGKPDGVNYIRTDEEGDFRHKSSFVI

SEQ ID NO: 14141 - protein, 283 aa, Homo sapiens
MASMRESDTGLWLHNKLGATDELWAPPSIASLLTAAVIDNIRLCFHGLSSAVKLKLLLGTLHLPRRTVDEHPILQMKGALMEIIQLASLDSDPWVLMVADILKSFPDTGSLNLELEEQNPNVQDILGELREKVGECEASAMLPLECQYLNKNALTTLAGPLTPPVKHFQLKRKPKSATLRAELLQKSTETAQQLKRSAGVPFHAKGRGLLRKMDTTTPLKGIPKQAPFRSPTAPSVFSPTGNRTPIPPSRTLLRKERGVKLLDISELDMVGAGREAKRRRKTL

SEQ ID NO: 14142 - protein, 549 aa, Homo sapiens
MKRPKLKKASKRMTCHKRYKIQKKVREHHRKLRKEAKKRGHKKPRKDPGVPNSAPFKEALLREAELRKQRLEELKQQQKLDRQKELEKKRKLETNPDIKPSNVEPMEKEFGLCKTENKAKSGKQNSKKLYCQELKKVIEASDVVLEVLDARDPLGCRCPQVEEAIVQSGQKKLVLILNKSDLVPKENLESWLNYLKKELPTVVFRASTKPKDKGKITKRVKAKKNAAPFRSEVCFGKEGLWKLLGGFQETCSKAIRVGVIGFPNVGKSSIINSLKQEQMCNVGVSMGLTRSMQVVPLDKQITIIDSPSFIVSPLNSSSALALRSPASIEVVKPMEAASAILSQADARQVVLKYTVPGYRNSLEFFTVLAQRRGMHQKGGIPNVEGAAKLLWSEWTGASLAYYCHPPTSWTPPPYFNESIVVDMKSGFNLEELEKNNAQSIRAIKGPHLANSILFQSSGLTNGIIEEKDIHEELPKRKERKQEEREDDKDSDQETVDEEVDENSSGMFAAEETGEALSEETTAGEQSTRSFILDKIIEEDDAYDFSTDYV

SEQ ID NO: 14143 - protein, 485 aa, Homo sapiens
MYTSHEDIGYDFEDGPKDKKTLKPHPNIDGGWAWMMVLSSFFVHILIMGSQMALGVLNVEWLEEFHQSRGLTAWVSSLSMGITLIVGPFIGLFINTCGCRQTAIIGGLVNSLGWVLSAYAANVHYLFITFGVAAGLGSGMAYLPAVVMVGRYFQKRRALAQGLSTTGTGFGTFLMTVLLKYLCAEYGWRNAMLIQGAVSLNLCVCGALMRPLSPGKNPNDPGEKDVRGLPAHSTESVKSTGQQGRTEEKDGGLGNEETLCDLQAQECPDQAGHRKNMCALRILKTVSWLTMRVRKGFEDWYSGYFGTASLFTNRMFVAFIFWALFAYSSFVIPFIHLPEIVNLYNLSEQNDVFPLTSIIAIVHIFGKVILGVIADLPCISVWNVFLLANFTLVLSIFILPLMHTYAGLAVICALIGFSSGYFSLMPVVTEDLVGIEHLANAYGIIICANGISALLGPPFAGKLSEVLRAQSACTYGALCYKVPDK

SEQ ID NO: 14144 - protein, 462 aa, Homo sapiens
LALVLCTVDSRPPAQLALSHAGRLLASSTAASVPNTLRLELRGPQPRDEGFYSCSARSPLGQANTSLELRLEGVRVILAPEAAVPEGAPITVTCADPAAHAPTLYTWYHNGRWLQEGPAASLSFLVATRAHAGAYSCQAQDAQGTRSSRPAALQVLYAPQDAVLSSFRDSRARSMAVIQCTVDSEPPAELALSHDGKVLATSSGVHSLASGTGHVQVARNALRLQVQDVPAGDDTYVCTAQNLLGSISTIGRLQVEGARVVAEPGLDVPEGAALNLSCRLLGGPGPVGNSTFAWFWNDRRLHAEPVPTLAFTHVARAQAGMYHCLAELPTGAAASAPVMLRVLYPPKTPTMMVFVEPEGGLRGILDCRVDSEPLASLTLHLGSRLVASSQPQGAPAEPHIHVLASPNALRVDIEALRPSDQGEYICSASNVLGSASTSTYFGVRGEGRGLHLPGHSAQKPSS

SEQ ID NO: 14145 - protein, 231 aa, Homo sapiens
MGIKTALPAAELGLYSLVLSGALAYAGRGLLEASQDGAHRKAFRESVRPGWEYIGRKMDVADFEWVMWFTSFRNVIIFALSGHVLFAKLCTMVAPKLRSWMYAVYGALAVMGTMGPWYLLLLLGHCVGLYVASLLGQPWLCLGLGLASLASFKMDPLISWQSGFVTGTFDLQEVLFHGGSSFTVLRCTSFALESCAHPDRHYSLADLLKYNFYLPFFFFGPIMTFDRFHAQ

SEQ ID NO: 14146 - protein, 1059 aa, Homo sapiens
FFDLQMQLLDKFPIEGGQKDPKQRIIPFLPGKILFRRSHIRDVAVKRLKPIDEYCRALVRLPPHISQCDEVFRFFEARPEDVNPPKEDYGSSKRKSVWLSSWAESPKKDVTGADATAEPMILEQYVVVSNYKKQENSELSLQAGEVVDVIEKNESGWWFVSTSEEQGWVPATYLEAQNGTRDDSDINTSKTGEEEKYVTVQPYTSQSKDEIGFEKGVTVEVIRKNLEGWWYIRYLGKEGWAPASYLKKAKDDLPTRKKNLAGPVEIIGNIMEISNLLNKKASGDKETPPAEGEGHEAPIAKKEISLPILCNASNGSAVGVPDRTVSRLAQGSPAVARIAPQRAQISSPNLRTRPPPRRESSLGFQLPKPPEPPSVEVEYYTIAEFQSCISDGISFRGGQKAEVIDKNSGGWWYVQIGEKEGWAPASYIDKRKKPNLSRRTSTLTRPKVPPPAPPSKPKEAEEGPTGASESQDSPRKLKYEEPEYDIPAFGFDSEPELSEEPVEDRASGERRPAQPHRPSPASSLQRARFKVGESSEDVALEEETIYENEGFRPYAEDTLSARGSSGDSDSPGSSSLSLTRKNSPKSGSPKSSSLLKLKAEKNAQAEMGKNHSSASFSSSITINTTCCSSSSSSSSSLSKTSGDLKPRSASDAGIRGTPKVRAKKDADANAGLTSCPRAKPSVRPKPFLNRAESQSQEKMDISTLRRQLRPTGQLRGGLKGSKSEDSELPPQTASEAPSEGSRRSSSDLITLPATTPPCPTKKEWEGPATSYMTCSAYQKVQDSEISFPAGVEVQVLEKQESGWWYVRFGELEGWAPSHYLVLDENEQPDPSGKELDTVPAKGRQNEGKSDSLEKIERRVQALNTVNQSKKATPPIPSKPPGGFGKTSGTPAVKMRNGVRQVAVRPQSVFVSPPPKDNNLSCALRRNESLTATDGLRGVRRNSSFSTARSAAAEAKGRLAERAASQGSDSPLLPAQRNSIPVSPVRPKPIEKSQFIHNNLKDVYVSIADYEGDEETAGFQEGVSMEVLERNPNGWWYCQILDGVKPFKGWVPSNYLEKKN

SEQ ID NO: 14147 - protein, 612 aa, Homo sapiens
MATEGGGKEMNEIKTQFTTREGLYKLLPHSEYSRPNRVPFNSQGSNPVRVSFVNLNDQSGNGDRLCFNVGRELYFYIYKGVRKAADLSKPIDKRIYKGTQPTCHDFNHLTATAESVSLLVGFSAGQVQLIDPIKKETSKLFNEENSCQHLWKVDWNEERQNEGSKTSEEALVTVQRLIDKSRVTCVKWVPGSESLFLVAHSSGNMYLYNVEHTCGTTAPHYQLLKQGESFAVHTCKSKSTRNPLLKWTVGEGALNEFAFSPDGKFLACVSQDGFLRVFNFDSVELHGTMKSYFGGLLCVCWSPDGKYIVTGGEDDLVTVWSFVDCRVIARGHGHKSWVSVVAFDPYTTSVEEGDPMEFSGSDEDFQDLLHFGRDRANSTQSRLSKRNSTDSRPVSVTYRFGSVGQDTQLCLWDLTEDILFPHQPLSRARTHTNVMNATSPPAGSNGNSVTTPGNSVPPPLPRSNSLPHSAVSNAGSKSSVMDGAIASGVSKFATLSLHDRKERHHEKDHKRNHSMGHISSKSSDKLNLVTKTKTDPAKTLGTPLCPRMEDVPLLEPLICKKIAHERLTVLIFLEDCIVTACQEGFICTWGRPGKVGSLSSPSQASSPGGTVV

SEQ ID NO: 14148 - protein, 871 aa, Homo sapiens
RRRSRRHVSPGSGRAAAVAELLWLRPLEIKLEYEGTLFTEWSVPETCFVLNKSSPTTELRCSSPGVHAIKPIVTGPDEEERYLFVESSHTCFLWYYRVRTWRIVVPMTKDDALKEIRGNQVTFQDCFIADFLILLTFPLLTIPEIPGYLPISSPRGSQLMASWDACVVASAVLVTDMETFHTTDSFKSWTRIRVPPDILSDDERRSVAHVILSRDGIVFLINGVLYIKSFRGFIRLGGIVNLPDGGITGISSRKWCWVNYLLKAKGRRSTFAVWTENEIYLGSILLKFARLVTTTELKNILSLSVTATLTIDRVEYTGHPLEIAVFLNYCTVCNVTKKIFLVIYNEDTKQWVSQDFTLDAPIDSVTMPHFTFSALPGLLLWNKHSIYYCYHNFTFTGILQTPAGHGNLSMLSNDSIIHEVFIDYYGDILVKMENNVIFYSKINTRDAVKLHLWTNYTTRAFIFLSTSGQTYFLYALDDGTIQIQDYPLHLEAQSIAFTTKDKCPYMAFHNNVAHVFYFLDKGEALTVWTQIVYPENTGLYVIVESYGPKILQESHEISFEAAFGYCTKTLTLTFYQNVDYERISDYFETQDKHTGLVLVQFRPSEYSKACPIAQKVFQIAVGCDDKKFIAIKGFSKKGCHHHDFSYVIEKSYLRHQPSKNLRVRYIWGEYGCPLRLDFTEKFQPVVQLFDDNGYVKDVEANFIVWEIHGRDDYSFNNTMAQSGCLHEAQTWKSMIELNKHLPLEEVWGPENYKHCFSYAIGKPGDLNQPYEIINSSNGNHIFWPMGHSGMYVFRVKILDPNYSFCNLTAMFAIETFGLIPSPSVYLVASFLFVLMLLFFTILVLSYFRYMRIYRRYIYEPLHKPQRKRKKN

SEQ ID NO: 14149 - protein, 1088 aa, Homo sapiens
MEIKDQGAQMEPLLPTRNDEEAVVDRGGTRSILKTHFEKEDLEGHRTLFIGVHVPLGGRKSHRRHRHRGHKHRKRDRERDSGLEDGRESPSFDTPSQRVQFILGTEDDDEEHIPHDLFTELDEICWREGEDAEWRETARWLKFEEDVEDGGERWSKPYVATLSLHSLFELRSCILNGTVLLDMHANTLEEIADMVLDQQVSSGQLNEDVRHRVHEALMKQHHHQNQKKLTNRIPIVRSFADIGKKQSEPNSMDKNAGQVVSPQSAPACVENKNDVSRENSTVDFSKVDLHFMKKIPPGAEASNILVGELEFLDRTVVAFVRLSPAVLLQGLAEVPIPTRFLFILLGPLGKGQQYHEIGRSIATLMTDEVFHDVAYKAKDRNDLVSGIDEFLDQVTVLPPGEWDPSIRIEPPKNVPSQEKRKIPAVPNGTAAHGEAEPHGGHSGPELQRTGRIFGGLILDIKRKAPYFWSDFRDAFSLQCLASFLFLYCACMSPVITFGGLLGEATEGRISAIESLFGASMTGIAYSLFGGQPLTILGSTGPVLVFEKILFKFCKEYGLSYLSLRASIGLWTATLCIILVATDASSLVCYITRFTEEAFASLICIIFIYEALEKLFELSEAYPINMHNDLELLTQYSCNCVEPHNPSNGTLKEWRESNISASDIIWENLTVSECKSLHGEYVGRACGHDHPYVPDVLFWSVILFFSTVTLSATLKQFKTSRYFPTKVRSIVSDFAVFLTILCMVLIDYAIGIPSPKLQVPSVFKPTRDDRGWFVTPLGPNPWWTVIAAIIPALLCTILIFMDQQITAVIINRKEHKLKKGCGYHLDLLMVAVMLGVCSIMGLPWFVAATVLSITHVNSLKLESECSAPGEQPKFLGIREQRVTGLMIFILMGSSVFMTSILKFIPMPVLYGVFLYMGASSLKGIQFFDRIKLFWMPAKHQPDFIYLRHVPLRKVHLFTIIQMSCLGLLWIIKVSRAAIVFPMMVLALVFVRKLMDLLFTKRELSWLDDLMPESKKKKLEDAEKEEEQSMLAMEDEGTVQLPLEGHYRDDPSVINISDEMSKTALWRNLLITADNSKDKESSFPSKSSPS

SEQ ID NO: 14150 - protein, 708 aa, Homo sapiens
MFTLSQTSRAWFIDRARQAREERLVQKERERAAVVIQAHVRSFLCRSRLQRDIRREIDDFFKADDPESTKRSALCIFKIARKLLFLFRIKEDNERFEKLCRSILSSMDAENEPKVWYVSLACSKDLTLLWIQQIKNILWYCCDFLKQLKPEILQDSRLITLYLTMLVTFTDTSTWKILRGKGESLRPAMNHICANIMGHLNQHGFYSVLQILLTRGLARPRPCLSKGTLTAAFSLALRPVIAAQFSDNLIRPFLIHIMSVPALVTHLSTVTPERLTVLESHDMLRKFIIFLRDQDRCRDVCESLEGCHTLCLMGNLLHLGSLSPRVLEEETDGFVSLLTQTLCYCRKYVSQKKSNLTHWHPVLGWFSQSVDYGLNESMHLITKQLQFLWGVPLIRIFFCDILSKKLLESQEPAHAQPASPQNVLPVKSLLKRAFQKSASVRNILRPVGGKRVDSAEVQKVCNICVLYQTSLTTLTQIRLQILTGLTYLDDLLPKLWAFICELGPHGGLKLFLECLNNDTEESKQLLAMLMLFCDCSRHLITILDDIEVYEEQISFKLEELVTISSFLNSFVFKMIWDGIVENAKGETLELFQSVHGWLMVLYERDCRRRFTPEDHWLRKDLKPSVLFQELDRDRKRAQLILQYIPHVIPHKNRVLLFRTMVTKEKEKLGLVETSSASPHVTHITIRRSRMLESLFECPWPLVINAESC

SEQ ID NO: 14151 - protein, 919 aa, Homo sapiens
MKVARFQKIPNGENETMIPVLTSKKASELPVSEVASILQADLQNGLNKCEVSHRRAFHGWNEFDISEDEPLWKKYISQFKNPLIMLLLASAVISVLMHQFDDAVSITVAILIVVTVAFVQEYRSEKSLEELSKLVPPECHCVREGKLEHTLARDLVPGDTVCLSVGDRVPADLRLFEAVDLSIDESSLTGETTPCSKVTAPQPAATNGDLASRSNIAFMGTLVRCGKAKGVVIGTGENSEFGEVFKMMQAEEAPKTPLQKSMDLLGKQLSFYSFGIIGIIMLVGWLLGKDILEMFTISVSLAVAAIPEGLPIVVTVTLALGVMRMVKKRAIVKKLPIVETLGCCNVICSDKTGTLTKNEMTVTHIFTSDGLHAEVTGVGYNQFGEVIVDGDVVHGFYNPAVSRIVEAGCVCNDAVIRNNTLMGKPTEGALIALAMKMGLDGLQQDYIRKAEYPFSSEQKWMAVKCVHRTQQDRPEICFMKGAYEQVIKYCTTYQSKGQTLTLTQQQRDVYQQEKARMGSAGLRVLALASGPELGQLTFLGLVGIIDPPRTGVKEAVTTLIASGVSIKMITGDSQETAVAIASRLGLYSKTSQSVSGEEIDAMDVQQLSQIVPKVAVFYRASPRHKMKIIKSLQKNGSVVAMTGDGVNDAVALKAADIGVAMGQTGTDVCKEAADMILVDDDFQTIMSAIEEGKGIYNNIKNFVRFQLSTSIAALTLISLATLMNFPNPLNAMQILWINIIMDGPPAQSLGVEPVDKDVIRKPPRNWKDSILTKNLILKILVSSIIIVCGTLFVFWRELRDNVITPRDTTMTFTCFVFFDMFNALSSRSQTKSVFEIGLCSNRMFCYAVLGSIMGQLLVIYFPPLQKVFQTESLSILDLLFLLGLTSSVCIVAEIIKKVERSREKIQKHVSSTSSSFLEV

SEQ ID NO: 14152 - protein, 133 aa, Homo sapiens
MTLQWAAVATFLYAEIGLILIFCLPFIPPQRWQKIFSFNVWGKIATFWNKAFLTIIILLIVLFLDAVREVRKYSSVHTIEKSSTSRPDAYEHTQMKLFRSQRNLYISGFSLFFWLVLRRLVTLITQLAKELSN

SEQ ID NO: 14153 - protein, 1062 aa, Homo sapiens
MPTTASCKTISLLKLLYSVSLQNYSPMMAQKSQGSDNLQEGQEKSKREILKCTKSAWAPLDEWLPPDPEEESQSLTIPMLEDSKQESIQQWLDSGFFVSANENFQQVIDRTVSLYEQGMVQMTVKDYMRSLHQFSETPILSRGTSFNSCYSTASVPQSIPEWLEFWEIDPVEILLDLGFGADEPDICMQIPARFLGCGSAARGINIRVFLEAQKQRMDIENPNLYGRFRQLEILDHVTNAFSSLLSDVSILPNRAEEKAGGESVQRTSVSAAKEHRRRMGKLLRRASKQNIRRDCNPEVSESFKVKDEVFVPFTKPWDCGAELAATSINHKQNHLSLSVEHQSLQACDDLLPYPPHGLLSKQWPCSSMPAKQAPPSCVSEGSVKGRTQKENLFQTNKLKSLSHLAGKGPDSFEMEEVQSFEEETGNPLDMTSGTVGARVDRANSCQSDSSGFLEEPLEPLPLQMPSLPNSQSPAENGGRKPRDQSHSLVSSQDCQLESDGPDSKSRASMSFSSQEANALEQRASVSVMEEEFLLEAMEGPPELYIPDMACAKTTTRGECPRKDSHLWQLLPMPHAEYEVTRPTATSKYDHPLGFMVTHVTEMQDSFVRPEGAGKVQSHHNESQRSPGNDHTQDKFLHVDSEAPREEESSGFCPHTNHSLLVPESSSQCIPKHSEITPYATDLAQTSEKLIPHLHKLPGDPAQVKSRSGTLGQILPGTEAEMENLPLNTGSSRSVMTQMSSSLVSAAQRAVALGTGPRGTSLECTVCDPVTATETRLGTKARQLNDASIQTSALSNKTLTHGPQPLTKSVSLDSGFSSICPMGTCHAIPAHCCICCHHHPHCHGERQSPGPEPSVCRHCLCSLTGHQEAQFMTTLKALQDTTVRELCSCTVHEMEAMKTICQSFREYLEEIEQHLMGQQALFSRDMSEEEREEAEQLQTLREALRQQVAELEFQLGDRAQQIREGILLQLEVLTAEPPEHYSNLHQYNWIEESNGQTSCSKIHPGMAPRTVFPPDDGQEAPCSGELLSAELDPFFFSSKANNSAKDEKIKSKDFLKTQDSGLL

SEQ ID NO: 14154 - protein, 464 aa, Homo sapiens
SMENNGRAQRIYEDHDATQQLQGFYSQVAKPLLVDVDLQYPQDAVLALTQNHHKQYYEGSEIVVAGRIADNKQSSFKADVQAHGEGQEFSITCLVDEEEMKKLLRERGHMLENHVERLWAYLTIQELLAKRMKVDREERANLSSQALQMSLDYGFVTPLTSMSIRGMADQDGLKPTIDKPSEGIGCREMLGPRRTFVLSALQPSPTHSSSNTQRLPDRVTGVDTDPHFIIHVPQKEDTLCFNINEEPGVILSLVQDPNTGFSVNGQLIGNKARSPGQHDGTYFGRLGIANPATDFQLEVTPQNITLNPGFGGPVFSWRDQAVLRQDGVVVTINKKRNLVVSVDDGGTFEVVLHRVWKGSSVHQDFLGFYVLDSHRMSARTHGLLGQFFHPIGFEVSDIHPGSDPTKPDATMVVRNRRLTVTRGLQKDYSKDPWHGAEVSCWFIHNNGAGLIDGAYTDYIVPDIF

SEQ ID NO: 14155 - protein, 188 aa, Homo sapiens
SVFCSDPTPTAVTCVPPACGPGSPRPARLPHPALRTPGCPGFAEVLQTFSTCKGMLGEILSAFEFMDAVCMQLVGRHLHLASPVQESPFYVLIETSGSNAGHDAEKLGHFLEHALGSGLVTDGTMATDQRKVKMLWALRERITEALSRDGYVYKYDLSLPVERLYDIVTDLRARLGPHAKHVVGYGHL

SEQ ID NO: 14156 - protein, 1172 aa, Homo sapiens
MPDQDKKVKTTEKSTDKQQEITIRDYSDLKRLRCLLNVQSSKQQLPAINFDSAQNSMTKSEPAIRAGGHRARGQWHESTEAVELENFSINYKNERNFSKHPQRKLFQEIFTALVKNRLISREWVNRAPSIHFLRVLICLRLLMRDPCYQEILHSLGGIENLAQYMEIVANEYLGYGEEQHTVDKLVNMTYIFQKLAAVKDQREWVTTSGAHKTLVNLLGARDTNVLLGSLLALASLAESQECREKISELNIVENLLMILHEYDLLSKRLTAELLRLLCAEPQVKEQVKLYEGIPVLLSLLHSDHLKLLWSIVWILVQVCEDPETSVEIRIWGGIKQLLHILQGDRNFVSDHSSIGSLSSANAAGRIQQLHLSEDLSPREIQENTFSLQAACCAALTELVLNDTNAHQVVQENGVYTIAKLILPNKQKNAAKSNLLQCYAFRALRFLFSMERNRPLFKRLFPTDLFEIFIDIGHYVRDISAYEELVSKLNLLVEDELKQIAENIESINQNKAPLKYIGNYAILDHLGSGAFGCVYKVRKHSGQNLLAMKEVNLHNPAFGKDKKDRDSSVRNIVSELTIIKEQLYHPNIVRYYKTFLENDRLYIVMELIEGAPLGEHFSSLKEKHHHFTEERLWKIFIQLCLALRYLHKEKRIVHRDLTPNNIMLGDKDKVTVTDFGLAKQKQENSKLTSVVGTILYSCPEVLKSEPYGEKADVWAVGCILYQMATLSPPFYSTNMLSLATKIVEAVYEPVPEGIYSEKVTDTISRCLTPDAEARPDIVEVSSMISDVMMKYLDNLSTSQLSLEKKLERERRRTQRYFMEANRNTVTCHHELAVLSHETFEKASLSSSSSGAASLKSELSESADLPPEGFQASYGKDEDRACDEILSDDNFNLENAEKDTYSEVDDELDISDNSSSSSSSPLKESTFNILKRSFSASGGERQSQTRDFTGGTGSRPRPALLPLDLLLKVPPHMLRAHIKEIEAELVTGWQSHSLPAVILRNLKDHGPQMGTFLWQASAGIAVSQRKVRQISDPIQQILIQLHKIIYITQLPPALHHNLKRRVIERFKKSLFSQQSNPCNLKSEIKKLSQGSPEPIEPNFFTADYHLLHRSSGGNSLSPNDPTGLPTSIELEEGITYEQMQTVIEEVLEESGYYNFTSNRYHSYPWGTKNHPTKR

SEQ ID NO: 14157 - protein, 516 aa, Homo sapiens
GSFNAERGWYVSVQQPEEAEAEELSPLLSNELHRQRSPGVSFGLSVFNLMNAIMGSGILGLAYVLANTGVFGFSFLLLTVALLASYSVHLLLSMCIQTAVTSYEDLGLFAFGLPGKLVVAGTIIIQNIGAMSSYLLIIKTELPAAIAEFLTGDYSRYWYLDGQTLLIIICVGIVFPLALLPKIGFLGYTSSLSFFFMMFFALVVIIKKWSIPCPLTLNYVEKGFQISNVTDDCKPKLFHFSKESAYALPTMAFSFLCHTSILPIYCELQSPSKKRMQNVTNTAIALSFLIYFISALFGYLTFYDKVESELLKGYSKYLSHDVVVMTVKLCILFAVLLTVPLIHFPARKAVTMMFFSNFPFSWIRHFLITLALNIIIVLLAIYVPDIRNVFGVVGASTSTCLIFIFPGLFYLKLSREDFLSWKKLGGLILSHRLACSGVISAHCNLCLPDSSNPPTSASRVAETTGRDTMEMCTQRKGHARTQQEGNCLQAKGRGLRRTKRVHTLILHFPTSRTVSK

SEQ ID NO: 14158 - protein, 617 aa, Homo sapiens
MLLRKRYRHRPCRLQFLLLLLMLGCVLMMVAMLHPPHHTLHQTVTAQASKHSPEARYRLDFGESQDWVLEAEDEGEEYSPLEGLPPFISLREDQLLVAVALPQARRNQSQGRRGGSYRLIKQPRRQDKEAPKRDWGADEDGEVSEEEELTPFSLDPRGLQEALSARIPLQRALPEVRHPLCLQQHPQDSLPTASVILCFHDEAWSTLLRTVHSILDTVPRAFLKEIILVDDLSQQGQLKSALSEYVARLEGVKLLRSNKRLGAIRARMLGATRATGDVLVFMDAHCECHPGWLEPLLSRIAGDRSRVVSPVIDVIDWKTFQYYPSKDLQRGVLDWKLDFHWEPLPEHVRKALQSPISPIRSPVVPGEVVAMDRHYFQNTGAYDSLMSLRGGENLELSFKAWLCGGSVEILPCSRVGHIYQNQDSHSPLDQEATLRNRVRIAETWLGSFKETFYKHSPEAFSLSKAEKPDCMERLQLQRRLGCRTFHWFLANVYPELYPSEPRPSFSGKLHNTGLGLCADCQAEGDILGCPMVLAPCSDSRQQQYLQHTSRKEIHFGSPQHLCFAVRQEQVILQNCTEEGLAIHQQHWDFQEDENRANSAAAEAYQRPLTFQQIVNNG

SEQ ID NO: 14159 - protein, 445 aa, Homo sapiens
MAALMTPGTGAPPAPGDFSGEGSQGLPDPSPEPKQLPELIRMKRDGGRLSEADIRGFVAAVVNGSAQGAQIGAMLMAIRLRGMDLEETSVLTQALAQSGQQLEWPEAWRQQLVDKHSTGGVGDKVSLVLAPALAACGCKMQVLLDQAGCCIVGQSEQLVPADGILYAARDVTATVDSLPLITASILSKKLVEGLSALVVDVKFGGAAVFPNQEQARELAKTLVGVGASLGLRVAAALTAMDKPLGRCVGHALEVEEALLCMDGAGPPDLRDLVTTLGGALLWLSGHAGTQAQGAARVAAALDDGSALGRFERMLAAQGVDPGLARALCSGSPAERRQLLPRAREQEELLAPADGTVELVRALPLALVLHELGAGRSRAGEPLRLGVGAELLVDVGQRLRRGTPWLRVHRDGPALSGPQSRALQEALVLSDRAPFAAPSPFAELVL

SEQ ID NO: 14160 - protein, 801 aa, Homo sapiens
MKIAVIGQSLFGQEVYCHLRKEGHEVVGVFTVPDKDGKADPLGLEAEKDGVPVFKYSRWRAKGQALPDVVAKYQALGAELNVLPFCSQFIPMEIISAPRHGSIIYHPSLLPRHRGASAIHNWIRGNDKVPGAWTEACEQKLTFFNSTLNTSGLVPEGDALPIPGAHRPGVVTKAGLILFGNDDKMLLVKNIQLEDGKMILASNFFKGAASSVLELTEAELVTAEAVRSVWQRILPKVLEVEDSTDFFKSGAASVDVVRLVEEVKELCDGLELENEDVYMASTFGDFIQLLVRKLRGDDEEGECSIDYVEMAVNKRTVRMPHQLFIGGEFVDAEGAKTSETINPTDGSVICQVSLAQVTDVDKAVAAAKDAFENGRWGKISARDRGRLMYRLADLMEQHQEELATIEALDAGAVYTLALKTHVGMSIQTFRYFAGWCDKIQGSTIPINQARPNRNLTLTRKEPVGVCGIIIPWNYPLMMLSWKTAACLAAGNTVVIKPAQVTPLTALKFAELTLKAGIPKGVVNVLPGSGSLVGQRLSDHPDVRKIGFTGSTEVGKHIMKSCAISNVKKVSLELGGKSPLIIFADCDLNKAVQMGMSSVFFNKGENCIAAGRLFVEDSIHDEFVRRVVEEVRKMKVGNPLDRDTDHGPQNHHAHLVKLMEYCQHGVKEGATLVCGGNQVPRPGFFFEPTVFTDVEDHMFIAKEESFGPVMIISRFADGDLDAVLSRANATEFGLASGVFTRDINKALYVSDKLQAGTVFVNTYNKTDVAAPFGGFKQSGFGKDLGEAALNEYLRVKTVTFEY

SEQ ID NO: 14161 - protein, 1026 aa, Homo sapiens
MEKRLGVKPNPASWILSGYYWQTSAKWLRSLYLFYTCFCFSVLWLSTDASESRCQQGKTQFGVGLRSGGENHLWLLEGTPSLQSCWAACCQDSACHVFWWLEGMCIQADCSRPQSCRAFRTHSSNSMLVFLKKFQTADDLGFLPEDDVPHLLGLGWNWASWRQSPPRAALRPAVSSSDQQSLIRKLQKRGSPSDVVTPIVTQHSKVNDSNELGGLTTSGSAEVHKAITISSPLTTDLTAELSGGPKNVSVQPEISEGLATTPSTQQVKSSEKTQIAVPQPVAPSYSYATPTPQASFQSTSAPYPVIKELVVSAGESVQITLPKNEVQLNAYVLQEPPKGETYTYDWQLITHPRDYSGEMEGKHSQILKLSKLTPGLYEFKVIVEGQNAHGEGYVNVTVKPEPRKNRPPIAIVSPQFQEISLPTTSTVIDGSQSTDDDKIVQYHWEELKGPLREEKISEDTAILKLSKLVPGNYTFSLTVVDSDGATNSTTANLTVNKAVDYPPVANAGPNQVITLPQNSITLFGNQSTDDHGITSYEWSLSPSSKGKVVEMQGVRTPTLQLSAMQEGDYTYQLTVTDTIGQQATAQVTVIVQPENNKPPQADAGPDKELTLPVDSTTLDGSKSSDDQKIISYLWEKTQGPDGVQLENANSSVATVTGLQVGTYVFTLTVKDERNLQSQSSVNVIVKEEINKPPIAKITGNVVITLPTSTAELDGSKSSDDKGIVSYLWTRDEGSPAAGEVLNHSDHHPILFLSNLVEGTYTFHLKVTDAKGESDTDRTTVEVKPDPRKNNLVEIILDINVSQLTERLKGMFIRQIGVLLGVLDSDIIVQKIQPYTEQSTKMVFFVQNEPPHQIFKGHEVAAMLKSELRKQKADFLIFRALEVNTVTCQLNCSDHGHCDSFTKRCICDPFWMENFIKVQLRDGDSNCEWSVLYVIIATFVIVVALGILSWTVICCCKRQKGKPKRKSKYKILDATDQESLELKPTSRAGIKQKGLLLSSSLMHSESELDSDDAIFTWPDREKGKLLH

SEQ ID NO: 14162 - protein, 220 aa, Homo sapiens
MAGAIASRMSFSSLKRKQPKTFTVRIVTMDAEMEFNCEVKKQILDEKIYCPPEASVLLASYAVQAKNKKGTELLLGVDALGLHIYDPENRLTPKISFPWNEIRNISYSDKEFTIKPLDKKIDVFKFNSSKLRVNKLILQLCIGNHDLFMRRRKADSLEVQQMKAQAREEKARKQGQRGRSAEAGPAGSTRGGAKSQAEAPGDCHQAHVPAHEPNSSTVAS

SEQ ID NO: 14163 - protein, 136 aa, Homo sapiens
KDQERLMRHRYLDMISRKLEQLERTAEEQRLFLMDREERRQREHTRRKLTLRRKIEEEWKTKEMLLLTRMAEDVKREERIEEQQHRNREESDRKKQDLLEKKMAYHLQKMQDTGFNGEDIGKNTFKYRGQDGTHGE

SEQ ID NO: 14164 - protein, 585 aa, Homo sapiens
MEDSQDLNEQSVKKTCTESDVSQSQNSRSMEMQDLASPHTLVGGGDTPGSSKLEKSNLSSTSVTTNGTGVITSSGYSPRSAHQYSPQLYPSKPYPHILSTPAAQTMSAYAGQTQYSGMQQPAVYTAYSQTGQPYSLPTYDLGVMLPAIKTESGLSQTQSPLQSGCLSYSPGFSTPQPGQTPYSYQMPGSSFAPSSTIYANNSVSNSTNFSGSQQDYPSYTAFGQNQYAQYYSASTYGAYMTSNNTADGTPSSTSTYQLQESLPGLTNQPGEFDTMQSPSTPIKDLDERTCRSSGSKSRGRGRKNNPSPPPDSDLERVFVWDLDETIIVFHSLLTGSYAQKYGKDPPMAVTLGLRMEEMIFNLADTHLFFNDLEECDQVHIDDVSSDDNGQDLSTYSFATDGFHAAASSANLCLPTGVRGGVDWMRKLAFRYRRVKELYNTYKNNVGGLLGPAKRDAWLQLRAEIEGLTDSWLTNALKSLSIISTRSNCINVLVTTTQLIPALAKVLLYSLGGAFPIENIYSATKIGKESCFERIVSRFGTNITYVVIGDGRDEEHAANQHNMPFWRISSHSDLLALHQALELEYL

SEQ ID NO: 14165 - protein, 776 aa, Homo sapiens
MAKSSSLNVRVVEGRALPAKDVSGSSDPYCLVKVDDEVVARTATVWRSLGPFWGEEYTVHLPLDFHQLAFYVLDEDTVGHDDIIGKISLSREAITADPRGIDSWINLSRVDPDAEVQGEICLSVQMLEDGQGRCLRCHVLQARDLAPRDISGTSDPFARVFWGSQSLETSTIKKTRFPHWDEVLELREMPGAPSPLRVELWDWDMVGKNDFLGMVEFSPKTLQQKPPKGWFRLLPFPRAEEDSGGNLGALRVKVRLIEDRVLPSQCYQPLMELLMESVQGPAEEDTASPLALLEELTLGDCRQDLATKLVKLFLGRGLAGRFLDYLTRREVARTMDPNTLFRSNSLASKSMEQFMKLVGMPYLHEVLKPVISRVFEEKKYMELDPCKMDLGRTRRISFKGALSEEQMRETSLGLLTGYLGPIVDAIVGSVGRCPPAMRLAFKQLHRRVEERFPQAEHQDVKYLAISGFLFLRFFAPAILTPKLFDLRDQHADPQTSRSLLLLAKAVQSIGNLGQQLGQGKELWMAPLHPFLLQCVSRVRDFLDRLVDVDGDEAGVPARALFPPSAIVREGYLLKRKEEPAGLATRFAFKKRYVWLSGETLSFSKSPEWQVVTQDGTGALHTTYLQCKNVNELNQWLSALRKASAPNPNKLAACHPGAFRSARWTCCLQAERSAAGCSRTHSAVTLGDWSDPLDPDAEAQTVYRQLLLGRDQLRLKLLEDSNMDTTLEADTGACPEVLARQRAATARLLEVLADLDRAHEEFQQQERGKAALGPLGP

SEQ ID NO: 14166 - protein, 592 aa, Homo sapiens
MEELVVEVRGSNGAFYKAFVKDVHEDSITVAFENNWQPDRQIPFHDVRFPPPVGYNKDINESDEVEVYSRANEKEPCCWWLAKVRMIKGEFYVIEYAACDATYNEIVTIERLRSVNPNKPATKDTFHKIKLDVPEDLRQMCAKEAAHKDFKKAVGAFSVTYDPENYQLVILSINEVTSKRAHMLIDMHFRSLRTKLSLIMRNEEASKQLESSRQLASRFHEQFIVREDLMGLAIGTHGANIQQARKVPGVTAIDLDEDTCTFHIYGEDQDAVKKARSFLEFAEDVIQVPRNLVVIGKNGKLIQEIVDKSGVVRVRIEAENEKNVPQEEEIMPPNSLPSNNSRVGPNAPEEKKHLDIKENSTHFSQPNSTKVQRGMVPFVFVGTKDSIANATVLLDYHLNYLKEVDQLRLERLQIDEQLRQIGASSRPPPNRTDKEKSYVTDDGQGMGRGSRPYRNRGHGRRGPGYTSGTNSEASNASETESDHRDELSDWSLAPTEEERESFLRRGDGRRRGGGGRGQGGRGRGGGFKGNDDHSRTDNRPRNPREAKGRTTDGSLQNTSSEGSRLRTGKDRNQKKEKPDSVDGQQPLVNGVP

SEQ ID NO: 14167 - protein, 179 aa, Homo sapiens
NQGPHPPGHHGPPPMGKSVPGKYACGLWGLSPASRKRYDAATTYGHDAAAAAASQWAAPTPSLWSSSPMATTAAAASATPSAQQQYGFQYPLAMAAKYDDYHHERWHRVHPAMATAAGGCRSFSRSPSDARQPHYGAPAPRGPAASAAWGPSPSAASTAWFRRHDVCPAPSSSASHGPF

SEQ ID NO: 14168 - protein, 219 aa, Homo sapiens
MQGLLFSTLLLAGLAQFCCRVQGTGPLDTTPEGRPGEVSDAPQRKQFCHWPCKCPQQKPRCPPGVSLVRDGCGCCKICAKQPGEICNEADLCDPHKGLYCDYSVDRPRYETGVCAYLVAVGCEFNQVHYHNGQVFQPNPLFSCLCVSGAIGCTPLFIPKLAGSHCSGAKGGKKSDQSNCSLEPLLQQLSTSYKTMPDVCQASNLLPALRSLNCCLPSSL

SEQ ID NO: 14169 - protein, 2696 aa, Homo sapiens
MDQTCELPRRNCLLPFSNPVNLDAPEDKDSPFGNGQSNFSEPLNGCTMQLSTVSGTSQNAYGQDSPSCYIPLRRLQDLASMINVEYLNGSADGSESFQDPEKSDSRAQTPIVCTSLSPGGPTALAMKQEPSCNNSPELQVKVTKTIKNGFLHFENFTCVDDADVDSEMDPEQPVTEDESIEEIFEETQTNATCNYETKSENGVKVAMGSEQDSTPESRHGAVKSPFLPLAPQTETQKNKQRNEVDGSNEKAALLPAPFSLGDTNITIEEQLNSINLSFQDDPDSSTSTLGNMLELPGTSSSSTSQELPFCQPKKKSTPLKYEVGDLIWAKFKRRPWWPCRICSDPLINTHSKMKVSNRRPYRQYYVEAFGDPSERAWVAGKAIVMFEGRHQFEELPVLRRRGKQKEKGYRHKVPQKILSKWEASVGLAEQYDVPKGSKNRKCIPGSIKLDSEEDMPFEDCTNDPESEHDLLLNGCLKSLAFDSEHSADEKEKPCAKSRARKSSDNPKRTSVKKGHIQFEAHKDERRGKIPENLGLNFISGDISDTQASNELSRIANSLTGSNTAPGSFLFSSCGKNTAKKEFETSNGDSLLGLPEGALISKCSREKNKPQRSLVCGSKVKLCYIGAGDEEKRSDSISICTTSDDGSSDLDPIEHSSESDNSVLEIPDAFDRTENMLSMQKNEKIKYSRFAATNTRVKAKQKPLISNSHTDHLMGCTKSAEPGTETSQVNLSDLKASTLVHKPQSDFTNDALSPKFNLSSSISSENSLIKGGAANQALLHSKSKQPKFRSIKCKHKENPVMAEPPVINEECSLKCCSSDTKGSPLASISKSGKVDGLKLLNNMHEKTRDSSDIETAVVKHVLSELKELSYRSLGEDVSDSGTSKPSKPLLFSSASSQNHIPIEPDYKFSTLLMMLKDMHDSKTKEQRLMTAQNLVSYRSPGRGDCSTNSPVGVSKVLVSGGSTHNSEKKGDGTQNSANPSPSGGDSALSGELSASLPGLLSDKRDLPASGKSRSDCVTRRNCGRSKPSSKLRDAFSAQMVKNTVNRKALKTERKRKLNQLPSVTLDAVLQGDRERGGSLRGGAEDPSKEDPLQIMGHLTSEDGDHFSDVHFDSKVKQSDPGKISEKGLSFENGKGPELDSVMNSENDELNGVNQVVPKKRWQRLNQRRTKPRKRMNRFKEKENSECAFRVLLPSDPVQEGRDEFPEHRTPSASILEEPLTEQNHADCLDSAGPRLNVCDKSSASIGDMEKEPGIPSLTPQAELPEPAVRSEKKRLRKPSKWLLEYTEEYDQIFAPKKKQKKVQEQVHKVSSRCEEESLLARGRSSAQNKQVDENSLISTKEEPPVLEREAPFLEGPLAQSELGGGHAELPQLTLSVPVAPEVSPRPALESEELLVKTPGNYESKRQRKPTKKLLESNDLDPGFMPKKGDLGLSKKCYEAGHLENGITESCATSYSKDFGGGTTKIFDKPRKRKRQRHAAAKMQCKKVKNDDSSKEIPGSEGELMPHRTATSPKETVEEGVEHDPGMPASKKMQGERGGGAALKENVCQNCEKLGELLLCEAQCCGAFHLECLGLTEMPRGKFICNECRTGIHTCFVCKQSGEDVKRCLLPLCGKFYHEECVQKYPPTVMQNKGFRCSLHICITCHAANPANVSASKGRLMRCVRCPVAYHANDFCLAAGSKILASNSIICPNHFTPRRGCRNHEHVNVSWCFVCSEGGSLLCCDSCPAAFHRECLNIDIPEGNWYCNDCKAGKKPHYREIVWVKVGRYRWWPAEICHPRAVPSNIDKMRHDVGEFPVLFFGSNDYLWTHQARVFPYMEGDVSSKDKMGKGVDGTYKKALQEAAARFEELKAQKELRQLQEDRKNDKKPPPYKHIKVNRPIGRVQIFTADLSEIPRCNCKATDENPCGIDSECINRMLLYECHPTVCPAGGRCQNQCFSKRQYPEVEIFRTLQRGWGLRTKTDIKKGEFVNEYVGELIDEEECRARIRYAQEHDITNFYMLTLDKDRIIDAGPKGNYARFMNHCCQPNCETQKWSVNGDTRVGLFALSDIKAGTELTFNYNLECLGNGKTVCKCGAPNCSGFLGVRPKNQPIATEEKSKKFKKKQQGKRRTQGEITKEREDECFSCGDAGQLVSCKKPGCPKVYHADCLNLTKRPAGKWECPWHQCDICGKEAASFCEMCPSSFCKQHREGMLFISKLDGRLSCTEHDPCGPNPLEPGEIREYVPPPVPLPPGPSTHLAEQSTGMAAQAPKMSDKPPADTNQMLSLSKKALAGTCQRPLLPERPLERTDSRPQPLDKVRDLAGSGTKSQSLVSSQRPLDRPPAVAGPRPQLSDKPSPVTSPSSSPSVRSQPLERPLGTADPRLDKSIGAASPRPQSLEKTSVPTGLRLPPPDRLLITSSPKPQTSDRPTDKPHASLSQRLPPPEKVLSAVVQTLVAKEKALRPVDQNTQSKNRAALVMDLIDLTPRQKERAASPHQVTPQADEKMPVLESSSWPASKGLGHMPRAVEKGCVSDPLQTSGKAAAPSEDPWQAVKSLTQARLLSQPPAKAFLYEPTTQASGRASAGAEQTPGPLSQSPGLVKQAKQMVGGQQLPALAAKSGQSFRSLGKAPASLPTEEKKLVTTEQSPWALGKASSRAGLWPIVAGQTLAQSCWSAGSTQTLAQTCWSLGRGQDPKPEQNTLPALNQAPSSHKCAESEQK

SEQ ID NO: 14170 - protein, 479 aa, Homo sapiens
MGSNSSRIGDLPKNEYLKKLSGTESISENDPFWNQLLSFSFPAPTSSSELKLLEEATISVCRSLAGLWTVFTLGGVGSKAAASPELSSPLANQSLLLLLVLANLTDASDAPNPYRQAIMSFKNTQDSSPFPSSIPHAFQINFNSLYTALCEQQTSDQATLLLYTLLHQNSNIRTYMLARTDMENLVLPILEILYHVEERNSHHVYMALIILLILTEDDGFNRSIHEVILKNITWYSERVLTEISLGSLLILVVIRTIQYNMTRTRDKYLHTNCLAALANMSAQFRSLHQYAAQRIISLFSLLSKKHNKVLEQATQSLRGSLSSNDVPLPDYAQDLNVIEEVIRMMLEIINSCLTNSLHHNPNLVYALLYKRDLFEQFRTHPSFQDIMQNIDLVISFFSSRLLQAGAELSVERVLEIIKQGVVALPKDRLKKFPELKFKYVEEEQPEEFFIPYVWSLVYNSAVGLYWNPQDIQLFTMDSD

SEQ ID NO: 14171 - protein, 278 aa, Homo sapiens
MGRISPGSPGLPRTVWFEVVNMDFSRLHMYSPPQCVPENTGYTYALSSSYSSDALDFETEHKLDPVFDSPRMSRRSLRLATTACTLGDGEAVGADSGTSSAVSLKNRAARTTKQRRSTNKSAFSINHVSRQVTSSGVSHGGTVSLQDAVTRRPPVLDESWIREQTTVDHFWGLDDDGDLKGGNKAAIQGNGDVGAAAATAHNGFSCSNCSMLSERKDVLTAHPAAPGPVSRVYSRDRNQKCKSQSFKTQKKVCFPNLIFPFCKSQCLHYLSWRLKIIP

SEQ ID NO: 14172 - protein, 1560 aa, Homo sapiens
MNTPSQPRQHFYPSRAQPPSSAASRVQSAAPARPGPAAHVYPAGSQVMMIPSQISYPASQGAYYIPGQGRSTYVVPTQQYPVQPGAPGFYPGASPTEFGTYAGAYYPAQGVQQFPTGVAPTPVLMNQPPQIAPKRERKTIRIRDPNQGGKDITEEIMSGARTASTPTPPQTGGGLEPQANGETPQVAVIVRPDDRSQGAIIADRPGLPGPEHSPSESQPSSPSPTPSPSPVLEPGSEPNLAVLSIPGDTMTTIQMSVEESTPISRETGEPYRLSPEPTPLAEPILEVEVTLSKPVPESEFSSSPLQAPTPLASHTVEIHEPNGMVPSEDLEPEVESSPELAPPPACPSESPVPIAPTAQPEELLNGAPSPPAVDLSPVSEPEEQAKEVTASMAPPTIPSATPATAPSATSPAQEEEMEEEEEEEEGEAGEAGEAESEKGGEELLPPESTPIPANLSQNLEAAAATQVAVSVPKRRRKIKELNKKEAVGDLLDAFKEANPAVPEVENQPPAGSNPGPESEGSGVPPRPEEADETWDSKEDKIHNAENIQPGEQKYEYKSDQWKPLNLEEKKRYDREFLLGFQFIFASMQKPEGLPHISDVVLDKANKTPLRPLDPTRLQGINCGPDFTPSFANLGRTTLSTRGPPRGGPGGELPRGPQAGLGPRRSQQGPRKEPRKIIATVLMTEDIKLNKAEKAWKPSSKRTAADKDRGEEDADGSKTQDLFRRVRSILNKLTPQMFQQLMKQVTQLAIDTEERLKGVIDLIFEKAISEPNFSVAYANMCRCLMALKVPTTEKPTVTVNFRKLLLNRCQKEFEKDKDDDEVFEKKQKEMDEAATAEERGRLKEELEEARDIARRRSLGNIKFIGELFKLKMLTEAIMHDCVVKLLKNHDEESLECLCRLLTTIGKDLDFEKAKPRMDQYFNQMEKIIKEKKTSSRIRFMLQDVLDLRGSNWVPRRGDQGPKTIDQIHKEAEMEEHREHIKVQQLMAKGSDKRRGGPPGPPISRGLPLVDDGGWNTVPISKGSRPIDTSRLTKITKPGSIDSNNQLFAPGGRLSWGKGSSGGSGAKPSDAASEAARPATSTLNRFSALQQAVPTESTDNRRVVQRSSLSRERGEKAGDRGDRLERSERGGDRGDRLDRARTPATKRSFSKEVEERSRERPSQPEGLRKAASLTEDRDRGRDAVKREAALPPVSPLKAALSEEELEKKSKAIIEEYLHLNDMKEAVQCVQELASPSLLFIFVRHGVESTLERSAIAREHMGQLLHQLLCAGHLSTAQYYQGLYEILELAEDMEIDIPHVWLYLAELVTPILQEGGVPMGELFREITKPLRPLGKAASLLLEILGLLCKSMGPKKVGTLWREAGLSWKEFLPEGQDIGAFVAEQKVEYTLGEESEAPGQRALPSEELNRQLEKLLKEGSSNQRVFDWIEANLSEQQIVSNTLVRALMTAVCYSAIIFETPLRVDVAVLKARAKLLQKYLCDEQKELQALYALQALVVTLEQPPNLLRMFFDALYDEDVVKEDAFYSWESSKDPAEQQGKGVALKSVTAFFKWLREAEEESDHN

SEQ ID NO: 14173 - protein, 73 aa, Homo sapiens
MAASAAAAELQASGGPRHPVCLLVLGMAGSGKTTFVQRLTGHLHAQGTPPYVINLDPAVHEVPFPANIGDEIY

SEQ ID NO: 14174 - protein, 1087 aa, Homo sapiens
MRAGGACRPGAAGTAAGTAAGGWDGGCGGAEPARCLTSPWCQWTGRGAATMTTSRGSVGWTTGSAPSWMTRTEELDIRPKVSSLLGKLVSYTNLTQGAKEHEEAESGEGTRRRAAEAPSMGTLMGVYLPCLQNIFGVILFLRLTWMVGTAGVLQALLIVLICCCCTLLTAISMSAIATNGVVPAGGSYFMISRSLGPEFGGAVGLCFYLGTTFAAAMYILGAIEILLTYIAPPAAIFYPSGAHDTSNATLNNMRVYGTIFLTFMTLVVFVGVKYVNKFASLFLACVIISILSIYAGGIKSIFDPPVFPVCMLGNRTLSRDQFDICAKTAVVDNETVATQLWSFFCHSPNLTTDSCDPYFMLNNVTEIPGIPGAAAGVLQENLWSAYLEKGDIVEKHGLPSADAPSLKESLPLYVVADIATSFTVLVGIFFPSVTGIMAGSNRSGDLRDAQKSIPVGTILAIITTSLVYFSSVVLFGACIEGVVLRDKYGDGVSRNLVVGTLAWPSPWVIVIGSFFSTCGAGLQSLTGAPRLLQAIAKDNIIPFLRVFGHGKVNGEPTWALLLTALIAELGILIASLDMVAPILSMFFLMCYLFVNLACAVQTLLRTPNWRPRFKYYHWALSFLGMSLCLALMFVSSWYYALVAMLIAGMIYKYIEYQGAEKEWGDGIRGLSLSAARYALLRLEEGPPHTKNWRPQLLVLLKLDEDLHVKYPRLLTFASQLKAGKGLTIVGSVIQGSFLESYGEAQAAEQTIKNMMEIEKVKGFCQVVVASKVREGLAHLIQSCGLGGMRHNSVVLGWPYGWRQSEDPRAWKTFIDTVRCTTAAHLALLVPKNIAFYPSNHERYLEGHIDVWWIVHDGGMLMLLPFLLRQHKVWRKCRMRIFTVAQMDDNSIQMKKDLAVFLYHLRLEAEVEVVEMHNSDISAYTYERTLMMEQRSQMLRQMRLTKTEREREAQLVKDRHSALRLESLYSDEEDESAVGADKIQMTWTRDKYMTETWDPSHAPDNFRELVHIKPDQSNVRRMHTAVKLNEVIVTRSHDARLVLLNMPGPPRNSEGDENYMEFLEVLTEGLERVLLVRGGGREVITIYS

SEQ ID NO: 14175 - protein, 1290 aa, Homo sapiens
MEPPSCIQDEPFPHPLEPEPGVSAQPGPGKPSDKRFRLWYVGGSCLDHRTTLPMLPWLMAEIRRRSQKPEAGGCGAPAAREVILVLSAPFLRCVPAPGAGASGGTSPSATQPNPAVFIFEHKAQHISRFIHNSHDLTYFAYLIKAQPDDPESQMACHVFRATDPSQVPDVISSIRQLSKAAMKEDAKPSKDNEDAFYNSQKFEVLYCGKVTVTHKKAPSSLIDDCMEKFSLHEQQRLKIQGEQRGPDPGEDLADLEVVVPGSPGDCLPEEADGTDTHLGLPAGASQPALTSSRVCFPERILEDSGFDEQQEFRSRCSSVTGVQRRVHEGSQKSQPRRRHASAPSHVQPSDSEKNRTMLFQVGRFEINLISPDTKSVVLEKNFKDISSCSQGIKHVDHFGFICRESPEPGLSQYICYVFQCASESLVDEVMLTLKQAFSTAAALQSAKTQIKLCEACPMHSLHKLCERIEGLYPPRAKLVIQRHLSSLTDNEQADIFERVQKMKPVSDQEENELVILHLRQLCEAKQKTHVHIGEGPSTISNSTIPENATSSGRFKLDILKNKAKRSLTSSLENIFSRGANRMRGRLGSVDSFERSNSLASEKDYSPGDSPPGTPPASPPSSAWQTFPEEDSDSPQFRRRAHTFSHPPSSTKRKLNLQDGRAQGVRSPLLRQSSSEQCSNLSSVRRMYKESNSSSSLPSLHTSFSAPSFTAPSFLKSFYQNSGRLSPQYENEISDGEGRKRTSSTCSNESLSVGGTSVTPRRISWRQRIFLRVASPMNKSPSAMQQQDGLDRNELLPLSPLSPTMEEEPLVVFLSGEDDPEKIEERKKSKELRSLWRKAIHQQILLLRMEKENQKLEASRDELQSRKVKLDYEEVGACQKEVLITWDKKLLNCRAKIRCDMEDIHTLLKEGVPKSRRGEIWQFLALQYRLRHRLPNKQQPPDISYKELLKQLTAQQHAILVDLGRTFPTHPYFSVQLGPGQLSLFNLLKAYSLLDKEVGYCQGISFVAGVLLLHMSEEQAFEMLKFLMYDLGFRKQYRPDMMSLQIQMYQLSRLLHDYHRDLYNHLEENEISPSLYAAPWFLTLFASQFSLGFVARVFDIIFLQGTEVIFKVALSLLSSQETLIMECESFENIVEFLKNTLPDMNTSEMEKIITQVFEMDISKQLHAYEVEYHVLQDELQESSYSCEDSETLEKLERANSQLKRQNMDLLEKLQVAHTKIQALESNLENLLTRETKMKSLIRTLEQEKMAYQKTVEQLRKLLPADALVNCDLLLRDLNCNPNNKAKIGNKP

SEQ ID NO: 14176 - protein, 73 aa, Homo sapiens
MMCQSEARQGPELRAAKWLHFPQLALRRRLGQLSCMSRPALKLRSWPLTVLYYLLPFGALRPLSRVGWRPVSR

SEQ ID NO: 14177 - protein, 824 aa, Homo sapiens
MYSNEDSRQTIVYSEESNTTMSYTQKITNPLPAASSTDPAPFANINTPVLQEDYRQDSQTRRISTLKLTHNQDLGSSSPISTPQFSKSVEVPSFLKRPRSLTPNPVPETHTASLSIQIAPLSGQDLESHKQLPELSPETAKIPLQQERQKSAVAAASQSSDCRVSQITVNGNSGGAVSPMSYYQRPFSPSAYSLPASLNSSIVMQHGTSLDSTDTYPQHAQSLDGTTSSSIPLYRSSEEEKRVTVIKAPHYPGIGPVDESGIPTAIRTTVDRPKDWYKTMFKQIHMVHKPDDDTDMYNTPYTYNAGLYNPPYSAQSHPAAKTQTYRPLSKSHSDNSPNAFKDASSPVPPPHVPPPVPPLRPRDRSSTEKHDWDPPDRKVDTRKFRSEPRSIFEYEPGKSSILQHERPPPLPTTPTPVPREPGRKPLSSSRLGEVTGSPSPPPRSGAPTPSSRAPALSPTRPPKKPLDYVQDHSSGVFNEASLYQSSIDRSLERPMSSASMASDFRKRRKSEPAVGPPRGLGDQSASRTSPGRVDLPGSSTTLTKSFTSSSPSSPSRAKDRESPRSYSSTLTDMGRSAPRERRGTPEKEKLPAKAVYDFKAQTSKELSFKKGDTVYILRKIDQNWYEGEHHGRVGIFPISYVEKLTPPEKAQPARPPPPAQPGEIGEAIAKYNFNADTNVELSLRKGDRVILLKRVDQNWYEGKIPGTNRQGIFPVSYVEVVKKNTKGAEDYPDPPIPHSYSSDRIHSLSSNKPQRPVFTHENIQGGGEPFQALYNYTPRNEDELELRESDVIDVMEKCDDGWFVGTSRRTKFFGTFPGNYVKRL

SEQ ID NO: 14178 - protein, 1031 aa, Homo sapiens
MAAGRAQVPSSEQAWLEDAQVFIQKTLCPAVKEPNVQLTPLVIDCVKTVWLSQGRNQGSTLPLSYSFVSVQDLKTHQRLPCCSHLSWSSSAYQAWAQEAGPNGNPLPREQLLLLGTLTDLSADLEQECRNGSLYVRDNTGVLSCELIDLDLSWLGHLFLFPRWSYLPPARWNSSGEGHLELWDAPVPVFPLTISPGPVTPIPVLYPESASCLLRLRSHPAVTHVSIIVQVPAQLVWHRALRPGTAYVLTELRVSKIRGQRQHVWMTSQSSRLLLLKPECVQELELELEGPLLEADPKPLPMPSNSEDKKDPESLVRYSRLLSYSGAVTGVLNEPAGLYELDGQLGLCLAYQQFRGLRRVMRPGVCLQLQDVHLLQSVGGGTRRPVLAPCLRGAVLLQSFSRQKPGAHSSRQAYGASLYEQLVWERQLGLPLYLWATKALEELACKLCPHVLRHHQFLQHSSPGSPSLGLQLLAPTLDLLAPPGSPVRNAHNEILEEPHHCPLQKYTRLQTPSSFPTLATLKEEGQRKAWASFDPKALLPLPEASYLPSCQLNRRLAWSWLCLLPSAFCPAQVLLGVLVASSHKGCLQLRDQSGSLPCLLLAKHSQPLSDPRLIGCLVRAERFQLIVERDVRSSFPSWKELSMPGFIQKQQARVYVQFFLADALILPVPRPCLHSATPSTPQTDPTGPEGPHLGQSRLFLLCHKEALMKRNFCVPPGASPEVPKPALSFYVLGSWLGGTQRKEGTGWGLPEPQGNDDNDQKVHLIFFGSSVRWFEFLHPGQVYRLIAPGPATPMLFEKDGSSCISRRPLELAGCASCLTVQDNWTLELESSQDIQDVLDANKSLPESSLTDLLSDNFTDSLVSFSAEILSRTLCEPLVASLWMKLGNTGAMRRCVKLTVALETAECEFPPHLDVYIEDPHLPPSLGLLPGARVHFSQLEKRVSRSHNVYCCFRSSTYVQVLSFPPETTISIPLPHIYLAELLQGGQSPFQATASCHIVSVFSLQLFWVCAYCTSICRQAPGGGWDCRSRGDL

SEQ ID NO: 14179 - protein, 556 aa, Homo sapiens
MEEPPLLPGENIKDMAKDVTYICPFTGAVRGTLTVTNYRLYFKSMERDPPFVLDASLGVINRVEKIGGASSRGENSYGLETVCKDIRNLRFAHKPEGRTRRSIFENLMKYAFPVSNNLPLFAFEYKEVFPENGWKLYDPLLEYRRQGIPNESWRITKINERYELCDTYPALLVVPANIPDEELKRVASFRSRGRIPVLSWIHPESQATITRCSQPMVGVSGKRSKEDEKYLQAIMDSNAQSHKIFIFDARPSVNAVANKAKGGGYESEDAYQNAELVFLDIHNIHVMRESLRKLKEIVYPNIEETHWLSNLESTHWLEHIKLILAGALRIADKVESGKTSVVVHCSDGWDRTAQLTSLAMLMLDGYYRTIRGFEVLVEKEWLSFGHRFQLRVGHGDKNHADADRSPVFLQFIDCVWQMTRQFPTAFEFNEYFLITILDHLYSCLFGTFLCNSEQQRGKENLPKRTVSLWSYINSQLEDFTNPLYGSYSNHVLYPVASMRHLELWVGYYIRWNPRMKPQEPIHNRYKELLAKRAELQKKVEELQREISNRSTSSSER

SEQ ID NO: 14180 - protein, 8749 aa, Homo sapiens
MATSRGASRCPRDIANVMQRLQDEQEIVQKRTFTKWINSHLAKRKPPMVVDDLFEDMKDGVKLLALLEVLSGQKLPCEQGRRMKRIHAVANIGTALKFLEGRKSMHRGSPIKLVNINSTDIADGRPSIVLGLMWTIILYFQIEELTSNLPQLQSLSSSASSVDSIVSSETPSPPSKRKVTTKIQGNAKKALLKWVQYTAGKQTGIEVKDFGKSWRSGVAFHSVIHAIRPELVDLETVKGRSNRENLEDAFTIAETELGIPRLLDPEDVDVDKPDEKSIMTYVAQFLKHYPDIHNASTDGQEDDEILPGFPSFANSVQNFKREDRVIFKEMKVWIEQFERDLTRAQMVESNLQDKYQSFKHFRVQYEMKRKQIEHLIQPLHRDGKLSLDQALVKQSWDRVTSRLFDWHIQLDKSLPAPLGTIGAWLYRAEVALREEITVQQVHEETANTIQRKLEQHKDLLQNTDAHKRAFHEIYRTRSVNGIPVPPDQLEDMAERFHFVSSTSELHLMKMEFLELKYRLLSLLVLAESKLKSWIIKYGRRESVEQLLQNYVSFIENSKFFEQYEVTYQILKQTAEMYVKADGSVEEAENVMKFMNETTAQWRNLSVEVRSVRSMLEEVISNWDRYGNTVASLQAWLEDAEKMLNQSENAKKDFFRNLPHWIQQHTAMNDAGNFLIETCDEMVSRDLKQQLLLLNGRWRELFMEVKQYAQADEMDRMKKEYTDCVVTLSAFATEAHKKLSEPLEVSFMNVKLLIQDLEDIEQRVPVMDAQYKIITKTAHLITKESPQEEGKEMFATMSKLKEQLTKVKECYSPLLYESQQLLIPLEELEKQMTSFYDSLGKINEIITVLEREAQSSALFKQKHQELLACQENCKKTLTLIEKGSQSVQKFVTLSNVLKHFDQTRLQRQIADIHVAFQSMVKKTGDWKKHVETNSRLMKKFEESRAELEKVLRIAQEGLEEKGDPEELLRRHTEFFSQLDQRVLNAFLKACDELTDILPEQEQQGLQEAVRKLHKQWKDLQGEAPYHLLHLKIDVEKNRFLASVEECRTELDRETKLMPQEGSEKIIKEHRVFFSDKGPHHLCEKRLQLIEELCVKLPVRDPVRDTPGTCHVTLKELRAAIDSTYRKLMEDPDKWKDYTSRFSEFSSWISTNETQLKGIKGEAIDTANHGEVKRAVEEIRNGVTKRGETLSWLKSRLKVLTEVSSENEAQKQGDELAKLSSSFKALVTLLSEVEKMLSNFGDCVQYKEIVKNSLEELISGSKEVQEQAEKILDTENLFEAQQLLLHHQQKTKRISAKKRDVQQQIAQAQQGEGGLPDRGHEELRKLESTLDGLERSRERQERRIQVTLRKWERFETNKETVVRYLFQTGSSHERFLSFSSLESLSSELEQTKEFSKRTESIAVQAENLVKEASEIPLGPQNKQLLQQQAKSIKEQVKKLEDTLEEDIKTMEMVKTKWDHFGSNFETLSVWITEKEKELNALETSSSAMDMQISQIKVTIQEIESKLSSIVGLEEEAQSFAQFVTTGESARIKAKLTQIRRYGEELREHAQCLEGTILGHLSQQQKFEENLRKIQQSVSEFEDKLAVPIKICSSATETYKVLQEHMDLCQALESLSSAITAFSASARKVVNRDSCVQEAAALQQQYEDILRRAKERQTALENLLAHWQRLEKELSSFLTWLERGEAKASSPEMDISADRVKVEGELQLIQALQNEVVSQASFYSKLLQLKESLFSVASKDDVKMMKLHLEQLDERWRDLPQIINKRINFLQSVVAEHQQFDELLLSFSVWIKLFLSELQTTSEISIMDHQVALTRHKDHAAEVESKKGELQSLQGHLAKLGSLGRAEDLHLLQGKAEDCFQLFEEASQVVERRQLALSHLAEFLQSHASLSGILRQLRQTVEATNSMNKNESDLIEKDLNDALQNAKALESAAVSLDGILSKAQYHLKIGSSEQRTSCRATADQLCGEVERIQNLLGTKQSEADALAVLKKAFQDQKEELLKSIEDIEERTDKERLKEPTRQALQQRLRVFNQLEDELNSHEHELCWLKDKAKQIAQKDVAFAPEVDREINRLEVTWDDTKRLIHENQGQCCGLIDLMREYQNLKSAVSKVLENASSVIVTRTTIKDQEDLKWAFSKHETAKNKMNYKQKDLDNFTSKGKHLLSELKKIHSSDFSLVKTDMESTVDKWLDVSEKLEENMDRLRVSLSIWDDVLSTRDEIEGWSNNCVPQMAENISNLDNHLRAEELLKEFESEVKNKALRLEELHSKVNDLKELTKNLETPPDLQFIEADLMQKLEHAKEITEVAKGTLKDFTAQSTQVEKFINDITTWFTKVEESLMNCAQNETCEALKKVKDIQKELQSQQSNISSTQENLNSLCRKYHSAELESLGRAMTGLIKKHEAVSQLCSKTQASLQESLEKHFSESMQEFQEWFLGAKAAAKESSDRTGDSKVLEAKLHDLQNILDSVSDGQSKLDAVTQEGQTLYAHLSKQIVSSIQEQITKANEEFQAFLKQCLKDKQALQDCASELGSFEDQHRKLNLWIHEMEERFNTENLGESKQHIPEKKNEVHKVEMFLGELLAARESLDKLSQRGQLLSEEGHGAGQEGRLCSQLLTSHQNLLRMTKEKLRSCQVALQEHEALEEALQSMWFWVKAIQDRLACAESTLGSKDTLEKRLSQIQDILLMKGEGEVKLNMAIGKGEQALRSSNKEGQRVIQTQLETLKEVWADIMSSSVHAQSTLESVISQWNDYVERKNQLEQWMESVDQKIEHPLQPQPGLKEKFVLLDHLQSILSEAEDHTRALHRLIAKSRELYEKTEDESFKDTAQEELKTQFNDIMTVAKEKMRKVEEIVKDHLMYLDAVHEFTDWLHSAKEELHRWSDMSGDSSATQKKLSKIKELIDSREIGASRLSRVESLAPEVKQNTTASGCELMHTEMQALRADWKQWEDSVFQTQSCLENLVSQMALSEQEFSGQVAQLEQALEQFSALLKTWAQQLTLLEGKNTDEEIVECWHKGQEILDALQKAEPRTEDLKSQLNELCRFSRDLSTYSGKVSGLIKEYNCLCLQASKGCQNKEQILQQRFRKAFRDFQQWLVNAKITTAKCFDIPQNISEVSTSLQKIQEFLSESENGQHKLNMMLSKGELLSTLLTKEKAKGIQAKVTAAKEDWKNFHSNLHQKESALENLKIQMKDFEVSAEPIQDWLSKTEKMVHESSNRLYDLPAKRREQQKLQSVLEEIHCYEPQLNRLKEKAQQLWEGQAASKSFRHRVSQLSSQYLALSNLTKEKVSRLDRIVAEHNQFSLGIKELQDWMTDAIHMLDSYCHPTSDKSVLDSRTLKLEALLSVKQEKEIQMKMIVTRGESVLQNTSPEGIPTIQQQLQSVKDMWASLLSAGIRCKSQLEGALSKWTSYQDGVRQFSGWMDSMEANLNESERQHAELRDKTTMLGKAKLLNEEVLSYSSLLETIEVKGAGMTEHYVTQLELQDLQERYRAIQERAKEAVTKSEKLVRLHQEYQRDLKAFEVWLGQEQEKLDQYSVLEGDAHTHETTLRDLQELQVHCAEGQALLNSVLHTREDVIPSGIPQAEDRALESLRQDWQAYQHRLSETRTQFNNVVNKLRLMEQKFQQVDEWLKTAEEKKWHEEVTAYRDEVEEVGARAQEILDESHVNSRMGCQATQLTSRYQALLLQVLEQIKFLEEEIQSLEESESSLSSYSDWYGSTHKNFKNVATKIDKVDTVMMGKKLKTLEVLLKDMEKGHSLLKSAREKGERAVKYLEEGEAERLRKEIHDHMEQLKELTSTVRKEHMTLEKGLHLAKEFSDKCKALTQWIAEYQEILHVPEEPKMELYEKKAQLSKYKSLQQTVLSHEPSVKSVREKGEALLELVQDVTLKDKIDQLQSDYQDLCSIGKAMMEEIAGFEDRLNNLQMKGDTLIGQCADHLQAKLKQNVHAHLQGTKDSYSAICSTAQRMYQSLEHELQKHVSRQDTLQQCQAWLSAVQPDLEPSPQPPLSRAEAIKQVKHFRALQEQARTYLDLLCSMCDLSNASVKTTAKDIQQTEQTIEQKLVQAQNLTQGWEEIKHLKSELWIYLQDADQQLQNMKRRHSELELNIAQNMVSQVKDFVKKLQSKQASVNTIIEKVNKLTKKEESPEHKEINHLNDQWLDLCRQSNNLCLQREEDLQRTRDYHDCMNVVEVFLEKFTTEWDNLARSDAESTAVHLEALKKLALALQERKYAIEDLKDQKQKMIEHLNLDDKELVKEQTSHLEQRWFQLEDLIKRKIQVSVTNLEELNVVQSRFQELMEWAEEQQPNIAEALKQSPPPDMAQNLLMDHLAICSELEAKQMLLKSLIKDADRVMADLGLNERQVIQKALSDAQSHVNCLSDLVGQRRKYLNKALSEKTQFLMAVFQATSQIQQHERKIMFREHICLLPDDVSKQVKTCKSAQASLKTYQNEVTGLWAQGRELMKEVTEQEKSEVLGKLQELQSVYDSVLQKCSHRLQELEKNLVSRKHFKEDFDKACHWLKQADIVTFPEINLMNESSELHTQLAKYQNILEQSPEYENLLLTLQRTGQTILPSLNEVDHSYLSEKLNALPRQFNVIVALAKDKFYKVQEAILARKEYASLIELTTQSLSELEAQFLRMSKVPTDLAVEEALSLQDGCRAILDEVAGLGEAVDELNQKKEGFRSTGQPWQPDKMLHLVTLYHRLKRQTEQRVSLLEDTTSAYQEHEKMCQQLERQLKSVKEEQSKVNEETLPAEEKLKMYHSLAGSLQDSGIVLKRVTIHLEDLAPHLDPLAYEKARHQIQSWQGELKLLTSAIGETVTECESRMVQSIDFQTEMSRSLDWLRRVKAELSGPVYLDLNLQDIQEEIRKIQIHQEEVQSSLRIMNALSHKEKEKFTKAKELISADLEHSLAELSELDGDIQEALRTRQATLTEIYSQCQRYYQVFQAANDWLEDAQELLQLAGNGLDVESAEENLKSHMEFFSTEDQFHSNLEELHSLVATLDPLIKPTGKEDLEQKVASLELRSQRMSRDSGAQVDLLQRCTAQWHDYQKAREEVIELMNDTEKKLSEFSLLKTSSSHEAEEKLSEHKALVSVVNSFHEKIVALEEKASQLEKTGNDASKATLSRSMTTVWQRWTRLRAVAQDQEKILEDAVDEWTGFNNKVKKATEMIDQLQDKLPGSSAEKASKAELLTLLEYHDTFVLELEQQQSALGMLRQQTLSMLQDGAAPTPGEEPPLMQEITAMQDRCLNMQEKVKTNGKLVKQELKDREMVETQINSVKCWVQETKEYLGNPTIEIDAQLEELQILLTEATNHRQNIEKMAEEQKEKYLGLYTILPSELSLQLAEVALDLKIRDQIQDKIKEVEQSKATSQELSRQIQKLAKDLTTILTKLKAKTDNVVQAKTDQKVLGEELDGCNSKLMELDAAVQKFLEQNGQLGKPLAKKIGKLTELHQQTIRQAENRLSKLNQAASHLEEYNEMLELILKWIEKAKVLAHGTIAWNSASQLREQYILHQTLLEESKEIDSELEAMTEKLQYLTSVYCTEKMSQQVAELGRETEELRQMIKIRLQNLQDAAKDMKKFEAELKKLQAALEQAQATLTSPEVGRLSLKEQLSHRQHLLSEMESLKPKVQAVQLCQSALRIPEDVVASLPLCHAALRLQEEASRLQHTAIQQCNIMQAAVVQYEQYEQEMKHLQQLIEGAHREIEDKPVATSNIQELQAQISRHEELAQKIKGYQEQIASLNSKCKMLTMKAKHATMLLTVTEVEGLAEGTEDLDGELLPTPSAHPSVVMMTAGRCHTLLSPVTEESGEEGTNSEISSPPACRSPSPVANTDASVNQDIAYYQALSAERLQTDAAKIHPSTSASQEFYEPGLEPSATAKLGDLQRSWETLKNVISEKQRTLYEALERQQKYQDSLQSISTKMEAIELKLSESPEPGRSPESQMAEHQALMDEILMLQDEINELQSSLAEELVSESCEADPAEQLALQSTLTVLAERMSTIRMKASGKRQLLEEKLNDQLEEQRQEQALQRYRCEADELDSWLLSTKATLDTALSPPKEPMDMEAQLMDCQNMLVEIEQKVVALSELSVHNENLLLEGKAHTKDEAEQLAGKLRRLKGSLLELQRALHDKQLNMQGTAQEKEESDVDLTATQSPGVQEWLAQARTTWTQQRQSSLQQQKELEQELAEQKSLLRSVASRGEEILIQHSAAETSGDAGEKPDVLSQELGMEGEKSSAEDQMRMKWESLHQEFSTKQKLLQNVLEQEQEQVLYSRPNRLLSGVPLYKGDVPTQDKSAVTSLLDGLNQAFEEVSSQSGGAKRQSIHLEQKLYDGVSATSTWLDDVEERLFVATALLPEETETCLFNQEILAKDIKEMSEEMDKNKNLFSQAFPENGDNRDVIEDTLGCLLGRLSLLDSVVNQRCHQMKERLQQILNFQNDLKVLFTSLADNKYIILQKLANVFEQPVAEQIEAIQQAEDGLKEFDAGIIELKRRGDKLQVEQPSMQELSKLQDMYDELMMIIGSRRSGLNQNLTLKSQYERALQDLADLLETGQEKMAGDQKIIVSSKEEIQQLLDKHKEYFQGLESHMILTETLFRKIISFAVQKETQFHTELMAQASAVLKRAHKRGVELEYILETWSHLDEDQQELSRQLEVVESSIPSVGLVEENEDRLIDRITLYQHLKSSLNEYQPKLYQVLDDGKRLLISISCSDLESQLNQLGECWLSNTNKMSKELHRLETILKHWTRYQSESADLIHWLQSAKDRLEFWTQQSVTVPQELEMVRDHLNAFLEFSKEVDAQSSLKSSVLSTGNQLLRLKKVDTATLRSELSRIDSQWTDLLTNIPAVQEKLHQLQMDKLPSRHAISEVMSWISLMENVIQKDEDNIKNSIGYKAIHEYLQKYKGFKIDINCKQLTVDFVNQSVLQISSQDVESKRSDKTDFAEQLGAMNKSWQILQGLVTEKIQLLEGLLESWSEYENNVQCLKTWFETQEKRLKQQHRIGDQASVQNALKDCQDLEDLIKAKEKEVEKIEQNGLALIQNKKEDVSSIVMSTLRELGQTWANLDHMVGQLKILLKSVLDQWSSHKVAFDKINSYLMEARYSLSRFRLLTGSLEAVQVQVDNLQNLQDDLEKQERSLQKFGSITNQLLKECHPPVTETLTNTLKEVNMRWNNLLEEIAEQLQSSKALLQLWQRYKDYSKQCASTVQQQEDRTNELLKAATNKDIADDEVATWIQDCNDLLKGLGTVKDSLFFLHELGEQLKQQVDASAASAIQSDQLSLSQHLCALEQALCKQQTSLQAGVLDYETFAKSLEALEAWIVEAEEILQGQDPSHSSDLSTIQERMEELKGQMLKFSSMAPDLDRLNELGYRLPLNDKEIKRMQNLNRHWSLISSQTTERFSKLQSFLLQHQTFLEKCETWMEFLVQTEQKLAVEISGNYQHLLEQQRAHELFQAEMFSRQQILHSIIIDGQRLLEQGQVDDRDEFNLKLTLLSNQWQGVIRRAQQRRGIIDSQIRQWQRYREMAEKLRKWLVEVSYLPMSGLGSVPIPLQQARTLFDEVQFKEKVFLRQQGSYILTVEAGKQLLLSADSGAEAALQAELAEIQEKWKSASMRLEEQKKKLAFLLKDWEKCEKGIADSLEKLRTFKKKLSQSLPDHHEELHAEQMRCKELENAVGSWTDDLTQLSLLKDTLSAYISADDISILNERVELLQRQWEELCHQLSLRRQQIGERLNEWAVFSEKNKELCEWLTQMESKVSQNGDILIEEMIEKLKKDYQEEIAIAQENKIQLQQMGERLAKASHESKASEIEYKLGKVNDRWQHLLDLIAARVKKLKETLVAVQQLDKNMSSLRTWLAHIESELAKPIVYDSCNSEEIQRKLNEQQELQRDIEKHSTGVASVLNLCEVLLHDCDACATDAECDSIQQATRNLDRRWRNICAMSMERRLKIEETWRLWQKFLDDYSRFEDWLKSSERTAAFPSSSGVIYTVAKEELKKFEAFQRQVHECLTQLELINKQYRRLARENRTDSACSLKQMVHEGNQRWDNLQKRVTSILRRLKHFIGQREEFETARDSILVWLTEMDLQLTNIEHFSECDVQAKIKQLKAFQQEISLNHNKIEQIIAQGEQLIEKSEPLDAAIIEEELDELRRYCQEVFGRVERYHKKLIRLPLPDDEHDLSDRELELEDSAALSDLHWHDRSADSLLSPQPSSNLSLSLAQPLRSERSGRDTPASVDSIPLEWDHDYDLSRDLESAMSRALPSEDEEGQDDKDFYLRGAVGLSDVMIPESPEAYVKLTENAIKNTSGDHSALESQIRQLGKALDDSRFQIQQTENIIRSKTPTGPELDTSYKGYMKLLGECSSSIDSVKRLEHKLKEEEESLPGFVNLHSTETQTAGVIDRWELLQAQALSKELRMKQNLQKWQQFNSDLNSIWAWLGDTEEELEQLQRLELSTDIQTIELQIKKLKELQKAVDHRKAIILSINLCSPEFTQADSKESRDLQDRLSQMNGRWDRVCSLLEEWRGLLQDALMQCQGFHEMSHGLLLMLENIDRRKNEIVPIDSNLDAEILQDHHKQLMQIKHELLESQLRVASLQDMSCQLLVNAEGTDCLEAKEKVHVIGNRLKLLLKEVSRHIKELEKLLDVSSSQQDLSSWSSADELDTSGSVSPTSGRSTPNRQKTPRGKCSLSQPGPSVSSPHSRSTKGGSDSSLSEPGPGRSGRGFLFRVLRAALPLQLLLLLLIGLACLVPMSEEDYSCALSNNFARSFHPMLRYTNGPPPL

SEQ ID NO: 14181 - protein, 391 aa, Homo sapiens
MKLITILFLCSRLLLSLTQESQSEEIDCNDKDLFKAVDAALKKYNSQNQSNNQFVLYRITEATKTVGSDTFYSFKYEIKEGDCPVQSGKTWQDCEYKDAAKAATGECTATVGKRSSTKFSVATQTCQITPAEGPVVTAQYDCLGCVHPISTQSPDLEPILRHGIQYFNNNTQHSSLFMLNEVKRAQRQDTGECTDNAYIDIQLRIASFSQNCDIYPGKDFVQPPTKICVGCPRDIPTNSPELEETLTHTITKLNAENNATFYFKIDNVKKARVQVVAGKKYFIDFVARETTCSKESNEELTESCETKKLGQSLDCNAEVYVVPWEKKIYPTVNCQPLGMISLMKRPPGFSPFRSSRIGEIKEETTSHLRSCEYKGRPPKAGAEPASEREVS

SEQ ID NO: 14182 - protein, 432 aa, Homo sapiens
MILLRASEVRQLLHNKFVVILGDSVHRAVYKDLVLLLQKDRLLTPGQLRARGELNFEQDELVDGGQRGHMHNGLNYREVREFRSDHHLVRFYFLTRVYSDYLQTILKELQSGEHAPDLVIMNSCLWDISRYGPNSWRSYLENLENLFQCLGQVLPESCLLVWNTAMPVGEEVTGGFLPPKLRRQKATFLKNEVVKANFHSATEARKHNFDVLDLHFHFRHARENLHWDGVHWNGRVHRCLSQLLLAHVADAWGVELPHRHPVGEWIKKKKPGPRVEGPPQANRNHPALPLSPPLPSPTYRPLLGFPPQRLPLLPLLSPQPPPPILHHQGMPRFPQGPPDACFSSDHTFQSDQFYCHSDVPSSAHAGFFVEDNFMVGPQLPMPFFPTPRYQRPAPVVHRGFGRYRPRGPYTPWGQRPRPSKRRAPANPEPRPQ

SEQ ID NO: 14183 - protein, 781 aa, Homo sapiens
MAVAEVSRTCLLTVRVLQAHRLPSKDLVTPSDCYVTLWLPTACSHRLQTRTVKNSSSPVWNQSFHFRIHRQLKNVMELKVFDQDLVTGDDPVLSVLFDAGTLRAGEFRRESFSLSPQGEGRLEVEFRLQSLADRGEWLVSNGVLVARELSCLHVQLEETGDQKSSEHRVQLVVPGSCEGPQEASVGTGTFRFHCPACWEQELSIRLQDAPEEQLKAPLSALPSGQVVRLVFPTSQEPLMRVELKKEAGLRELAVRLGFGPCAEEQAFLSRRKQVVAAALRQALQLDGDLQEDEIPVVAIMATGGGIRAMTSLYGQLAGLKELGLLDCVSYITGASGSTWALANLYEDPEWSQKDLAGPTELLKTQVTKNKLGVLAPSQLQRYRQELAERARLGYPSCFTNLWALINEALLHDEPHDHKLSDQREALSHGQNPLPIYCALNTKGQSLTTFEFGEWCEFSPYEVGFPKYGAFIPSELFGSEFFMGQLMKRLPESRICFLEGIWSNLYAANLQDSLYWASEPSQFWDRWVRNQANLDKEQVPLLKIEEPPSTAGRIAEFFTDLLTWRPLAQATHNFLRGLHFHKDYFQHPHFSTWKATTLDGLPNQLTPSEPHLCLLDVGYLINTSCLPLLQPTRDVDLILSLDYNLHGAFQQLQLLGRFCQEQGIPFPPISPSPEEQLQPRECHTFSDPTCPGAPAVLHFPLVSDSFREYSAPGVRRTPEEAAAGEVNLSSSDSPYHYTKVTYSQEDVDKLLHLTHYNVCNNQEQLLEALRQAVQRRRQRRPH

SEQ ID NO: 14184 - protein, 707 aa, Homo sapiens
MPVPWFLLSLALGRSPVVLSLERLVGPQDATHCSPGLSCRLWDSDILCLPGDIVPAPGPVLAPTHLQTELVLRCQKETDCDLCLRVAVHLAVHGHWEEPEDEEKFGGAADSGVEEPRNASLQAQVVLSFQAYPTARCVLLEVQVPAALVQFGQSVGSVVYDCFEAALGSEVRIWSYTQPRYEKELNHTQQLPDCRGLEVWNSIPSCWALPWLNVSADGDNVHLVLNVSEEQHFGLSLYWNQVQGPPKPRWHKNLTGPQIITLNHTDLVPCLCIQVWPLEPDSVRTNICPFREDPRAHQNLWQAARLQLLTLQSWLLDAPCSLPAEAALCWRAPGGDPCQPLVPPLSWENVTVDKVLEFPLLKGHPNLCVQVNSSEKLQLQECLWADSLGPLKDDVLLLETRGPQDNRSLCALEPSGCTSLPSKASTRAARLGEYLLQDLQSGQCLQLWDDDLGALWACPMDKYIHKRWALVWLACLLFAAALSLILLLKKDHAKAAARGRAALLLYSADDSGFERLVGALASALCQLPLRVAVDLWSRRELSAQGPVAWFHAQRRQTLQEGGVVVLLFSPGAVALCSEWLQDGVSGPGAHGPHDAFRASLSCVLPDFLQGRAPGSYVGACFDRLLHPDAVPALFRTVPVFTLPSQLPDFLGALQQPRAPRSGRLQERAEQVSRALQPALDSYFHPPGTPAPGRGVGPGAGPGAGDGT

SEQ ID NO: 14185 - protein, 1055 aa, Homo sapiens
FFSFIEGCLVKNYMQRPSTEQLLKHPFIRDQPNERQVRIQLKDHIDRTRKKRGEKDETEYEYSGSEEEEEEVPEQEGEPSSIVNVPGESTLRRDFLRLQQENKERSEALRRQQLLQEQQLREQEEYKRQLLAERQKRIEQQKEQRRRLEEQQRREREARRQQEREQRRREQEEKRRLEELERRRKEEEERRRAEEEKRRVEREQEYIRRQLEEEQRHLEVLQQQLLQEQAMLLECRWREMEEHRQAERLQRQLQQEQAYLLSLQHDHRRPHPQHSQQPPPPQQERSKPSFHAPEPKAHYEPADRAREVEDRFRKTNHSSPEAQSKQTGRVLEPPVPSRSESFSNGNSESVHPALQRPAEPQVQWSHLASLKNNVSPVSRSHSFSDPSPKFAHHHLRSQDPCPPSRSEVLSQSSDSKSEAPDPTQKAWSRSDSDEVPPRVPVRTTSRSPVLSRRDSPLQGSGQQNSQAGQRNSTSIEPRLLWERVEKLVPRPGSGSSSGSSNSGSQPGSHPGSQSGSGERFRVRSSSKSEGSPSQRLENAVKKPEDKKEVFRPLKPADLTALAKELRAVEDVRPPHKVTDYSSSSEESGTTDEEDDDVEQEGADESTSGPEDTRAASSLNLSNGETESVKTMIVHDDVESEPAMTPSKEGTLIVRQTQSASSTLQKHKSSSSFTPFIDPRLLQISPSSGTTVTSVVGFSCDGMRPEAIRQDPTRKGSVVNVNPTNTRPQSDTPEIRKYKKRFNSEILCAALWGVNLLVGTESGLMLLDRSGQGKVYPLINRRRFQQMDVLEGLNVLVTISGKKDKLRVYYLSWLRNKILHNDPEVEKKQGWTTVGDLEGCVHYKVVKYERIKFLVIALKSSVEVYAWAPKPYHKFMAFKSFGELVHKPLLVDLTVEEGQRLKVIYGSCAGFHAVDVDSGSVYDIYLPTHIQCSIKPHAIIILPNTDGMELLVCYEDEGVYVNTYGRITKDVVLQWGEMPTSVAYIRSNQTMGWGEKAIEIRSVETGHLDGVFMHKRAQRLKFLCERNDKVFFASVRSGGSSQVYFMTLGRTSLLSW

SEQ ID NO: 14186 - protein, 1591 aa, Homo sapiens
MKLYVFLVNTGTTLTFDTELTVQTVADLKHAIQSKYKIAIQHQVLVVNGGECMAADRRVCTYSAGTDTNPIFLFNKEMILCDRPPAIPKTTFSTENDMEIKVEESLMMPAVFHTVASRTQLALEMYEVAKKLCSFCEGLVHDEHLQHQGWAAIMANLEDCSNSYQKLLFKFESIYSNYLQSIEDIKLKLTHLGTAVSVMAKIPLLECLTRHSYRECLGRLDSLPEHEDSEKAEMKRSTELVLSPDMPRTTNESLLTSFPKSVEHVSPDTADAESGKEIRESCQSTVHQQDETTIDTKDGDLPFFNVSLLDWINVQDRPNDVESLVRKCFDSMSRLDPRIIRPFIAECRQTIAKLDNQNMKAIKGLEDRLYALDQMIASCGRLVNEQKELAQGFLANQKRAENLKDASVLPDLCLSHANQLMIMLQNHRKLLDIKQKCTTAKQELANNLHVRLKWCCFVMLHADQDGEKLQALLRLVIELLERVKIVEALSTVPQMYCLAVVEVVRRKMFIKHYREWAGALVKDGKRLYEAEKSKRESFGKLFRKSFLRNRLFRGLDSWPPSFCTQKPRKFDCELPDISLKDLQFLQSFCPSEVQPFLRVPLLCDFEPLHQHVLALHNLVKAAQSLDEMSQTITDLLSEQKASVSQTSPQSASSPRMESTAGITTTTSPRTPPPLTVQDPLCPAVCPLEELSPDSIDAHTFDFETIPHPNIEQTIHQVSLDLDSLAESPESDFMSAVNEFVIEENLSSPNPISDPQSPEMMVESLYSSVINAIDSRRMQDTNVCGKEDFGDHTSLNVQLERCRVVAQDSHFSIQTIKEDLCHFRTFVQKEQCDFSNSLKCTAVEIRNIIEKVKCSLEITLKEKHQKELLSLKNEYEGKLDGLIKETEENENKIKKLKGELVCLEEVLQNKDNEFALVKHEKEAVICLQNEKDQKLLEMENIMHSQNCEIKELKQSREIVLEDLKKLHVENDEKLQLLRAELQSLEQSHLKELEDTLQVRHIQEFEKVMTDHRVSLEELKKENQQIINQIQESHAEIIQEKEKQLQELKLKVSDLSDTRCKLEVELALKEAETDEIKILLEESRAQQKETLKSLLEQETENLRTEISKLNQKIQDNNENYQVGLAELRTLMTIEKDQCISELISRHEEESNILKAELNKVTSLHNQAFEIEKNLKEQIIELQSKLDSELSALERQKDEKITQQEEKYEAIIQNLEKDRQKLVSSQEQDREQLIQKLNCEKDEAIQTALKEFKLEREVVEKELLEKVKHLENQIAKSPAIDSTRGDSSSLVAELQEKLQEEKAKFLEQLEEQEKRKNEEMQNVRTSLIAEQQTNFNTVLTREKMRKENIINDLSDKLKSTMQQQERDKDLIESLSEDRARLLEEKKKLEEEVSKLRSSSFVPSPYVATAPELYGACAPELPGESDRSAVETADEGRVDSAMETSMMSVQENIHMLSEEKQRIMLLERTLQLKEEENKRLNQRLMSQSMSSVSSRHSEKIAIRDFQVGDLVLIILDERHDNYVLFTVSPTLYFLHSESLPALDLKPASGASRRPWVLGKVMEKEYCQAKKAQNRFKVPLGTKFYRVKAVSWNKKV

SEQ ID NO: 14187 - protein, 1888 aa, Homo sapiens; identical to SEQ ID NO: 2399

SEQ ID NO: 14188 - protein, 293 aa, Homo sapiens
MVNRAKRKAGVDPLVPLRSLGLSLSGGDQEDAGRILIEELRDRFPYLSESYLITTDAAGSIATATPDGGVVLISGTGSNCRLINPDGSESGCGGWGHMMGDEGSAYWIAHQAVKIVFDSIDNLEAAPHDIGYVKQAMFHYFQVPDRLGILTHLYRDFDKCRFAGFCRKIAEGAQQGDPLSRYIFRKAGEMLGRHIVAVLPEIDPVLFQGKIGLPILCVGSVWKSWELLKEGFLLALTQGREIQAQNFFSSFTLMKLRHSSALGGASLGARHIGHLLPMDYSANAIAFYSYTFS

SEQ ID NO: 14189 - protein, 1078 aa, Homo sapiens
MDAAGRGCHLLPLPAARGPARAPAAAAAAAASPPGPCSGAACAPSAAAGAGAMNPSSSAGEEKGATGGSSSSGSGAGSCCLGAEGGADPRGAGSAAAAGAAALDEPAAAGQKEKDEALEEKLRNLTFRKQVSYRKAISRAGLQHLAPAHPLSLPVANGPAKEPRATLDWSENAVNGEHLWLETNVSGDLCYLGEENCQVRFAKSALRRKCAVCKIVVHTACIEQLEKINFRCKPTFREGGSRSPRENFVRHHWVHRRRQEGKCKQCGKGFQQKFSFHSKEIVAISCSWCKQAFHNKVTCFMLHHIEEPCSLGAHAAVIVPPTWIIKVKKPQNSLKASNRKKKRTSFKRKASKRGMEQENKGRPFVIKPISSPLMKPLLVFVNPKSGGNQGTKVLQMFMWYLNPRQVFDLSQEGPKDALELYRKVPNLRILACGGDGTVGWILSILDELQLSPQPPVGVLPLGTGNDLARTLNWGGGYTDEPVSKILCQVEDGTVVQLDRWNLHVERNPDLPPEELEDGVCKLPLNVFNNYFSLGFDAHVTLEFHESREANPEKFNSRFRNKMFYAGAAFSDFLQRSSRDLSKHVKVVCDGTDLTPKIQELKFQCIVFLNIPRYCAGTMPWGNPGDHHDFEPQRHDDGYIEVIGFTMASLAALQVGGHGERLHQCREVMLLTYKSIPMQVDGEPCRLAPAMIRISLRNQANMVQKSKRRTSMPLLNDIHQVQTADLRRVSAPPGSFTIPQSVPDRLRIRVNKISLQDYEGFHYDKEKLREASIPLGILVVRGDCDLETCRMYIDRLQEDLQSVSSGSQRVHYQDHETSFPRALSAQRLSPRWCFLDATSADRFYRIDRSQEHLHFVMEISQDEIFILDPDMVVSQPAGTPPGMPDLVVEQASGISDWWNPALRKRMLSDSGLGMIAPYYEDSDLKDLSHSRVLQSPVSSEDHAILQAVIAGDLMKLIESYKNGGSLLIQGPDHCSLLHYAAKTGNGEIVKYILDHGPSELLDMADSETGETALHKAACQRNRAVCQLLVDAGASLRKTDSKGKTPQERAQQAGDPDLAAYLESRQNYKVIGHEDLETAV

SEQ ID NO: 14190 - protein, 782 aa, Homo sapiens
MARQVRTHQETLNRFQQQSIHLLTELLRLKMKAMVESMSVGANPLDITRRFVEASQLLHLNAKEMAFNCLISTAGRSGYSSGQLWKESLANMSAIGVNSPYQLIYHSSTACLSFSLSAGKEAKKKIGKSRTTEDVSMPPLHRGVGTPANSLEFSDPCPEAREKLQELCRHIEAERATWKGRNISYPMILRNYKAKMPSHLMLARKGDSQTPGLHYPPTAGAQTLSPTSHPSSANHHFSQHCQEGKAPKKAFKFHYTFYDGSSFVYYPSGNVAVCQIPTCCRGRTITCLFNDIPGFSLLALFNTEGQGCVHYNLKTSCPYVLILDEEGGTTNDQQGYVVHKWSWTSRTETLLSLEYKVNEEMKLKVLGQDSITVTFTSLNETVTLTVSANNCPHGMAYDKRLNRRISNMDDKVYKMSRALAEIKKRFQKTVTQFINSILLAAGLFTIEYPTKKEEEEFVRFKMRSRTHPERLPKLSLYSGESLLRSQSGHLESSIAETLKDEPESAPVSPVRKTTKIHTKAKVTSRGKAREGRSPTRWAALPSDCPLVLRKLMLKEDTRAGCKCLVKAPLVSDVELERFLLAPRDPSQVLVFGIISSQNYTSTGQLQWLLNTLYNHQQRGRGSPCIQCRYDSYRLLQYDLDSPLQEDPPLMVKKNSVVQGMILMFAGGKLIFGGRVLNGYGLSKQNLLKQIFRSQQDYKMGYFLPDDYKFSVPNSVLSLEDSESVKKAESEDIQGSSSSLALEDYVEKELSLEAEKTREPEVELHPLSRDSKITSWKKQASKK

SEQ ID NO: 14191 - protein, 313 aa, Homo sapiens
MANLSQPSEFVLLGFSSFGELQALLYGPFLMLYLLAFMGNTIIIVMVIADTHLHTPMYFFLGNFSLLEILVTMTAVPRMLSDLLVPHKVITFTGCMVQFYFHFSLGSTSFLILTDMALDRFVAICHPLRYGTLMSRAMCVQLAGAAWAAPFLAMVPTVLSRAHLDYCHGDVINHFFCDNEPLLQLSCSDTRLLEFWDFLMALTFVLSSFLVTLISYGYIVTTVLRIPSASSCQKAFSTCGSHLTLVFIGYSSTIFLYVRPGKAHSVQVRKVVALVTSVLTPFLNPFILTFCNQTVKTVLQGQMQRLKGLCKAQ

SEQ ID NO: 14192 - protein, 782 aa, Homo sapiens
MATAAVLRGPAAHWVESFQKAREEGSGSGTWRGRWRRRSVISFGSKNRTIGVAAKNQQITHANNTVSNFKRFHGRAFNDPFIQKEKENLSYDLVPLKNGGVGIKVMYMGEEHLFSVEQITAMLLTKLKETAENSLKKPVTDCVISVLGTAFDPFLGGKNFDEKLVEHFCAEFKTKYKLDAKSKIRALLRLYQECEKLKKLMSSNSTDLPLNIECFMNDKDVSGKMNRSQFEELCAELLQKIEVPLYSLLEQTHLKVEDVSAVEIVGGATRIPAVKERIAKFFGKDISTTLNADEAVARGCALQCAILSPAFKVREFSVTDAVPFPISLIWNHDSEDTEGVHEVFSRNHAAPFSKVLTFLRRGPFELEAFYSDPQGVPYPEAKIGRFVVQNVSAQKDGEKSRVKVKVRVNTHGIFTISTASMVEKVPTEENEMSSEADMECLNQRPPENPDTDKNVQQDNSEAGTQPQVQTDAQQTSQSPPSPELTSEENKIPDADKANEKKVDQPPEAKKPKIKVVNVELPIEANLVWQLGKDLLNMYIETEGKMIMQDKLEKERNDAKNAVEEYVYEFRDKLCGPYEKFICEQDHQNFLRLLTETEDWLYEEGEDQAKQAYVDKLEELMKIGTPVKVRFQEAEERPKMFEELGQRLQHYAKIAADFRNKDEKYNHIDESEMKKVEKSVNEVMEWMNNVMNAQAKKSLDQDPVVRAQEIKTKIKELNNTCEPVVTQPKPKIESPKLERTPNGPNIDKKEEDLEDKNNFGAEPPHQNGECYPNEKNSVNMDLD

SEQ ID NO: 14193 - protein, 1186 aa, Homo sapiens
MEVDTEEKRHRTRSKGVRVPVEPAIQELFSCPTPGCDGSGHVSGKYARHRSVYGCPLAKKRKTQDKQPQEPAPKRKPFAVKADSSSVDECDDSDGTEDMDEKEEDEGEEYSEDNDEPGDEDEEDEEGDREEEEEIEEEDEDDDEDGEDVEDEEEEEEEEEEEEEEEENEDHQMNCHNTRIMQDTEKDDNNNDEYDNYDELVAKSLLNLGKIAEDAAYRARTESEMNSNTSNSLEDDSDKNENLGRKSELSLDLDSDVVRETVDSLKLLAQGHGVVLSENMNDRNYADSMSQQDSRNMNYVMLGKPMNNGLMEKMVEESDEEVCLSSLECLRNQCFDLARKLSETNPQERNPQQNMNIRQHVRPEEDFPGRTPDRNYSDMLNLMRLEEQLSPRSRVFASCAKEDGCHERDDDTTSVNSDRSEEVFDMTKGNLTLLEKAIALETERAKAMREKMAMEAGRRDNMRSYEDQSPRQLPGEDRKPKSSDSHVKKPYYGKDPSRTEKKESKCPTPGCDGTGHVTGLYPHHRSLSGCPHKDRVPPEILAMHESVLKCPTPGCTGRGHVNSNRNSHRSLSGCPIAAAEKLAKAQEKHQSCDVSKSSQASDRVLRPMCFVKQLEIPQYGYRNNVPTTTPRSNLAKELEKYSKTSFEYNSYDNHTYGKRAIAPKVQTRDISPKGYDDAKRYCKDPSPSSSSTSSYAPSSSSNLSCGGGSSASSTCSKSSFDYTHDMEAAHMAATAILNLSTRCREMPQNLSTKPQDLCATRNPDMEVDENGTLDLSMNKQRPRDSCCPILTPLEPMSPQQQAVMNNRCFQLGEGDCWDLPVDYTKMKPRRIDEDESKDITPEDLDPFQEALEERRYPGEVTIPSPKPKYPQCKESKKDLITLSGCPLADKSIRSMLATSSQELKCPTPGCDGSGHITGNYASHRSLSGCPRAKKSGIRIAQSKEDKEDQEPIRCPVPGCDGQGHITGKYASHRSASGCPLAAKRQKDGYLNGSQFSWKSVKTEGMSCPTPGCDGSGHVSGSFLTHRSLSGCPRATSAMKKAKLSGEQMLTIKQRASNGIENDEEIKQLDEEIKELNESNSQMEADMIKLRTQITTMESNLKTIEEENKVIEQQNESLLHELANLSQSLIHSLANIQLPHMDPINEQNFDAYVTTLTEMYTNQDRYQSPENKALLENIKQAVRGIQV

SEQ ID NO: 14194 - protein, 2265 aa, Homo sapiens
MAAEEGVASAASAGGSWGTAAMGRVLPMLLVPVPAEAMGQLGSRAQLRTQPEALGSLTAAGSLQVLSLTPGSRGGGRCCLEGPFWHFLWEDSRNSSTPTEKPKLLALGENYELLIYEFNLKDGRCDATILYSCSREALQKLIDDQDISISLLSLRILSFHNNTSLLFINKCVILHIIFPERDAAIRVLNCFTLPLPAQAVDMIIDTQLCRGILFVLSSLGWIYIFDVVDGTYVAHVDLALHKEDMCNEQQQEPAKISSFTSLKVSQDLDVAVIVSSSNSAVALNLNLYFRQHPGHLLCERILEDLPIQGPKGVDEDDPVNSAYNMKLAKFSFQIDRSWKAQLSSLNETIKNSKLEVSCCAPWFQDILHLESPESGNHSTSVQSWAFIPQDIMHGQYNVLQKDHAKTSDPGRSWKIMHISEQEEPIELKCVSVTGFTALFTWEVERMGYTITLWDLETQGMQCFSLGTKCIPVDSSGDQQLCFVLTENGLSLILFGLTQEEFLNRLMIHGSASTVDTLCHLNGWGRCSIPIHALEAGIENRQLDTVNFFLKSKENLFNPSSKSSVSDQFDHLSSHLYLRNVEELIPALDLLCSAIRESYSEPQSKHFSEQLLNLTLSFLNNQIKELFIHTEELDEHLQKGVNILTSYINELRTFMIKFPWKLTDAIDEYDVHENVPKVKESNIWKKLSFEEVIASAILNNKIPEAQTFFRIDSHSAQKLEELIGIGLNLVFDNLKKNNIKEASELLKNMGFDVKGQLLKICFYTTNKNIRDFLVEILKEKNYFSEKEKRTIDFVHQVEKLYLGHFQENMQIQSFPRYWIKEQDFFKHKSVLDSFLKYDCKDEFNKQDHRIVLNWALWWDQLTQESILLPRISPEEYKSYSPEALWRYLTARHDWLNIILWIGEFQTQHSYASLQQNKWPLLTVDVINQNTSCNNYMRNEILDKLARNGVFLASELEDFECFLLRLSRIGGVIQDTLPVQNYKTKEGWDFHSQFILYCLEHSLQHLLYVYLDCYKLSPENCPFLEKKELHEAHPWFEFLVQCRQVASNLTDPKLIFQASLANAQILIPTNQASVSSMLLEGHTLLALATTMYSPGGVSQVVQNEENENCLKKVDPQLLKMALTPYPKLKTALFPQCTPPSVLPSDITIYHLIQSLSPFDPSRLFGWQSANTLAIGDAWSHLPHFSSPDLVNKYAIVERLNFAYYLHNGRPSFAFGTFLVQELIKSKTPKQLIQQVGNEAYVIGLSSFHIPSIGAACVCFLELLGLDSLKLRVDMKVANIILSYKCRNEDAQYSFIRESVAEKLSKLADGEKTTTEELLVLLEEGTWNSIQQQEIKRLSSESSSQWALVVQFCRLHNMKLSISYLRECAKANDWLQFIIHSQLHNYHPAEVKSLIQYFSPVIQDHLRLAFENLPSVPTSKMDSDQVCNKCPQELQGSKQEMTDLFEILLQCSEEPDSWHWLLVEAVKQQAPILSVLASCLQGASAISCLCVWIITSVEDNVATEAMGHIQDSTEDHTWNLEDLSVIWRTLLTRQKSKTLIRGFQLFFKDSPLLLVMEMYELCMFFRNYKEAEAKLLEFQKSLETLNTAATKVHPVIPAMWLEDQVCFLLKLMLQQCKTQYELGKLLQLFVEREHLFSDGPDVKKLCILCQILKDTSIAINHTIITSYSIENLQHECRSILERLQTDGQFALARRVAELAELPVDNLVIKEITQEMQTLKHIEQWSLKQARIDFWKKCHENFKKNSISSKAASSFFSTQAHVACEHPTGWSSMEERHLLLTLAGHWLAQEDVVPLDKLEELEKQIWLCRITQHTLGRNQEETEPRFSRQISTSGELSFDSLASEFSFSKLAALNTSKYLELNSLPSKETCENRLDWKEQESLNFLIGRLLDDGCVHEASRVCRYFHFYNPDVALVLHCRALASGEASMEDLHPEIHALLQSAELLEEEAPDIPLRRVHSTSSLDSQKFVTVPSSNEVVTNLEVLTSKCLHGKNYCRQVLCLYDLAKELGCSYTDVAAQDGEAMLRKILASQQPDRCKRAQAFISTQGLKPDTVAELVAEEVTRELLTSSQGTGHKQMFNPTEESQTFLQLTTLCQDRTLVGMKLLDKISSVPHGELSCTTELLILAHHCFTLTCHMEGIIRVLQAAHMLTDNHLAPSEEYGLVVRLLTGIGRYNEMTYIFDLLHKKHYFEVLMRKKLDPSGTLKTALLDYIKRCRPGDSEKHNMIALCFSMCREIGENHEAAARIQLKLIESQPWDINNISLLTWSWKT

SEQ ID NO: 14195 - protein, 517 aa, Homo sapiens
MVDKTPVMCSHFAQDVWPEHSIKDSFQKVILRTYGKYGHENLQLRKDHKSVDACKVYKGGYNGLNQCLTTTDSKIFQCDKYVKVFHKFPNVNRNKIRHTGKKPFKCKNRGKSFCMLSQLTQHKKIHTREYSYKCEECGKAFNWSSTLTKHKIIHTGEKPYKCEECGKAFNRSSNLTKHKIIHTGEKPYKCEECGKAFNRSSTLTKHKRIHTEEKPYKCEECGKAFNQFSILNKHKRIHMEDKPYKCEECGKAFRVFSILKKHKIIHTGEKPYKCEECGKAFNQFSNLTKHKIIHTGEKPYKCDECGKAFNQSSTLTKHKRIHTGEKPYKCEECGKAFKQSSTLTEHKIIHTGEKPYKCEKCGKAFSWSSAFTKHKRNHMEDKPYKCEECGKAFSVFSTLTKHKIIHTREKPYKCEECGKAFNQSSIFTKHKIIHTEGKSYKCEKCGNAFNQSSNLTARKIIYTGEKPYKYEECDKAFNKFSTLITHQIIYTGEKPCKHECGRAFNKSSNYTKEKLQT

SEQ ID NO: 14196 - protein, 1296 aa, Homo sapiens
MFNPQLMIQTPKEEGANVLTTEALLQHLDSALQASRVHVYMYNRQWKLEHLCYKSGELITETGYMDQIIEYLYPCLIITPLDCFWEGAKLQSGTAYLLGKPPLRWTNFDPLEFLEELKKINYQVDSWEEMLNKAEVGHGYMDRPCLNPADPDCPATAPNKNSTKPLDMALVLNGGCHGLSRKYMHWQEELIVGGTVKNSTGKLVSAHALQTMFQLMTPKQMYEHFKGYEYVSHINWNEDKAAAILEAWQRTYVEVVHQSVAQNSTQKVLSFTTTTLDDILKSFSDVSVIRVASGYLLMLAYACLTMLRWDCSKSQGAVGLAGVLLVALSVAAGLGLCSLIGISFNAATTQVLPFLALGVGVDDVFLLAHAFSETGQNKRIPFEDRTGECLKRTGASVALTSISNVTAFFMAALIPIPALRAFSLQAAVVVVFNFAMVLLIFPAILSMDLYRREDRRLDIFCCFTSPCVSRVIQVEPQAYTDTHDNTRYSPPPPYSSHSFAHETQITMQSTVQLRTEYDPHTHVYYTTAEPRSEISVQPVTVTQDTLSCQSPESTSSTRDLLSQFSDSSLHCLEPPCTKWTLSSFAEKHYAPFLLKPKAKVVVIFLFLGLLGVSLYGTTRVRDGLDLTDIVPRETREYDFIAAQFKYFSFYNMYIVTQKADYPNIQHLLYDLHRSFSNVKYVMLEENKQLPKMWLHYFRDWLQGLQDAFDSDWETGKIMPNNYKNGSDDGVLAYKLLVQTGSRDKPIDISQLTKQRLVDADGIINPSAFYIYLTAWVSNDPVAYAASQANIRPHRPEWVHDKADYMPETRLRIPAAEPIEYAQFPFYLNGLRDTSDFVEAIEKVRTICSNYTSLGLSSYPNGYPFLFWEQYIGLRHWLLLFISVVLACTFLVCAVFLLNPWTAGIIVMVLALMTVELFGMMGLIGIKLSAVPVVILIASVGIGVEFTVHVALAFLTAIGDKNRRAVLALEHMFAPVLDGAVSTLLGVLMLAGSEFDFIVRYFFAVLAILTILGVLNGLVLLPVLLSFFGPYPEVSPANGLNRLPTPSPEPPPSVVRFAMPPGHTHSGSDSSDSEYSSQTTVSGLSEELRHYEAQQGAGGPAHQVIVEATENPVFAHSTVVHPESRHHPPSNPRQQPHLDSGSLPPGRQGQQPRRDPPREGLWPPPYRPRRDAFEISTEGHSGPSNRARWGPRGARSHNPRNPASTAMGSSVPGYCQPITTVTASASVTVAVHPPPVPGPGRNPRGGLCPGYPETDHGLFEDPHVPFHVRCERRDSKVEVIELQDVECEERPRGSSSN

SEQ ID NO: 14197 - protein, 384 aa, Homo sapiens
MAATASPQPLATEDADSENSSFYYYDYLDEVAFMLCRKDAVVSFGKVFLPVFYSLIFVLGLSGNLLLLMVLLRYVPRRRMVEIYLLNLAISNLLFLVTLPFWGISVAWHWVFGSFLCKMVSTLYTINFYSGIFFISCMSLDKYLEIVHAQPYHRLRTRAKSLLLATIVWAVSLAVSIPDMVFVQTHENPKGVWNCHADFGGHGTIWKLFLRFQQNLLGFLLPLLAMIFFYSRIGCVLVRLRPAGQGRALKIAAALVVAFFVLWFPYNLTLFLHTLLDLQVFGNCEVSQHLDYALQVTESIAFLHCCFSPILYAFSSHRFRQYLKAFLAAVLGWHLAPGTAQASLSSCSESSILTAQEEMTGMNDLGERQSENYPNKEDVGNKSA

SEQ ID NO: 14198 - protein, 363 aa, Homo sapiens
MSSPTTSSLDTPLPGNGPPQPGAPSSSPTVKEEGPEPWPGGPDPDVPGTDEASSACSTDWGVLSEEQIRKKKIRKQQQESQSQSQSPVGPQGSSSSASGPGASPGGSEAGSQGSGEGEGVQLTAAQELMIQQLVAAQLQCNKRSFSDQPKVTPWPLGADPQSRDARQQRFAHFTELAIISVQEIVDFAKQVPGFLQLGREDQIALLKASTIEIMLLETARRYNHETECITFLKDFTYSKDDFHRAGLQVEFINPIFEFSRAMRRLGLDDAEYALLIAINIFSADRPNVQEPGRVEALQQPYVEALLSYTRIKRPQDQLRFPRMLMKLVSLRTLSSVHSEQVFALRLQDKKLPPLLSEIWDVHE

SEQ ID NO: 14199 - protein, 1045 aa, Homo sapiens
MEAKVRPSRRSRAQRDRGRRREAARDARAQSPSSGDEPEPSPGKENAGLRGAPPRGAAPAPRTARPPRRRRRESSSQEEEVIDGFAIASFSTLEALEKDMALKPHERKEKWERRLIKKPRESETCPPAEPSENRRPLEAGSPGQDLEPACDGARKVPLQPSKQMKVTVSKGGDRDSDDDSVLEATSSRDPLSDSSAHAVSGRGYSCDSESGPDDKASVGSEKLFAPGTDKGPALEKSEAKAGPVPKVSGLERSRELSAESFLPTASPAPHAAPCPGPPPGSRANPLVKKEPPAPHRHTPQPPPPQPRGLLPTHVPASLGAFAGHSQAAANGLHGLSRSSSAPLGLGKHVSLSPHGPGPHLSTSHLALRSQAQHQLHAAMFAAPPTLPPPPALPASSLVLPGHPADHELLRQELNTRFLVQSAERPGASLGPGALLRAEFHQHQHTHQHTHQHTHQHQHTFAPFPAGLPPTPPAAPPPFDKYAPKLDSPYFRHSSVSFFPSFPPAIPGLPTLLPHPGPFGSLQGAFQPKVSDPYRAVVKVSTCWEGPWQGRTLVPPGRPRGARDSRSLQKTWVGVAPAPLSASILSQKPGRWCAVHVQIAWQIYRHQQKIKEMQLDPHKLEVGAKLDLFGRPPAPGVFAGFHYPQDLARPLFPSTGAAHPASNPFGPSAHPGSFLPTGPLTDPFSRPSTFGGLGSLSSHAFGGLGSHALAPGGSIFAPKEGSSVHGLPSPHEAWNRLHRAPPSFPAPPPWPKSVDAERVSALTNHDREPDNGKEEQERDLLEKTRLLSRASPATPAGHPVSGLLLRAQSELGRSGAPAEREAEPRVKESRSPAKEEAAKMPARASPPHSKAAPGDVKVKEERGEDEASEPPAGGLHPAPLQLGLGRERLGAPGFAWEPFRGLELPRRAFPAAAPAPGSAALLEPPERPYRDREPHGYSPERLRGELERARAPHLPPAAPALDGALLPSLGALHFPRLSPAALHNGLLARTPPAAAALGAPPPLVTAAGPPTPPGPPRSRTTPLGGLGPGEARDYSPSRNPPEVEAR

SEQ ID NO: 14200 - protein, 144 aa, Homo sapiens
MTSCWANSGMTLCPGHMAGRVPGALWPASPAPWHQPAWPRSMGVPRTPSRTVLFERERTGLTYRVPSLLPVPPGPTLLAFVEQRLSPDDSHAHRLVLRRGTLAGGSVRWGALHVLGTAALAEHRSMNPCPVHDAGTGTVFLFFI

SEQ ID NO: 14201 - protein, 991 aa, Homo sapiens
MKSSVSEDLGCRRGDFSRKHYGSVELLISSDADGAIQRAGRFRVENGSSDENATALPGTWRRTDVHLENPEYHTRWYFKYFLGQVHQNYIGNDAEKSPFFLSVTLSDQNNQRVPQYRAILWRKTGTQKICLPYSPTKTLSVKSILSAMNLDKFEKGPREIFHPEIQKDLLVLEEQEGSVNFKFGVLFAKDGQLTDDEMFSNEIGSEPFQKFLNLLGDTITLKGWTGYRGGLDTKNDTTGIHSVYTVYQGHEIMFHVSTMLPYSKENKQQVERKRHIGNDIVTIVFQEGEESSPAFKPSMIRSHFTHIFALVRYNQQNDNYRLKIFSEESVPLFGPPLPTPPVFTDHQEFRDFLLVKLINGEKATLETPTFAQKRRRTLDMLIRSLHQDLMPDLHKNMLNRRSFSDVLPESPKSARKKEEARQAEFVRIGQALKLKSIVRGDAPSSLAASGICKKEPWEPQCFCSNFPHEAVCADPWGQALLVSTDAGVLLVDDDLPSVPVFDRTLPVKQMHVLETLDLLVLRADKGKDARLFVFRLSALQKGLEGKQAGKSRSDCRENKLEKTKGCHLYAINTHHSRELRIVVAIRNKLLLITRKHNKPSGVTSTSLLSPLSESPVEEFQYIREICLSDSPMVMTLVDGPAEESDNLICVAYRHQFDVVNESTGEAFRLHHVEANRVNFVAAIDVYEDGEAGLLLCYNYSCIYKKVCPFNGGSFLVQPSASDFQFCWNQAPYAIVCAFPYLLAFTTDSMEIRLVVNGNLVHTAVVPQLQLVASRSDIYFTATAAVNEVSSGGSSKGASARNSPQTPPGRDTPVFPSSLGEGEIQSKNLYKIPLRNLVGRSIERPLKSPLVSKVITPPTPISVGLAAIPVTHSLSLSRMEIKEIASRTRRELLGLSDEGGPKSEGAPKAKSKPRKRLEESQGGPKPGAVRSSSSDRIPSGSLESASTSEANPEGHSASSDQDPVADREGSPVSGSSPFQLTAFSDEDIIDLK

SEQ ID NO: 14202 - protein, 701 aa, Homo sapiens
MAENSESLGTVPEHERILQEIESTDTACVGPTLRSVYDDQPNAHKKFMEKLDACIRNHDKEIEKMCNFHHQGFVDAITELLKVRTDAEKLKVQVTDTNRRFQDAGKEVIVHTEDIIRCRIQQRNITTVVEKLQLCLPVLEMYSKLKEQMSAKRYYSALKTMEQLENVYFPWVSQYRFCQLMIENLPKLREDIKEISMSDLKDFLESIRKHSDKIGETAMKQAQHQKTFSVSLQKQNKMKFGKNMYINRDRIPEERNETVLKHSLEEEDENEEEGDEETFENYYRKQRKKQARLVLQPQSNMGYGFPVNRLFDLLFEIRDQYNETLLKKWAGVFRDIFEEDNYSPIPVVNEEEYKIVISKFPFQDPDLEKQSFPKKFPMSQSVPHIYIQVKEFIYASLKFSESLHRSSTEIDDMLRKSTNLLLTRTLSSCLLNLIRKPHIGLTELVQIIINTTHLEQACKYLEDFITNITNISQETVHTTRLYGLSTFKDARHAAEGEIYTKLNQKIDEFVQLADYDWTMSEPDGRASGYLMDLINFLRSIFQVFTHLPGKVAQTACMSACQHLSTSLMQMLLDSELKQISMGAVQQFNLDVIQCELFASSEPVPGFQGDTLQLAFIDLRQLLDLFMVWDWSTYLADYGQPASKYLRVNPNTALTLLEKMKDTSKKNNIFAQFRKNDRDKQKLIETVVKQLRSLVNGMSQHM

SEQ ID NO: 14203 - protein, 442 aa, Homo sapiens
MVSVNAPLGAPVESSYDTSPSEGTNLNAPNSLGVSALCAICGDRATGKHYGASSCDGCKGFFRRSVRKNHMYSCRFSRQCVVDKDKRNQCRYCRLKKCFRAGMKKEAVQNERDRISTRRSSYEDSSLPSINALLQAEVLSRQITSPVSGINGDIRAKKIASIADVCESMKEQLLVLVEWAKYIPAFCELPLDDQVALLRAHAGEHLLLGATKRSMVFKDVLLLGNDYIVPRHCPELAEMSRVSIRILDELVLPFQELQIDDNEYAYLKAIIFFDPDAKGLSDPGKIKRLRSQVQVSLEDYINDRQYDSRGRFGELLLLLPTLQSITWQMIEQIQFIKLFGMAKIDNLLQEMLLGGSPSDAPHAHHPLHPHLMQEHMGTNVIVANTMPTHLSNGQMSTPETPQPSPPGGSGSEPYKLLPGAVATIVKPLSAIPQPTITKQEVI

SEQ ID NO: 14204 - protein, 473 aa, Homo sapiens
MGRKKIQITRIMDERNRQVTFTKRKFGLMKKAYELSVLCDCEIALIIFNSTNKLFQYASTDMDKVLLKYTEYNEPHESRTNSDIVETLRKKGLNGCDSPDPDADDSVGHSPESEDKYRKINEDIDLMISRQRLCAVPPPNFEMPVSIPVSSHNSLVYSNPVSSLGNPNLLPLAHPSLQRNSMSPGVTHRPPSAGNTGGLMGGDLTSGAGTSAGNGYGNPRNSPGLLVSPGNLNKNMQAKSPPPMNLGMNNRKPDLRVLIPPGSKNTMPSVSEDVDLLLNQRINNSQSAQSLATPVVSVATPTLPGQGMGGYPSAISTTYGTEYSLSSADLSSLSGFNTASALHLGSVTGWQQQHLHNMPPSALSQLGACTSTHLSQSSNLSLPSTQSLNIKSEPVSPPRDRTTTPSRYPQHTRHEAGRSPVDSLSSCSSSYDGSDREDHRNEFHSPIGLTRPSPDERESPSVKRMRLSEGWAT

SEQ ID NO: 14205 - protein, 920 aa, Homo sapiens
MSRGGSYPHLLWDVRKRSLGLEDPSRLRSRYLGRREFIQRLKLEATLNVHDGCVLTTIRSGHRANIFSAKFLPCTNDKQIVSCSGDGVIFYTNVEQDAETNRQCQFTCHYGTTYEIMTVPNDPYTFLSCGEDGTVRWFDTRIKTSCTKEDCKDDILINCRRAATSVAICPPIPYYLAVGCSDSSVRIYDRRMLGTRATGNYAGRGTTGMVARFIPSHLNNKSCRVTSLCYSEDGQEILVSYSSDYIYLFDPKDDTARELKTPSAEERREELRQPPVKRLRLRGDWSDTGPRARPESERERDGEQSPNVSLMQRMSDMLSRWFEEASEVAQSNRGRGRSRPRGGTSQSDISTLPTVPSSPDLEVSETAMEVDTPAEQFLQPSTSSTMSAQAHSTSSPTESPHSTPLLSSPDSEQRQSVEASGHHTHHQSEFLRGPEIALLRKRLQQLRLKKAEQQRQQELAAHTQQQPSTSDQSSHEGSSQDPHASDSPSSVVNKQLGSMSLDEQQDNNNEKLSPKPGTGEPVLSLHYSTEGTTTSTIKLNFTDEWSSIASSSRGIGSHCKSEGQEESFVPQSSVQPPEGDSETKAPEESSEDVTKYQEGVSAENPVENHINITQSDKFTAKPLDSNSGERNDLNLDRSCGVPEESASSEKAKEPETSDQTSTESATNENNTNPEPQFQTEATGPSAHEETSTRDSALQDTDDSDDDPVLIPGARYRAGPGDRFNIRGTTIGDRIMRRSAVARIQEFFRRRKERKEMEELDTLNIRRPLVKMVYKGHRNSRTMIKEANFWGANFVMSGSDCGHIFIWDRHTAEHLMLLEADNHVVNCLQPHPFDPILASSGIDYDIKIWSPLEESRIFNRKLADEVITRNELMLEETRNTITVPASFMLRMLASLNHIRADRLEGDRSEGSGQENENEDEE

SEQ ID NO: 14206 - protein, 445 aa, Homo sapiens
MGEMQGALARARLESLLRPRHKKRAEAQKRSESFLLSGLAFMKQRRMGLNDFIQKIANNSYACKHPEVQSILKISQPQEPELMNANPSPPPSPSQQINLGPSSNPHAKPSDFHFLKVIGKGSFGKVLLARHKAEEVFYAVKVLQKKAILKKKEEKHIMSERNVLLKNVKHPFLVGLHFSFQTADKLYFVLDYINGGELFYHLQRERCFLEPRARFYAAEIASALGYLHSLNIVYRDLKPENILLDSQGHIVLTDFGLCKENIEHNSTTSTFCGTPEYLAPEVLHKQPYDRTVDWWCLGAVLYEMLYGLPPFYSRNTAEMYDNILNKPLQLKPNITNSARHLLEGLLQKDRTKRLGAKDDFMEIKSHVFFSLINWDDLINKKITPPFNPNVSGPNDLRHFDPEFTEEPVPNSIGKSPDSVLVTASVKEAAEAFLGFSYAPPTDSFL

SEQ ID NO: 14207 - protein, 546 aa, Homo sapiens
MSNDGRSRNRDRRYDEVPSDLPYQDTTIRTHPTLHDSERAVSADPLPPPPLPLQPPFGPDFYSSDTEEPAIAPDLKPVRRFVPDSWKNFFRGKKKDPEWDKPVSDIRYISDGVECSPPASPARPNHRSPLNSCKDPYGGSEGTFSSRKEADAVFPRDPYGSLDRHTQTVRTYSEKVEEYNLRYSYMKSWAGLLRILGVVELLLGAGVFACVTAYIHKDSEWYNLFGYSQPYGMGGVGGLGSMYGGYYYTGPKTPFVLVVAGLAWITTIIILVLGMSMYYRTILLDSNWWPLTEFGINVALFILYMAAAIVYVNDTNRGGLCYYPLFNTPVNAVFCRVEGGQIAAMIFLFVTMIVYLISALVCLKLWRHEAARRHREYMEQQECEMATSGDRQRDSEVNFKELRTAKMKPELLSGHIPPGHIPKPIVMPDYVAKYPVIQTDDERERYKAVFQDQFSEYKELSAEVQAVLRKFDELDAVMSRLPHHSESRQEHERISRIHEEFKKKKNDPTFLEKKERCDYLKNKLSHIKQRIQEYDKVMNWDVQGYS

SEQ ID NO: 14208 - protein, 435 aa, Homo sapiens
MRKLLTNLPAAAVLSAQVYSAVLQGLWEENVCGTPGRTRVCTALLYGQVCPFQDSTDGLRTITSILFNWPPENTSVYYQPPQRSSFRIKLAFRNLSWPGLGLEDHQEIVLGQLVLPEPNEAKPDDPAPRPGQHALTMPALEPAPPLLADLGPALEPESPAALGPPGYLHSAPGPAPAPGEGPPPGTVLEPQSAPESSCPCRGSVKNQPSEELPDMTTFPPRLLAEQLTLMDAELFKKVVLHECLGCIWGQGHLKGNEHMAPTVRATIAHFNRLTNCITTSCLGDHSMRARDRARVVEHWIKVARECLSLNNFSSVHVIVSALCSNPIGQLHKTWAGVSSKSMKELKELCKKDTAVKRDLLIKRDDGENNGNSYRKLSPQRPCEVAVVCITLYRRGNSLREARLQDWVTHTGSVDLGQWRGALRWPPRRGTPRESR

SEQ ID NO: 14209 - protein, 417 aa, Homo sapiens
MDMHCKADPFSAMHPGHGGVNQLGGVFVNGRPLPDVVRQRIVELAHQGVRPCDISRQLRVSHGCVSKILGRYYETGSIKPGVIGGSKPKVATPKVVDKIAEYKRQNPTMFAWEIRDRLLAEGICDNDTVPSVSSINRIIRTKVQQPFHPTPDGAGTGVTAPGHTIVPSTASPPVSSASNDPVGSYSINGILGIPRSNGEKRKRDEVEVYTDPAHIRGGGGLHLVWTLRDVSEGSVPNGDSQSGVDSLRKHLRADTFTQQQLEALDRVFERPSYPDVFQASEHIKSEQGNEYSLPALTPGLDEVKSSLSASTNPELGSNVSGTQTYPVVTGRDMASTTLPGYPPHVPPTGQGSYPTSTLAGMVPGSEFSGNPYSHPQYTAYNEAWRFSNPALLSSPYYYSAAPRGSAPAAAAAAYDRH

SEQ ID NO: 14210 - protein, 387 aa, Homo sapiens
MVGSPDTVGMNYGSYMEEKHMPPPNMTTNERRVIVPADPTLWSTDHVRQWLEWAVKEYGLPDVNILLFQNIDGKELCKMTKDDFQRLTPSYNADILLSHLHYLRETPLPHLTSDDVDKALQNSPRLMHARNTGGAAFIFPNTSVYPEATQRITTRPDLPYEPPRRSAWTGHGHPTPQSKAAQPSPSTVPKTEDQRPQLDPYQILGPTSSRLANPGSGQIQLWQFLLELLSDSSNSSCITWEGTNGEFKMTDPDEVARRWGERKSKPNMNYDKLSRALRYYYDKNIMTKVHGKRYAYKFDFHGIAQALQPHPPESSLYKYPSDLPYMGSYHAHPQKMNFVAPHPPALPVTSSSFFAAPNPYWNSPTGGIYPNTRLPTSHMPSHLGTYY

SEQ ID NO: 14211 - protein, 557 aa, Homo sapiens
MPERDSEPFSNPLAPDGHDVDDPHSFHQSKLTNEDFRKLLMTPRAAPTSAPPSKSRHHEMPREYNEDEDPAARRRKKKSYYAKLRQQEIERERELAEKYRDRAKERRDGVNKDYEETELISTTANYRAVGPTAEADKSAAEKRRQLIQESKFLGGDMEHTHLVKGLDFALLQKVRAEIASKEKEEEELMEKPQKETKKDEDPENKIEFKTRLGRNVYRMLFKSKAYERNELFLPGRMAYVVDLDDEYADTDIPTTLIRSKADCPTMEAQTTLTTNDIVISKLTQILSYLRQGTRNKKLKKKDKGKLEEKKPPEADMNIFEDIGDYVPSTTKTPRDKERERYRERERDRERDRDRDRERERERDRERERERDREREEEKKRHSYFEKPKVDDEPMDVDKGPGSTKELIKSINEKFAGSAGWEGTESLKKPEDKKQLGDFFGMSNSYAECYPATMDDMAVDSDEEVDYSKMDQGNKKGPLGRWDFDTQEEYSEYMNNKEALPKAAFQYGIKMSEGRKTRRFKETNDKAELDRQWKKISAIIEKRKKMEADGVEVKRPKY

SEQ ID NO: 14212 - protein, 141 aa, Homo sapiens
MWVTKLLPALLLQHVLLHLLLLPIAIPYAEGQRKRRNTIHEFKKSAKTTLIKIDPALKIKTKKVNTADQCANRCTRNKGLPFTCKAFVFDKARKQCLWFPFNSMSSGVKKEFGHEFDLYENKDYIRNCIIGKGRSYKGTVS

SEQ ID NO: 14213 - protein, 1836 aa, Homo sapiens
MARPSLCTLVPLGPECLRPFTRESLAAIEQRAVEEEARLQRNKQMEIEEPERKPRSDLEAGKNLPMIYGDPPPEVIGIPLEDLDPYYSNKKTFIVLNKGKAIFRFSATPALYLLSPFSVVRRGAIKVLIHALFSMFIMITILTNCVFMTMSDPPPWSKNVEYTFTGIYTFESLIKILARGFCVDDFTFLRDPWNWLDFSVIMMAYLTEFVDLGNISALRTFRVLRALKTITVIPGLKTIVGALIQSVKKLSDVMILTVFCLSVFALVGLQLFMGNLRQKCVRWPPPFNDTNTTWYSNDTWYGNDTWYGNEMWYGNDSWYANDTWNSHASWATNDTFDWDAYISDEGNFYFLEGSNDALLCGNSSDAGHCPEGYECIKTGRNPNYGYTSYDTFSWAFLALFRLMTQDYWENLFQLTLRAAGKTYMIFFVVIIFLGSFYLINLILAVVAMAYAEQNEATLAEDKEKEEEFQQMLEKFKKHQEELEKAKAAQALEGGEADGDPAHGKDCNGSLDTSQGEKGAPRQSSSGDSGISDAMEELEEAHQKCPPWWYKCAHKVLIWNCCAPWLKFKNIIHLIVMDPFVDLGITICIVLNTLFMAMEHYPMTEHFDNVLTVGNLVFTGIFTAEMVLKLIAMDPYEYFQQGWNIFDSIIVTLSLVELGLANVQGLSVLRSFRLLRVFKLAKSWPTLNMLIKIIGNSVGALGNLTLVLAIIVFIFAVVGMQLFGKSYKECVCKIALDCNLPRWHMHDFFHSFLIVFRILCGEWIETMWDCMEVAGQAMCLTVFLMVMVIGNLVVLNLFLALLLSSFSADSLAASDEDGEMNNLQIAIGRIKLGIGFAKAFLLGLLHGKILSPKDIMLSLGEADGAGEAGEAGETAPEDEKKEPPEEDLKKDNHILNHMGLADGPPSSLELDHLNFINNPYLTIQVPIASEESDLEMPTEEETDTFSEPEDSKKPPQPLYDGNSSVCSTADYKPPEEDPEEQAEENPEGEQPEECFTEACVQRWPCLYVDISQGRGKKWWTLRRACFKIVEHNWFETFIVFMILLSSGALAFEDIYIEQRRVIRTILEYADKVFTYIFIMEMLLKWVAYGFKVYFTNAWCWLDFLIVDVSIISLVANWLGYSELGPIKSLRTLRALRPLRALSRFEGMRVVVNALLGAIPSIMNVLLVCLIFWLIFSIMGVNLFAGKFYYCINTTTSERFDISEVNNKSECESLMHTGQVRWLNVKVNYDNVGLGYLSLLQVATFKGWMDIMYAAVDSREKEEQPQYEVNLYMYLYFVIFIIFGSFFTLNLFIGVIIDNFNQQKKKLGGKDIFMTEEQKKYYNAMKKLGSKKPQKPIPRPQNKIQGMVYDLVTKQAFDITIMILICLNMVTMMVETDNQSQLKVDILYNINMIFIIIFTGECVLKMLALRQYYFTVGWNIFDFVVVILSIVGLALSDLIQKYFVSPTLFRVIRLARIGRVLRLIRGAKGIRTLLFALMMSLPALFNIGLLLFLVMFIYSIFGMSNFAYVKKESGIDDMFNFETFGNSIICLFEITTSAGWDGLLNPILNSGPPDCDPNLENPGTSVKGDCGNPSIGICFFCSYIIISFLIVVNMYIAIILENFNVATEESSEPLGEDDFEMFYETWEKFDPDATQFIAYSRLSDFVDTLQEPLRIAKPNKIKLITLDLPMVPGDKIHCLDILFALTKEVLGDSGEMDALKQTMEEKFMAANPSKVSYEPITTTLKRKHEEVCAIKIQRAYRRHLLQRSMKQASYMYRHSHDGSGDDAPEKEGLLANTMSKMYGHENGNSSSPSPEEKGEAGDAGPTMGLMPISPSDTAWPPAPPPGQTVRPGVKESLV

SEQ ID NO: 14214 - protein, 336 aa, Homo sapiens
MPPKHSLSHRCILSVTASLMATRFSFPSGENEMVIMRPGNKYEYKFGFELPQGPLGTSFKGKYGCVDYWVKAFLDRPSQPTQETKKNFEVVDLVDVNTPDLMAPVSAKKEKKVSCMFIPDGRVSVSARIDRKGFCEGDEISIHADFENTCSRIVVPKAAIVARHTYLANGQTKVLTQKLSSVRGNHIISGTCASWRGKSLRVQKIRPSILGCNILRVEYSLLIYVSVPGSKKVILDLPLVIGSRSGLSSRTSSMASRTSSEMSWVDLNIPDTPEAPPCYMDVIPEDHRLESPTTPLLDDMDGSQDSPIFMYAPEFKFMPPPTYTEVDPCILNNNVQ

SEQ ID NO: 14215 - protein, 96 aa, Homo sapiens
MSEQGDLNQAIAEEGGTEQETATPENGIVKSESLDEEEKLELQRRLEAQNQERRKSKSGAGKGKLTRSLAVCEESSARPGGESLQDQVYPLAIIIN

SEQ ID NO: 14216 - protein, 671 aa, Homo sapiens
MTIRHQGQQYRPRMAFLQKIEALVKDMQNPETGVRMQNQRVLVTSVPHAMTGSDVLQWIVQRLWISSLEAQNLGNFIVRYGYIYPLQDPKNLILKPDGSLYRFQTPYFWPTQQWPAEDTDYAIYLAKRNIKKKGILEEYEKENYNFLNQKMNYKWDFVIMQAKEQYRAGKERNKADRYALDCQEKAYWLVHRCPPGMDNVLDYGLDRVTNPNEVKKQTVVAVKKEIMYYQQALMRSTVKSSVSLGGIVKYSEQFSSNDAIMSGCLPSNPWITDDTQFWDLNAKLVEIPTKMRVERWAFNFSELIRDPKGRQSFQYFLKKEFSGENLGFWEACEDLKYGDQSKVKEKAEEIYKLFLAPGARRWINIDGKTMDITVKGLKHPHRYVLDAAQTHIYMLMKKDSYARYLKSPIYKDMLAKAIEPQETTKKSSTLPFMRRHLRSSPSPVILRQLEEEAKAREAANTVDITQPGQHMAPSPHLTVYTGTCMPPSPSSPFSSSCRSPRKPFASPSRFIRRPSTTICPSPIRVALESSSGLEQKGECSGSMAPRGPSVTESSEASLDTSWPRSRPRAPPKARMALSFSRFLRRGCLASPVFARLSPKCPAVSHGRVQPLGDVGQQLPRLKSKRVANFFQIKMDVPTGSGTCLMDSEDAGTGESGDRATEKEVICPWESL

SEQ ID NO: 14217 - protein, 155 aa, Homo sapiens
MGKDYYKILGIPSGANEDEIKKAYRKMALKYHPDKNKEPNAEEKFKEIAEAYDVLSDPKKRGLYDQYGEEGLKTGGGTSGGSSGSFHYTFHGDPHATFASFFGGSNPFDIFFASSRSTRPFSGFDPDDMDVDEDEDPFGAFGRFGFNGLSRGPRR

SEQ ID NO: 14218 - protein, 476 aa, Homo sapiens
TLPVAAGPGQDTDKTPGHAPAQDKVLSAARDPTLLPPETGGAGGEAPSKPKDSSFFDKFFKLDKGQEKVPGDSQQEAKRAEHQDKVDEVPGLSGQSDDVPAGKDIVDGKEKEGQELGTADCSVPGDPEGLETAKDDSQAAAIAENNNSIMSFFKTLVSPNKAETKKDPEDTASKAESVCDGQAGQKTSEIQARGTKKKHLDSPRLGLAFRKFFRHKGAEKSPTTSADLKSDKANFTSQETQGAGKNSKGCNPSGHTQSVTTPEPAKEGTKEKSGPTSLPLGKLFWKKVVCESPVEIIKSKEVESALQTVDLNEGDAAPEPTEAKLKREESKPRTSLMAFLRQMTSDSTEKTITPPEPEPTGAPQKGKEGSSKDKKSAAEMNKQKSNKQEAKEPAQCTEQATVDTNSLQNGDKLQKRPEKRQQSLGGFFKGLGPKRMLDAQVQTDPVSIGPVGKSKYTGKCVFSHVKKKWPFQEWSY

SEQ ID NO: 14219 - protein, 303 aa, Homo sapiens
GYDQWATSQLIGTIFFCVGITTLLQTTFGCRTIFLVLLFSQYARNVKFPLPIYKSKKGWTAYKLQLFKMFPIILAILVSWLLCFIFTVTDVFPPDSTKYGFYARTDARQGVLLVAPWFKVPYPFQWGLPTVSAAGVIGMLSAVVASIIESIGDYYACARLSCAPPPPIHAINRGIFVEGLSCVLDGIFGTGNGSTSSSPNIGVLGITKVGSRRVIQCGAALMLALGMIGKFSALFASLPDPVLGALFCTLFGMITAVGLSNLQFIDLNSSRNLFVLGFSIFFGLVLPSYLRQNPLVTGITGID

SEQ ID NO: 14220 - protein, 934 aa, Homo sapiens
YVGHREPPPGAEAYIPQRYPDNRIVSSKYTFWNFIPKNLFEQFRRVANFYFLIIFLVQLIIDTPTSPVTSGLPLFFVITVTAIKQGYEDWLRHKADNAMNQCPVHFIQHGKLVRKQSRKLRVGDIVMVKEDETFPCDLIFLSSNRGDGTCHVTTASLDGESSHKTHYAVQDTKGFHTEEDIGGLHATIECEQPQPDLYKFVGRINVYSDLNDPVVRPLGSENLLLRGATLKNTEKIFGVAIYTGMETKMALNYQSKSQKRSAVEKSMNAFLIVYLCILISKALINTVLKYMWQSEPFRDEPWYNQKTESERQRNLFLKAFTDFLAFMVLFNYIIPVSMYVTVEMQKFLGSYFITWDEDMFDEETGEGPLVNTSDLNEELGQVEYIFTDKTGTLTENNMEFKECCIEGHVYVPHVICNGQVLPESSGIDMIDSSPSVNGREREELFFRALCLCHTVQVKDDDSVDGPRKSPDGGKSCVYISSSPDEVALVEGVQRLGFTYLRLKDNYMEILNRENHIERFELLEILSFDSVRRRMSVIVKSATGEIYLFCKGADSSIFPRVIEGKVDQIRARVERNAVEGLRTLCVAYKRLIQEEYEGICKLLQAAKVALQDREKKLAEAYEQIEKDLTLLGATAVEDRLQEKAADTIEALQKAGIKVWVLTGDKMETAAATCYACKLFRRNTQLLELTTKRIEEQSLHDVLFELSKTVLRHSGSLTRDNLSGLSADMQDYGLIIDGAALSLIMKPREDGSSGNYRELFLEICRSCSAVLCCRMAPLQKAQIVKLIKFSKEHPITLAIGDGANDVSMILEAHVGIGVIGKEGRQAARNSDYAIPKFKHLKKMLLVHGHFYYIRISELVQYFFYKNVCFIFPQFLYQFFCGFSQQTLYDTAYLTLYNISFTSLPILLYSLMEQHVGIDVLKRDPTLYRYHPPNSLS

SEQ ID NO: 14221 - protein, 210 aa, Homo sapiens
MTTAHFYCQYCTASLLGKKYVLKDDSPYCVTCYDRVFSNYCEECKKPIESDSKDLCYKDRHWHEGCFKCTKCNHSLVEKPFAAKDERLLCTECYSNECSSKCFHCKRTIMPGSRKMEFKGNYWHETCFVCENCRQPIGTKPLISKESGNYCVPCFEKEFAHYCNFCKKVITSGGITFCDQLWHKECFLCSGCRKDLCEEQFMSRDDYPFC

SEQ ID NO: 14222 - protein, 687 aa, Homo sapiens
MVENERLRQEMRRCEAELQELRTKPAGPCPGCEHSQESAQLRDKLSQLQLEMAESKGMLSELNLEVQQKTDRLAEVELRLKDCLAEKAQEEERLSRRLRDSHETIASLRAQSPPVKYVIKTVEVESSKTKQALSESQARNQHLQEQVAMQRQVLKEMEQQLQSSHQLTARLRAQIAMYESELERAHGQMLEEMQSLEEDKNRAIEEAFARAQVEMKAVHENLAGVRTNLLTLQPALRTLTNDYNGLKRQVRGFPLLLQEALRSVKAEIGQAIEEVNSNNQELLRKYRRELQLRKKCHNELVRLKGNIRVIARVRPVTKEDGEGPEATNAVTFDADDDSIIHLLHKGKPVSFELDKVFSPQASQQDVFQEVQALVTSCIDGFNVCIFAYGQTGAGKTYTMEGTAENPGINQRALQLLFSEVQEKASDWEYTITVSAAEIYNEVLRDLLGKEPQEKLEIRLCPDGSGQLYVPGLTEFQVQSVDDINKVFEFGHTNRTTEFTNLNEHSSRSHALLIVTVRGVDCSTGLRTTGKLNLVDLAGSERVGKSGAEGSRLREAQHINKSLSALGDVIAALRSRQGHVPFRNSKLTYLLQDSLSGDSKTLMVVQVSPVEKNTSETLYSLKFAERVRSVELGPGLRRAELGSWSSQEHLEWEPACQTPQPSARAHSAPSSGTSSRPGSIRRKLQPSA

SEQ ID NO: 14223 - protein, 506 aa, Homo sapiens
MAFNDLLQQVGGVGRFQQIQVTLVVLPLLLMASHNTLQNFTAAIPTHHCRPPADANLSKNGGLEVWLPRDRQGQPESCLRFTSPQWGLPFLNGTEANGTGATEPCTDGWIYDNSTFPSTIVTEWDLVCSHRALRQLAQSLYMVGVLLGAMVFGYLADRLGRRKVLILNYLQTAVSGTCAAFAPNFPIYCAFRLLSGMALAGISLNCMTLNVEWMPIHTRACVGTLIGYVYSLGQFLLAGVAYAVPHWRHLQLLVSAPFFAFFIYSWFFIESARWHSSSGRLDLTLRALQRVARINGKREEGAKLSMEVLRASLQKELTMGKGQASAMELLRCPTLRHLFLCLSMLWFATSFAYYGLVMDLQGFGVSIYLIQVIFGAVDLPAKLVGFLVINSLGRRPAQMAALLLAGICILLNGVIPQDQSIVRTSLAVLGKGCLAASFNCIFLYTGELYPTMIRAVTVLLPETLGQPLPDTVQDLESRKGKQTRQQQEHQKYMVPLQASAQEKNGL

SEQ ID NO: 14224 - protein, 406 aa, Homo sapiens
MIEYQIPVSFKDVVVGFTQEEWHRLSPAQRALYRDVMLETYSNLVSVGYEGTKPDVILRLEQEEAPWIGEAACPGCHCWEDIWRVNIQRKRRQDMLLRPGAAISKKTLPKEKSCEYNKFGKISLLSTDLFSSIQSPSNWNPCGKNLNHNLDLIGFKRNCAKKQDECYAYGKLLQRINHGRRPNGEKPRGCSHCEKAFTQNPALMYKPAVSDSLLYKRKRVPPTEKPHVCSECGKAFCYKSEFIRHQRSHTGEKPYGCTDCGKAFSHKSTLIKHQRIHTGVRPFECFFCGKAFTQKSHRTEHQRTHTGERPFVCSECGKSFGEKSYLNVHRKMHTGERPYRCRECGKSFSQKSCLNKHWRTHTGEKPYGCNECGKAFYQKPNLSRHQKIHARKNAYRNENLIIVGNT

SEQ ID NO: 14225 - protein, 344 aa, Homo sapiens
MEEPEEPADSGQSLVPVYIYSPEYVSMCDSLAKIPKRASMVHSLIEAYALHKQMRIVKPKVASMEEMATFHTDAYLQHLQKVSQEGDDDHPDSIEYGLGYDCPATEGIFDYAAAIGGATITAAQCLIDGMCKVAINWSGGWHHAKKDEASGFCYLNDAVLGILRLRRKFERILYVDLDLHHGDGVEDAFSFTSKVMTVSLHKFSPGFFPGTGDVSDVGLGKGRYYSVNVPIQDGIQDEKYYQICESVLKEVYQAFNPKAVVLQLGADTIAGDPMCSFNMTPVGIGKCLKYILQWQLATLILGGGGYNLANTARCWTYLTGVILGKTLSSEIPDHERQDLAMVPR

SEQ ID NO: 14226 - protein, 991 aa, Homo sapiens
MDYRGGDGTSMDYRGREAPHMNYRDRDAHAVDFRGRDAPPSDFRGRGTYDLDFRGRDGSHADFRGRDLSDLDFRAREQSRSDFRNRDVSDLDFRDKDGTQVDFRGRGSGTTDLDFRDRDTPHSDFRGRHRSRTDQDFRGREMGSCMEFKDREMPPVDPNILDYIQPSTQDREHSGMNVNRREESTHDHTIERPAFGIQKGEFEHSETREGETQGVAFEHESPADFQNSQSPVQDQDKSQLSGREEQSSDAGLFKEEGGLDFLGRQDTDYRSMEYRDVDHRLPGSQMFGYGQSKSFPEGKTARDAQRDLQDQDYRTGPSEEKPSRLIRLSGVPEDATKEEILNAFRTPDGMPVKNLQLKEYNTGYDYGYVCVEFSLLEDAIGCMEANQGTLMIQDKEVTLEYVSSLDFWYCKRCKANIGGHRSSCSFCKNPREVTEAKQELITYPQPQKTSIPAPLEKQPNQPLRPADKEPEPRKREEGQESRLGHQKREAERYLPPSRREGPTFRRDRERESWSGETRQDGESKTIMLKRIYRSTPPEVIVEVLEPYVRLTTANVRIIKNRTGPMGHTYGFIDLDSHAEALRVVKILQNLDPPFSIDGKMVAVNLATGKRRNDSGDHSDHMHYYQGKKYFRDRRGGGRNSDWSSDTNRQGQQSSSDCYIYDSATGYYYDPLAGTYYDPNTQQEVYVPQDPGLPEEEEIKEKKPTSQGKSSSKKEMSKRDGKEKKDRGVTRFQENASEGKAPAEDVFKKPLPPTVKKEESPPPPKVVNPLIGLLGEYGGDSDYEEEEEEEQTPPPQPRTAQPQKREEQTKKENEEDKLTDWNKLACLLCRRQFPNKEVLIKHQQLSDLHKQNLEIHRKIKQSEQELAYLERREREGKFKGRGNDRREKLQSFDSPERKRIKYSRETDSDRKLVDKEDIDTSSKGGCVQQATGWRKGTGLGYGHPGLASSEEAEGRMRGPSVGASGRTSKRQSNETYRDAVRRVMFARYKELD

SEQ ID NO: 14227 - protein, 901 aa, Homo sapiens
MQREAAFRLGHCHPLRIMGSVDQEEPNAHKVASPPSGPAYPDDVLDYGLKPYSPLASLSGEPPGRFGEPDRVGPQKFLSAAKPAGASGLSPRIEITPSHELIQAVGPLRMRDAGLLVEQPPLAGVAASPRFTLPVPGFEGYREPLCLSPASSGSSASFISDTFSPYTSPCVSPNNGGPDDLCPQFQNIPAHYSPRTSPIMSPRTSLAEDSCLGRHSPVPRPASRSSSPGAKRRHSCAEALVALPPGASPQRSRSPSPQPSSHVAPQDHGSPAGYPPVAGSAVIMDALNSLATDSPCGIPPKMWKTSPDPSPVSAAPSKAGLPRHIYPAVEFLGPCEQGERRNSAPESILLVPPTWPKPLVPAIPICSIPVTASLPPLEWPLSSQSGSYELRIEVQPKPHHRAHYETEGSRGAVKAPTGGHPVVQLHGYMENKPLGLQIFIGTADERILKPHAFYQVHRITGKTVTTTSYEKIVGNTKVLEIPLEPKNNMRATIDCAGILKLRNADIELRKGETDIGRKNTRVRLVFRVHIPESSGRIVSLQTASNPIECSQRSAHELPMVERQDTDSCLVYGGQQMILTGQNFTSESKVVFTEKTTDGQQIWEMEATVDKDKSQPNMLFVEIPEYRNKHIRTPVKVNFYVINGKRKRSQPQHFTYHPVPAIKTEPTDEYDPTLICSPTHGGLGSQPYYPQHPMVAESPSCLVATMAPCQQFRTGLSSPDARYQQQNPAAVLYQRSKSLSPSLLGYQQPALMAAPLSLADAHRSVLVHAGSQGQSSALLHPSPTNQQASPVIHYSPTNQQLRCGSHQEFQHIMYCENFAPGTTRPGPPPVSQGQRLSPGSYPTVIQQQNATSQRAAKNGPPVSDQKEVLPAGVTIKQEQNLDQTYLDDELIDTHLSWIQNIL

SEQ ID NO: 14228 - protein, 973 aa, Homo sapiens [sequence omitted]

SEQ ID NO: 14229 - protein, 288 aa, Homo sapiens
MILLQHAVLPPPKQPSPSPPMSVATRSTGTLQLPPQKPFGQEASLPLAGEEELSKGGEQDCALEELCKPLYCKLCNVTLNSAQQAQAHYQGKNHGKKLRNYYAANSCPPPARMSNVVEPAATPVVPVPPQMGSFKPGGRVILATENDYCKLCDASFSSPAVAQAHYQGKNHAKRLRLAEAQSNSFSESSELGQRRARKEGNEFKMMPNRRNMYTVQNNSGPYFNPRSRQRIPRDLAMCVTPSGQFYCSMCNVGAGEEMEFRQHLESKQHKSKVSEQRYRNEMENLGYV

SEQ ID NO: 14230 - protein, 292 aa, Homo sapiens
MDSKYSTLTARVKGGDGIRIYKRNRMIMTNPIATGKDPTFDTITYEWAPPGVTQKLGLQYMELIPKEKQPVTGTEGAFYRRRQLMHQLPIYDQDPSRCRGLLENELKLMEEFVKQYKSEALGVGEVALPGQGGLPKEEGKQQEKPEGAETTAATTNGSLSDPSKEVEYVCELCKGAAPPDSPVVYSDRAGYNKQWHPTCFVCAKCSEPLVDLIYFWKDGAPWCGRHYCESLRPRCSGCDEIIFAEDYQRVEDLAWHRKHFVCEGCEQLLSGRAYIVTKGQLLCPTCSKSKRS

SEQ ID NO: 14231 - protein, 796 aa, Homo sapiens
MGDAKEAGAEGPPAGAAARGGLSLLSQGESEESSAQGSALFLGGNEVKSRAVVKYSSAPPRTAFARLEEKTDLKLPPANWLRESAKLGPAGTTILGNSKKSKPFSSFGMAYDFIDSVGNDVDVVSDSENIKKLLKIPYSKSHVSMAVHRIGRTLLLDELDIQELFMRSSQTGDWTWLKEFYQRLIDQKWQRKKKSKEHWYQKAILSKFLYYSINGDGAAQPVSSTAEQQESSSSDQTNDSEGASWPAPFEMPSSVSEDPSASSQGSEPLEPSYIVGHVASAPKEQNLITLFNDGEHSQGLKNDFVRNILWTFEDIHMLVGSNMPIFGGGRYPAVSLRLRDNNKPINVLTGIDYWLDNLICNVPELVMCFHVNGIVQKYEMIKTEEIPNLENSNFSTKVIKDIAQNILSFLKSNCTKEGHTYWLFKASGSDIVKLYDLTTLCEETEDKYQNPFTMPVAILLYKVACNMMMKKNQNKKHYGTIRTLLLNCLKLLDKSRHPQIIASANYMLSELFQLDEPKKEENSESPLNENSDESYSEEEEEMPDSDENGSYSTSSDPSDDSKAVAIIKSVGELSVPEKYKSIHQIRPSCAFPVCHDTEERCRLVLSYVLEGLKSVDSSIKKESDLPAADPSTPIPLKYEDESSRGGPEGLEKQMALFLDKMGSLQKGNYSSQSGMIPGSWQHKMKLQLILKSSKAYYVLSDAAMSLQKYGRALRYIKLALQSHDTYCCLCTNMLSEVLLFLSQYLTLCGDIQLMLAQNANNRAAHLEEFHYQTKEDQEILHSLHRESSCQGFKTGK

SEQ ID NO: 14232 - protein, 477 aa, Homo sapiens
MADGQVAELLLRRLEASDGGLDSAELAAELGMEHQAVVGAVKSLQALGEVIEAELRSTKHWELTAEGEEIAREGSHEARVFRSIPPEGLAQSELMRLPSGKVGFSKAMSNKWIRVDKSAADGPRVFRVVDSMEDEVQRRLQLVRGGQAEKLGEKERSELRKRKLLAEVGSWRDRPFKPYNFLAHGVLPDSGHLHPLLKVRSQFRQIFLEMGFTEMPTDNFIESSFWNFDALFQPQQHPARDQHDTFFLRDPAEALQLPMDYVQRVKRTHSQGGYGSQGYKYNWKLDEARKNLLRTHTTSASARALYRLAQKKPFTPVKYFSIDRVFRNETLDATHLAEFHQIEGVVADHGLTLGHLMGVLREFFTKLGITQLRFKPAYNPYTEPSMEVFSYHQGLKKWVEVGNSGVFRPEMLLPMGLPENVSVIAWGLSLERPTMIKYGINNIRELVGHKVNLQMVYDSPLCRLDAEPRPPPTQEAA

SEQ ID NO: 14233 - protein, 1135 aa, Homo sapiens
MASAGTQHYSIGLRQKNSFKQSGPSGTVPATPPEKPSEGRVWPQAHQQVKPIWKLEKKQVETLSAGLGPGLLGVPPQPAYFFCPSTLCSSGTTAVIAGHSSSCYLHSLPDLFNSTLLYRRSSYRQKPYQQLESFCLRSSPSEKSPFSLPQKSLPVSLTANKATSSMVFSMAQPMASSSTEPYLCLAAAGENPSGKSLASAISGKIPSPLSSSYKPMLNNNSFMWPNSTPVPLLQTTQGLKPVSPPKIQPVSWHHSGGTGDCAPQPVDHKVPKSIGTVPADASAHIALSTASSHDTSTTSVASSWYNRNNLAMRAEPLSCALDDSSDSQDPTKEIRFTEAVRKLTARGFEKMPRQGCQLEQSSFLNPSFQWNVLNRSRRWKPPAVNQQFPQEDAGSVRRVLPGASDTLGLDNTVFCTKRISIHLLASHASGLNHNPACESVIDSSAFGEGKAPGPPFPQTLGIANVATRLSSIQLGQSEKERPEEARELDSSDRDISSATDLQPDQAETEDTEEELVDGLEDCCSRDENEEEEGDSECSSLSAVSPSESVAMISRSCMEILTKPLSNHEKVVRPALIYSLFPNVPPTIYFGTRDERVEKLPWEQRKLLRWKMSTVTPNIVKQTIGRSHFKISKRNDDWLGCWGHHMKSPSFRSIREHQKPASARGIGIQVIHKWSQLPKRRPLLVQRYLHKPYLISGSKFDLRIYVYVTSYDPLRIYLFSDGLVRFASCKYSPSMKSLGNKFMHLTNYSVNKKNAEYQANADEMACQGHKWALKALWNYLSQKGVNSDAIWEKIKDVVVKTIISSEPYVTSLLKMYVRRPYSCHELFGFDIMLDENLKPWVLEVNISPSLHSSSPLDISIKGQMIRDLLNLAGFVLPNAEDIISSPSSCSSSTTSLPTSPGDKCRMAPEHVTAQKMKKAYYLTQKIPDQDFYASVLDVLTPDDVRILVEMEDEFSRRGQFERIFPSHISSRYLRFFEQPRYFNILTTQWEQKYHGNKLKGVDLLRSWCYKGFHMGVVSDSAPVWSLPTSLLTISKDDVILNAFSKSETSKLGKQSSCEVSLLLSEDGTTPKSKKTQAGLSPYPQKPSSSKDSEDTSKEPSLSTQTLPVIKCSGQTSRLSASSTFQSISDSLLAVSP

SEQ ID NO: 14234 - protein, 304 aa, Homo sapiens
MSQPGQKPAASPRPRRAAAARRTHEHVSEKTSESPSKPGEKKGSDEKKAASLGSSQSSRTYAGGTASATKVSASSGATSKSSSMNPTETKAIPVSQQMEGPHLPNKKKHKKQAVKTEPEKKSQSTKPKSLPKQASDTGSNDAHNKKAVSRSAEQQPSEKSTEPKTKPQDMISAGGESVAGITAISGKPGDKKKEKKSLTPAVPVESKPDKPSGKSGMDAALDDLIDTLGGPEETEEENTTYTGPEVSDPMSSTYIEELGKREVTIPPKYRELLAKKEGITGPPADSSKPIGPDDAIDALSSDFT

SEQ ID NO: 14235 - protein, 121 aa, Homo sapiens
MVLTLGESWPVLVGRRFLSLSAADGSDGSHDSWDVERVAEWPWLSGTIRAVSHTDVTKKDLKVCVEFDGESWRKRRWIEVYSLLRRAFLVEHNLVLAERKSPEISERIVQWPAITYKPLLD

SEQ ID NO: 14236 - protein, 133 aa, Homo sapiens
MARRSVLYFILLNALINKGQACFCDHYAWTQWTSCSKTCNSGTQSRHRQIVVDKYYQENFCEQICSKQETRECNWQRCPINCLLGDFGPWSDCDPCIEKQSKVRSVLRPSQFGGQPCTAPLVAFQPCIPSKLC

SEQ ID NO: 14237 - protein, 242 aa, Homo sapiens
MLPKRRRARVGSPSGDAASSTPPSTRFPGVAIYLVEPRMGRSRRAFLTGLARSKGFRVLDACSSEATHVVMEETSAEEAVSWQERRMAAAPPGCTPPALLDISWLTESLGAGQPVPVECRHRLEVAGPRKGPLSPAWMPAYACQRPTPLTHHNTGLSEALEILAEAAGFEGSEGRLLTFCRAASVLKALPSPVTTLSQLQGLPHFGEHSSRVVQELLEHGVCEEVERVRRSESSSPRSSGSV

SEQ ID NO: 14238 - protein, 2080 aa, Homo sapiens
MGDEMDAMIPEREMKDFQFRALKKVRIFDSPEELPKERSSLLAVSNKYGLVFAGGASGLQIFPTKNLLIQNKPGDDPNKIVDKVQGLLVPMKFPIHHLALSCDNLTLSACMMSSEYGSIIAFFDVRTFSNEAKQQKRPFAYHKLLKDAGGMVIDMKWNPTVPSMVAVCLADGSIAVLQVTETVKVCATLPSTVAVTSVCWSPKGKQLAVGKQNGTVVQYLPTLQEKKVIPCPPFYESDHPVRVLDVLWIGTYVFAIVYAAADGTLETSPDVVMALLPKKEEKHPEIFVNFMEPCYGSCTERQHHYYLSYIEEWDLVLAASAASTEVSILARQSDQINWESWLLEDSSRAELPVTDKSDDSLPMGVVVDYTNQVEITISDEKTLPPAPVLMLLSTDGVLCPFYMINQNPGVKSLIKTPERLSLEGERQPKSPGSTPTTPTSSQAPQKLDASAAAAPASLPPSSPAAPIATFSLLPAGGAPTVFSFGSSSLKSSATVTGEPPSYSSGSDSSKAAPGPGPSTFSFVPPSKASLAPTPAASPVAPSAASFSFGSSGFKPTLESTPVPSVSAPNIAMKPSFPPSTSAVKVNLSENSSQSAPPMSPFSSASKPAASGPLSHPTPLSAPPSSVPLKSSVLPSPSAGRSAQGSSSPVPSMVQKSPRITPPAAKPGSPQAKSLQPAVAEKQGHQWKDSDPVMAGIGEEIAHFQKELEELKARTSKACFQVGTSEEMKMLRTESDDLHTFLLEIKETTESLHGDISSLKTTLLEGFAGVEEAREQNERNRDSGYLHLLYKRPLDPKSEAQLQEIRRLHQYVKFAVQDVNDVLDLEWDQHLEQKKKQRHLLVPERETLFNTLANNREIINQQRKRLNHLVDSLQQLRLYKQTSLWSLSSAVPSQSSIHSFDSDLESLCNALLKTTIESHTKSLPKVPAKLSPMKQAQLRNFLAKRKTPPVRSTAPASLSRSAFLSQRYYEDLDEVSSTSSVSQSLESEDARTSCKDDEAVVQAPRHAPVVRTPSIQPSLLPHAAPFAKSHLVHGSSPGVMGTSVATSASKIIPQGADSTMLATKTVKHGAPSPSHPISAPQAAAAAALRRQMASQAPAVNTLTESTLKNVPQVVNVQELKNNPATPSTAMGSSVPYSTAKTPHPVLTPVAANQAKQGSLINSLKPSGPTPASGQLSSGDKASGTAKIETAVTSTPSASGQFSKPFSFSPSGTGFNFGIITPTPSSNFTAAQGATPSTKESSQPDAFSSGGGSKPSYEAIPESSPPSGITSASNTTPGEPAASSSRPVAPSGTALSTTSSKLETPPSKLGELLFPSSLAGETLGSFSGLRVGQADDSTKPTNKASSTSLTSTQPTKTSGVPSGFNFTAPPVLGKHTEPPVTSSATTTSVAPPAATSTSSTAVFGSLPVTSAGSSGVISFGGTSLSAGKTSFSFGSQQTNSTVPPSAPPPTTAATPLPTSFPTLSFGSLLSSATTPSLPMSAGRSTEEATSSALPEKPGDSEVSASAASLLEEQQSAQLPQAPPQTSDSVKKEPVLAQPAVSNSGTAASSTSLVALSAEATPATTGVPDARTEAVPPASSFSVPGQTAVTAAAISSAGPVAVETSSTPIASSTTSIVAPGPSAEAAAFGTVTSGSSVFAQPPAASSSSAFNQLTNNTATAPSATPVFGQVAASTAPSLFGQQTGSTASTAAATPQVSSSGFSSPAFGTTAPGVFGQTTFGQASVFGQSASSAASVFSFSQPGFSSVPAFGQPASSTPTSTSGSVFGAASSTSSSSSFSFGQSSPNTGGGLFGQSNAPAFGQSPGFGQGGSVFGGTSAATTTAATSGFSFCQASGFGSSNTGSVFGQAASTGGIVFGQQSSSSSGSVFGSGNTGRGGGFFSGLGGKPSQDAANKNPFSSASGGFGSTATSNTSNLFGNSGAKTFGGFASSSFGEQKPTGTFSSGGGSVASQGFGFSSPNKTGGFGAAPVFGSPPTFGGSPGFGGVPAFGSAPAFTSPLGSTGGKVFGEGTAAASAGGFGFGSSSNTTSFGTLASQNAPTFGSLSQQTSGFGTQSSGFSGFGSGTGGFSFGSNNSSVQGFGGWRS

SEQ ID NO: 14239 - protein, 165 aa, Homo sapiens
MDSFDLALLQEWDLESLWGEDILNQRNDSLVVEFQSSASRCRSVYEPDRNALRRKERERRNQETQQDDGTFNSSYSLFSEPYKTNKGDELSNRIQNTLGNYDEMKDFLTDRSNQSHLVGVPKPGVPQTPVNKIDEHFVADSRAQNQPSSICSTTTSTPAAVPVQQ

SEQ ID NO: 14240 - protein, 551 aa, Homo sapiens
MGFDVLLDQVGGMGRFQICLIAFFCITNILLFPNIVLENFTAFTPSHRCWVPLLDNDTVSDNDTGTLSKDDLLRISIPLDSNLRPQKCQRFIHPQWQLLHLNGTFPNTNEPDTEPCVDGWVYDRSSFLSTIVTEWDLVCESQSLKSMVQSLFMAGSLLGGLIYGHLSDRVGRKIICKLCFLQLAISNTCAAFAPTFLVYCILRFLAGFSTMTILGNTFILSLEWTLPRSRSMTIMVLLCSYSVGQMLLGGLAFAIQDWHILQLTVSTPIIVLFLSSWKMVESARWLIINNQLDEGLKELRRVAHINGKKNTEETLTTELVRSTMKKELDAVRIKTSIFSLFRAPKLRMRVFGLCFVRFAITVPFYGLILNLQHLGSNVSLFQILCGAVTFTARCVSLLTLNHMGRRISQILFTFPVGLFILVNTFLPQEMQILRVVLATLGIGSVSAASNSASVHHNELVPTILRSTVAGINAVSGRTGAALAPLLMTLMAYSPHLPWISYGVFPILAVPVILLLPETRDLPLPNTIQDVENEKDSRNIKQEDTCMKVTQF

SEQ ID NO: 14241 - protein, 145 aa, Homo sapiens
MAVWLAQWLGPLLLVSLWGLLAPASLLRRLGEHIQQFQESSAQGLGLSLGPGAAALPKVGWLEQLLDPFNVSDRRSFLQRYWVNDQHWVGQDGPIFLHLGGEGSLGPGSVMRDCLAQPGPEVFKLFPSRDSGTAEEHRTSTVWCG

SEQ ID NO: 14242 - protein, 2272 aa, Homo sapiens
MSCNGGSHPRINTLGRMIRAESGPDLRYEVTSGGGGTSRMYYSRRGVITDQNSDGYCQTGTMSRHQNQNTIQELLQNCSDCLMRAELIVQPELKYGDGIQLTRSRELDECFAQANDQMEILDSLIREMRQMGQPCDAYQKRLLQLQEQMRALYKAISVPRVRRASSKGGGGYTCQSGSGWDEFTKHVTSECLGWMRQQRAEMDMVAWGVDLASVEQHINSHRGIHNSIGDYRWQLDKIKADLREKSAIYQLEEEYENLLKASFERMDHLRQLQNIIQATSREIMWINDCEEEELLYDWSDKNTNIAQKQEAFSIRMSQLEVKEKELNKLKQESDQLVLNQHPASDKIEAYMDTLQTQWSWILQITKCIDVHLKENAAYFQFFEEAQSTEAYLKGLQDSIRKKYPCDKNMPLQHLLEQIKELEKEREKILEYKRQVQNLVNKSKKIVQLKPRNPDYRSNKPIILRALCDYKQDQKIVHKGDECILKDNNERSKWYVTGPGGVDMLVPSVGLIIPPPNPLAVDLSCKIEQYYEAILALWNQLYINMKSLVSWHYCMIDIEKIRAMTIAKLKTMRQEDYMKTIADLELHYQEFIRNSQGSEMFGDDDKRKIQSQFTDAQKHYQTLVIQLPGYPQHQTVTTTEITHHGTCQDVNHNKVIETNRENDKQETWMLMELQKIRRQIEHCEGRMTLKNLPLADQGSSHHITVKINELKSVQNDSQAIAEVLNQLKDMLANFRGSEKYCYLQNEVFGLFQKLENINGVTDGYLNSLCTVRALLQAILQTEDMLKVYEARLTEEETVCLDLDKVEAYRCGLKKIKNDLNLKKSLLATMKTELQKAQQIHSQTSQQYPLYDLDLGKFGEKVTQLTDRWQRIDKQIDFRLWDLEKQIKQLRNYRDNYQAFCKWLYDAKRRQDSLESMKFGDSNTVMRFLNEQKNLHSEISGKRDKSEEVQKIAELCANSIKDYELQLASYTSGLETLLNIPIKRTMIQSPSGVILQEAADVHARYIELLTRSGDYYRFLSEMLKSLEDLKLKNTKIEVLEEELRLARDANSENCNKNKFLDQNLQKYQAECSQFKAKLASLEELKRQAELDGKSAKQNLDKCYGQIKELNEKITRLTYEIEDEKRRRKSVEDRFDQQKNDYDQLQKARQCEKENLGWQKLESEKAIKEKEYEIERLRVLLQEEGTRKREYENELAKASNRIQESKNQCTQVVQERESLLVKIKVLEQDKARLQRLEDELNRAKSTLEAETRVKQRLECEKQQIQNDLNQWKTQYSRKEEAIRKIESEREKSEREKNSLRSEIERLQAEIKRIEERCRRKLEDSTRETQSQLETERSRYQREIDKLRQRPYGSHRETQTECEWTVDTSKLVFDGLRKKVTAMQLYECQLIDKTTLDKLLKGKKSVEEVASEIQPFLRGAGSIAGASASPKEKYSLVEAKRKKLISPESTVMLLEAQAATGGIIDPHRNEKLTVDSAIARDLIDFDDRQQIYAAEKAITGFDDPFSGKTVSVSEAIKKNLIDRETGMRLLEAQIASGGVVDPVNSVFLPKDVALARGLIDRDLYRSLNDPRDSQKNFVDPVTKKKVSYVQLKERCRIEPHTGLLLLSVQKRSMSFQGIRQPVTVTELVDSGILRPSTVNELESGQISYDEVGERIKDFLQGSSCIAGIYNETTKQKLGIYEAMKIGLVRPGTALELLEAQAATGFIVDPVSNLRLPVEEAYKRGLVGIEFKEKLLSAERAVTGYNDPETGNIISLFQAMNKELIEKGHGIRLLEAQIATGGIIDPKESHRLPVDIAYKRGYFNEELSEILSDPSDDTKGFFDPNTEENLTYLQLKERCIKDEETGLCLLPLKEKKKQVQTSQKNTLRKRRVVIVDPETNKEMSVQEAYKKGLIDYETFKELCEQECEWEEITITGSDGSTRVVLVDRKTGSQYDIQDAIDKGLVDRKFFDQYRSGSLSLTQFADMISLKNGVGTSSSMGSGVSDDVFSSSRHESVSKISTISSVRNLTIRSSSFSDTLEESSPIAAIFDTENLEKISITEGIERGIVDSITGQRLLEAQACTGGIIHPTTGQKLSLQDAVSQGVIDQDMATRLKPAQKAFIGFEGVKGKKKMSAAEAVKEKWLPYEAGQRFLEFQYLTGGLVDPEVHGRISTEEAIRKGFIDGRAAQRLQDTSSYAKILTCPKTKLKISYKDAINRSMVEDITGLRLLEAASVSSKGLPSPYNMSSAPGSRSGSRSGSRSGSRSGSRSGSRRGSFDATGNSSYSYSYSFSSSSIGH

SEQ ID NO: 14243 - protein, 578 aa, Homo sapiens
MDPDKQDALNSIENSIYRTAFKLQSVQTLCQLDLIDSSLIQQVLLRPSFWEARKHSLSVQQLSQALQELFQKAREENPGQVHPRAPELTLSLLTTMYNSKGTGFLQLMPAAAALITLSGDSPLSKYRALFQLYAENSRGGYDSGPRMTRRVLRKLLTDLQQIPTFVGESRALCPVESATRSCFQGVLSPAIKEEKFLSWVQSEPPILLWLPTCHRLSAAERVTHPARCTLCRTFPITGLRYRCLKCLNFDICQMCFLSGLHSKSHQKSHPVIEHCIQMSAMQNTKLLFRTLRNNLLQGRCRKKEAARRQQLLDQVNPKGVPHHAQARLLKKQLNQYKDKLQAIYTSQEERICRFETRIHKLKTNQDSLWTKLQQIRRDLQARLQPPGPSSSSFQNVGNKVDHSSTEKVPKGGDYLQIKNATEDASTGEPLPKLDEVDRSHRSHTNAEHALRNPESPETTLHSTRAQSQTQKMPQKVISALPSYQEGLKQDIPKMVPAEMSSPALAAVEKKEAGNIKERKDELEEEELQELLSKLMDAFNLETPSGPESSVNMDLYSGAQRVCRAFSALVDQIALPNLK

SEQ ID NO: 14244 - protein, 762 aa, Homo sapiens
MLASPEPKGLVPFTKESFELIKQHIAKTHNEDHEEEDLKPTPDLEVGKKLPFIYGNLSQGMVSEPLEDVDPYYYKKKNTFIVLNKNRTIFRFNAASILCTLSPFNCIRRTTIKVLVHPFFQLFILISVLIDCVFMSLTNLPKWRPVLENTLLGIYTFEILVKLFARGVWAGSFSFLGDPWNWLDFSVTVFEVIIRYSPLDFIPTLQTARTLRILKIIPLNQGLKSLVGVLIHCLKQLIGVIILTLFFLSIFSLIGMGLFMGNLKHKCFRWPQENENETLHNRTGNPYYIRETENFYYLEGERYALLCGNRTDAGQCPEGYVCVKAGINPDQGFTNFDSFGWALFALFRLMAQDYPEVLYHQILYASGKVYMIFFVVVSFLFSFYMASLFLGILAMAYEEEKQRVGEISKKIEPKFQQTGKELQEGNETDEAKTIQIEMKKRSPISTDTSLDVLEDATLRHKEELEKSKKICPLYWYKFAKTFLIWNCSPCWLKLKEFVHRIIMAPFTDLFLIICIILNVCFLTLEHYPMSKQTNTLLNIGNLVFIGIFTAEMIFKIIAMHPYGYFQVGWNIFDSMIVFHGLIELCLANVAGMALLRLFRMLRIFKLGKYWPTFQILMWSLSNSWVALKDLVLLLFTFIFFSAAFGMKLFGKNYEEFVCHIDKDCQLPRWHMHDFFHSFLNVFRILCGEWVETLWDCMEVAGQSWCIPFYLMVILIGNLLGLGGLRKLTITVEEEAGMSFTLQQQGEVQSEGTLPVSGIGELI

SEQ ID NO: 14245 - protein, 1235 aa, Homo sapiens
MANGGGGGGGSSGGGGGGGGSSLRMSSNIHANHLSLDASSSSSSSSSSSSSSSSSSSSSSVHEPKMDALIIPVTMEVPCDSRGQRMWWAFLASSMVTFFGGLFIILLWRTLKYLWTVCCHCGGKTKEAQKINNGSSQADGTLKPVDEKEEAVAAEVGWMTSVKDWAGVMISAQTLTGRVLVVLVFALSIGALVIYFIDSSNPIESCQNFYKDFTLQIDMAFNVFFLLYFGLRFIAANDKLWFWLEVNSVVDFFTVPPVFVSVYLNRSWLGLRFLRALRLIQFSEILQFLNILKTSNSIKLVNLLSIFISTWLTAAGFIHLVENSGDPWENFQNNQALTYWECVYLLMVTMSTVGYGDVYAKTTLGRLFMVFFILGGLAMFASYVPEIIELIGNRKKYGGSYSAVSGRKHIVVCGHITLESVSNFLKDFLHKDRDDVNVEIVFLHNISPNLELEALFKRHFTQVEFYQGSVLNPHDLARVKIESADACLILANKYCADPDAEDASNIMRVISIKNYHPKIRIITQMLQYHNKAHLLNIPSWNWKEGDDAICLAELKLGFIAQSCLAQGLSTMLANLFSMRSFIKIEEDTWQKYYLEGVSNEMYTEYLSSAFVGLSFPTVCELCFVKLKLLMIAIEYKSANRESRILINPGNHLKIQEGTLGFFIASDAKEVKRAFFYCKACHDDITDPKRIKKCGCKRPKMSIYKRMRRACCFDCGRSERDCSCMSGRVRGNVDTLERAFPLSSVSVNDCSTSFRAFEDEQPSTLSPKKKQRNGGMRNSPNTSPKLMRHDPLLIPGNDQIDNMDSNVKKYDSTGMFHWCAPKEIEKVILTRSEAAMTVLSGHVVVCIFGDVSSALIGLRNLVMPLRASNFHYHELKHIVFVGSIEYLKREWETLHNFPKVSILPGTPLSRADLRAVNINLCDMCVILSANQNNIDDTSLQDKECILASLNIKSMQFDDSIGVLQANSQGFTPPGMDRSSPDNSPVHGMLRQPSITTGVNIPIITELVNDTNVQFLDQDDDDDPDTELYLTQPFACGTAFAVSVLDSLMSATYFNDNILTLIRTLVTGGATPELEALIAEENALRGGYSTPQTLANRDRCRVAQLALLDGPFADLGDGGCYGDLFCKALKTYNMLCFGIYRLRDAHLSTPSQCTKRYVITNPPYEFELVPTDLIFCLMQFDHNAGQSRASLSHSSHSSQSSSKKSSSVHSIPSTANRQNRPKSRESRDKQKKEMVYR

SEQ ID NO: 14246 - protein, 653 aa, Homo sapiens
MKSPPLLSPCLSWKRMAGIFFLPFISSGFAPRFKQEENFMLGRAHPSQPRFNWSHLTPLELKNRSVGLGTESTGRGKPHFTLEGHKFLIFGGSIHYFRVPREYWRDRLLKLKACGFNTVTTYVPWNLHEPERGKFDFSGNLDLEAFVLMAAEIGLWVILRPGRYICSEMDLGGLPSWLLQDPRLLLRTTNKSFIEAVEKYFDHLIPRVIPLQYRQAGPVIAVQVENEYGSFNKDKTYMPYLHKALLRRGIVELLLTSDGEKHVLSGHTKGVLAAINLQKLHQDTFNQLHKVQRDKPLLIMEYWVGWFDRWGDKHHVKDAKEVEHAVSEFIKYEISFNVYMFHGGTNFGFMNGATYFGKHSGIVTSYDYDAVLTEAGDYTEKYLKLQKLFQSVSATPLPRVPKLPPKAVYPPVRPSLYLPLWDALSYLNEPVRSRQPVNMENLPINNGSGQSYGLVLYEKSICSGGRLRAHAHDVAQVFLDETMIGILNENNKDLHIPELRDCRYLRILVENQGRVNFSWQIQNEQKGITGSVSINNSSLEGFTIYSLEMKMSFFERLRSATWKPVPDSHQGPAFYCGTLKAGPSPKDTFLSLLNWNYGFVFINGRNLGRYWNIGPQKTLYLPGVWLHPEDNEVILFEKMMSGSDIKSTDKPTL

SEQ ID NO: 14247 - protein, 2230 aa, Homo sapiens
MGSQTLQILRQGVWAALSGGWYYDPHQATFVNALHLYLWLFLLGLPFTLYMALPSTMIIVAVYCPVIAAVFIVLKMVNYRLHRALDAGEVVDRTANEFTDQRTKAEQGNCSTRRKDSNGPSDPGGGIEMSEFIREATPPVGCSSRNSYAGLDPSNQIGSGSSRLGTAATIKGDTDTAKTSDDISLSLGQSSSLCKEGSEEQDLAADRKLFRLVSNDSFISIQPSLSSCGQDLPRDFSDKVNLPSHNHHHHVDQSLSSACDTEVASLVPLHSHSYRKDHRPRGVPRTSSSAVAFPDTSLNDFPLYQQRRGLDPVSELESSKPLSGSKESLVENSGLSGEFQLAGDLKINTSQPPTKSGKSKPLKAEKSMDSLRSLSTRSSGSTESYCSGTDRDTNSTVSSYKSEQTSSTHIESILSEHEESPKAGTKSGRKKECCAGPEEKNSCASDKRTSSEKIAMEASTNSGVHEAKDPTPSDEMHNQRGLSTSASEEANKNPHANEFTSQGDRPPGNTAENKEEKSDKSAVSVDSKVRKDVGGKQKEGDVRPKSSSVIHRTASAHKSGRRRTGKKRASSFDSSRHRDYVCFRGVSGTKPHSAIFCHDEDSSDQSDLSRASSVQSAHQFSSDSSSSTTSHSCQSPEGRYSALKTKHTHKERGTDSEHTHKAHLVPEGTSKKRATRRTSSTNSAKTRARVLSLDSGTVACLNDSNRLMAPESIKPLTTSKSDLEAKEGEVLDELSLLGRASQLETVTRSRNSLPNQVAFPEGEEQDAVSGGKFSSTLYETGGCDMSLVNFEPAARRASNICDTDSHVSSSTSVRFYPHDVIRLNRLLTIDTDLLEQQDIDLSPDLAATYGPTEEAAQKVKHYYRFWILPQLWIGINFDRLTLLALFDRNREILENVLAVILAILVAFLGSILLIQGFFRDIWVFQFCLVIASCQYSLLKSVQPDSSSPRHGHNRIIAYSRPVYFCICCGLIWLLDYGSRNLTATKFKLYGITFTNPLVFISARDLVIVFTLCFPIVFFIGLLPQVNTFVMYLCEQLDIHIFGGNATTSLLAALYSFICSIVAVALLYGLCYGALKDSWDGQHIPVLFSIFCGLLVAVSYHLSRQSSDPSVLFSLVQSKIFPKTEEKNPEDPLSEVKDPLPEKLRNSVSERLQSDLVVCIVIGVLYFAIHVSTVFTVLQPALKYVLYTLVGFVGFVTHYVLPQVRKQLPWHCFSHPLLKTLEYNQYEVRNAATMMWFEKLHVWLLFVEKNIIYPLIVLNELSSSAETIASPKKLNTELGALMITVAGLKLLRSSFSSPTYQYVTVIFTVLFFKFDYEAFSETMLLDLFFMSILFNKLWELLYKLQFVYTYIAPWQITWGSAFHAFAQPFAVPHSAMLFIQAAVSAFFSTPLNPFLGSAIFITSYVRPVKFWERDYNTKRVDHSNTRLASQLDRNPGSDDNNLNSIFYEHLTRSLQHSLCGDLLLGRWGNYSTGDCFILASDYLNALVHLIEIGNGLVTFQLRGLEFRGTYCQQREVEAITEGVEEDEGFCCCEPGHIPHMLSFNAAFSQRWLAWEVIVTKYILEGYSITDNSAASMLQVFDLRKVLTTYYVKGIIYYVTTSSKLEEWLANETMQEGLRLCADRNYVDVDPTFNPNIDEDYDHRLAGISRESFCVIYLNWIEYCSSRRAKPVDVDKDSSLVTLCYGLCVLGRRALGTASHHMSSNLESFLYGLHALFKGDFRISSIRDEWIFADMELLRKVVVPGIRMSIKLHQDHFTSPDEYDDPTVLYEAIVSHEKNLVIAHEGDPAWRSAVLANSPSLLALRHVMDDGTNEYKIIMLNRRYLSFRVIKVNKECVRGLWAGQQQELVFLRNRNPERGSIQNAKQALRNMINSSCDQPIGYPIFVSPLTTSYSDSHEQLKDILGGPISLGNIRNFIVSTWHRLRKGCGAGCNSGGNIEDSDTGGGTSCTGNNATTANNPHSNVTQGSIGNPGQGSGTGLHPPVTSYPPTLGTSHSSHSVQSGLVRQSPARASVASQSSYCYSSRHSSLRMSTTGFVPCRRSSTSQISLRNLPSSIQSRLSMVNQMEPSGQSGLACVQHGLPSSSSSSQSIPACKHHTLVGFLATEGGQSSATDAQPGNTLSPANNSHSRKAEVIYRVQIVDPSQILEGINLSKRKELQWPDEGIRLKAGRNSWKDWSPQEGMEGHVIHRWVPCSRDPGTRSHIDKAVLLVQIDDKYVTVIETGVLELGAEV

SEQ ID NO: 14248 - protein, 1323 aa, Homo sapiens
MALSPGANLVFHEDPKMTPSPPSCGAPGLGSGTIPQPHPDMAQVPMLNLLPSPGLALVPDLNDSLSPVSGEASGLVSENTPRPDDSRAIAPASLQITSSCSGEALDLDSKDVSRPDSQGRLCPASNPILSPSSTEAPRLSSGNHPQSNSEDAFKCLSSKIFKLGQRNSNPSRHELNPFIRHHSREGLVLGHCISRPSSKALLIPTSNSSLDLDSNPLLNMGSRNTSKLNLNVAPDSHGTLIPDTNETITLASHNISESVSKGAFSTTWSTSSKETMNVASSGHSRSDLSVTITQASYVTLIPGSSYGISLHSSTHEPNSTISPPSCMTLILGSNETLSLDSSLLFSDTSTLTLSSQQDDAKDNSIHTVPLEENLESWSEMASIKVGQFPLGFPISNPAGKDAVTLQGIPEGAFDEVTSCLVKVPEKTEGGNNMALVENVTTLQKSQDLLEAEGEKKTMIKKIMRQIQEEPLDSLSSSVRKQAMEILTQLSHTQPTLGMRERSELVNVCVHSVFSLPSVQAMQEKDEAKAETIQALYHQTLEALQTLLKALFIEDPTPAGLKSILEALGPWMNSGKAHERARAVNTNVSVLNHMLLTLPFFMPLGFPALGLLLGRLILHIGDPDEEIGCEALDGIIILYTILELQKRARDKEETNKKELYESNKHFLGPYNPVSPCQNILRVIEEFGDFLGPQQIKDLLLAALEGLKGSSEAPGKDSREMMQLASEVMLSSVLEWYRHRALEVIPEIMQGIYMQLSHIQEPRARQVALLPVSLLASSFMTEVVVALLMCPLPLNSNGAEMWRQLILCKPSCDVRDLLDLLLGSLKEKPVTKEGRASIVPLAAASGLCELLSVNSCMGRVRRIYPQLLLALLIQVHYHIGLNLPGCVAPPKDTKKGAQPSPFVPVRWVVKVVKTLLLRMGCSYETTFLEDQGGWELMEQVESHHRGVALLARAMVQYSCQELCRILYLLIPLLERGDEKHRITATAFFVELLQMEQVRRIPEEYSLGRMAEGLSHHDPIMKVLSIRGLVILARRSEKTAKVKALLPSMVKGLKNMDGMLVVEAVHNLKAVFKGRDQKLMDSAVYVEMLQILLPHFSDAREVVRSSCINLYGKVVQKLRAPRTQAMEEQLVSTLVPLLLTMQEGNSKVSQKCVKTLLRCSYFMAWELPKRAYSRKPWDNQQQTVAKICKCLVNTHRDSAFIFLSQSLEYAKNSRASLRKCSVMFIGSLVPCMESIMTEDRLNEVKAALDNLRHDPEASVCIYAAQVQDHILASCWQNSWLPHGNSWVCYSATTHRWSPSCENLPTSHQRRSWIMQALGSWKMSLKK

SEQ ID NO: 14249 - protein, 262 aa, Homo sapiens
MGSRPCSPSACLAPWWGQQPGGPGPAKRSRLEEPAGPESRAAPSPEDPAGTPAVDALTSMVVLDAGCALRVPLEDVDLVLELAPMSVLRVSLGGHTLIVIPEVLLSSVDECSGAQGDWSAGLEVDVFLGAHGEDVVVEQEVCASVPEIAAEEEAYEEDADSEFPELWMDSAAGSAAGLYPSARSMFSPYREGPIRGPCALAPNPSSERRSPRPIFDLEFHLLEPVPSSPLQPLPPSPSPGPHARPELPERPPCKVRRRLFQE

SEQ ID NO: 14250 - protein, 182 aa, Homo sapiens
MLFTVSCSKMSSIVDRDDSSIFDGLVEEDDKDKAKRVSRNKSEKKRRDQFNVLIKELGSMLPGNARKMDKSTVLQKSIDFLRKHKEITAQSDASEIRQDWKPTFLSNEEFTQLMLEALDGFFLAIMTDGSIIYVSESVTSLLEHLPSDLVDQSIFNFIPEGEHSEVYKILSTHLLESDSLTP

SEQ ID NO: 14251 - protein, 193 aa, Homo sapiens
MAQESPKNSAAEIPVTSNGEVDDSREHSFNREEFGYNADTQKLLAKNGETLLGAINFFIASVNTLVNKTIEDTLMTVKQYESARIEYDAYRTDLEELNLGPRDANTLPKIEQSQHLFQAHKEKYDKMRNDVSVKLKFLEENKVKVLHNQLVLFHNAIAAYFAGNQKQLEQTLKQFHIKLKTPGVDAPSWLEEQ

SEQ ID NO: 14252 - protein, 800 aa, Homo sapiens
MNYIFGNNTLLYSRGSRGGNTSSSHGSAGPKQKHWAKKGSSDELQAEPEPSRWQQIVAFFTRRHSFIDCISVATSSTQANPPPVLVNTDSLETPTYVNGTDADYEYEEITLERGNSGLGFSIAGGTDNPHIGDDSSIFITKIITGGAAAQDGRLRVNDCILRVNEVDVRDVTHSKAVEALKEAGSIVRLYVKRRKPVSEKIMEIKLIKGPKGLGFSIAGGVGNQHIPGDNSIYVTKIIEGGAAHKDGKLQIGDKLLAVNNVCLEEVTHEEAVTALKNTSDFVYLKVAKPTSMYMNDGYAPPDITNSSSQPVDNHVSPSSFLGQTPASPARYSPVSKAVLGDDEITREPRKVVLHRGSTGLGFNIVGGEDGEGIFISFILAGGPADLSGELRKGDRIISVNSVDLRAASHEQAAAALKNAGQAVTIVAQYRPEEYSRFEAKIHDLREQMMNSSISSGSGSLRTSQKRSLYVRALFDYDKTKDSGLPSQGLNFKFGDILHVINASDDEWWQARQVTPDGESDEVGVIPSKRRVEKKERARLKTVKFNSKTRDKGEIPDDMGSKGLKHVTSNASDSESSYLILITDEYGCSKGGQEEYVLSYEPVNQQEVNYTRPVIILGPMKDRINDDLISEFPDKFGSCVPHTTRPKRDYEVDGRDYHFVTSREQMEKDIQEHKFIEAGQYNNHLYGTSVQSVREVAEKGKHCILDVSGNAIKRLQIAQLYPISIFIKPKSMENIMEMNKRLTEEQARKTFERAMKLEQEFTEHFTAIVQGDTLEDIYNQVKQIIEEQSGSYIWVPAKEKL

SEQ ID NO: 14253 - protein, 2017 aa, Homo sapiens
MIILSKSQKSWIKGVFDKRECSTIIPSSKNPHRCTPVCQVCQNLIRCYCGRLIGDHAGIDYSWTISAAKGKESEQWSVEKHTTKSPTDTFGTINFQDGEHTHHAKYIRTSYDTKLDHLLHLMLKEWKMELPKLVISVHGGIQNFTMPSKFKEIFSQGLVKAAETTGAWIITEGINTGVSKHVGDALKSHSSHSLRKIWTVGIPPWGVIENQRDLIGKDVVCLYQTLDNPLSKLTTLNSMHSHFILSDDGTVGKYGNEMKLRRNLEKYLSLQKIHCRSRQGVPVVGLVVEGGPNVILSVWETVKDKDPVVVCEGTGRAADLLAFTHKHLADEGMLRPQVKEEIICMIQNTFNFSLKQSKHLFQILMECMVHRDCITIFDADSEEQQDLDLAILTALLKGTNLSASEQLNLAMAWDRVDIAKKHILIYEQHWKPDALEQAMSDALVMDRVDFVKLLIEYGVNLHRFLTIPRLEELYNTKQGPTNTLLHHLVQDVKQHTLLSGYRITLIDIGLVVEYLIGRAYRSNYTRKHFRALYNNLYRKYKHQRHSSGNRNESAESTLHSQFIRTAQPYKFKEKSIVLHKSRKKSKEQNVSDDPESTGFLYPYNDLLVWAVLMKRQKMAMFFWQHGEEATVKAVIACILYRAMAHEAKESHMVDDASEELKNYSKQFGQLALDLLEKAFKQNERMAMTLLTYELRNWSNSTCLKLAVSGGLRPFVSHTCTQMLLTDMWMGRLKMRKNSWLKIIISIILPPTILTLEFKSKAEMSHVPQSQDFQFMWYYSDQNASSSKESASVKEYDLERGHDEKLDENQHFGLESGHQHLPWTRKVYEFYSAPIVKFWFYTMAYLAFLMLFTYTVLVEMQPQPSVQEWLVSIYIFTNAIEVVREICISEPGKFTQKVKVWISEYWNLTETVAIGLFSAGFVLRWGDPPFHTAGRLIYCIDIIFWFSRLLDFFAVNQHAGPYVTMIAKMTANMFYIVIIMAIVLLSFGVARKAILSPKEPPSWSLARDIVFEPYWMIYGEVYAGEIDVCSSQPSCPPGSFLTPFLQAVYLFVQYIIMVNLLIAFFNNVYLDMESISNNLWKYNRYRYIMTYHEKPWLPPPLILLSHVGLLLRRLCCHRAPHDQEEGDVGLKLYLSKEDLKKLHDFEEQCVEKYFHEKMEDVNCSCEERIRVTSERVTEMYFQLKEMNEKVSFIKDSLLSLDSQVGHLQDLSALTVDTLKVLSAVDTLQEDEALLAKRKHSTCKKLPHSWSNVICAEVLGSMEIAGEKKYQYYSMPSSLLRSLAGGRHPPRVQRGALLEITNSKREATNVRNDQERQETQSSIVVSGVSPNRQAHSKYGQFLLVPSNLKRVPFSAETVLPLSRPSVPDVLATEQDIQTEVLVHLTGQTPVVSDWASVDEPKEKHEPIAHLLDGQDKAEQVLPTLSCTPEPMTMSSPLSQAKIMQTGGGYVNWAFSEGDETGVFSIKKKWQTCLPSTCDSDSSRSEQHQKQAQDSSLSDNSTRSAQSSECSEVGPWLQPNTSFWINPLRRYRPFARSHSFRFHKEEKLMKICKIKNLSGSSEIGQGAWVKAKMLTKDRRLSKKKKNTQGLQVPIITVNACSQSDQLNPEPGENSISEEEYSKNWFTVSKFSHTGVEPYIHQKMKTKEIGQCAIQISDYLKQSQEDLSKNSLWNSRSTNLNRNSLLKSSIGVDKISASLKSPQEPHHHYSAIERNNLMRLSQTIPFTPVQLFAGEEITVYRLEESSPLNLDKSMSSWSQRGRAAMIQVLSREEMDGGLRKAMRVVSTWSEDDILKPGQVFIVKSFLPEVVRTWHKIFQESTVLHLCLREIQQQRAAQKLIYTFNQVKPQTIPYTPRFLEVFLIYCHSANQWLTIEKYMTGEFRKYNNNNGDEITPTNTLEELMLAFSHWTYEYTRGELLVLDLQGVGENLTDPSVIKPEVKQSRGMVFGPANLGEDAIRNFIAKHHCNSCCRKLKLPDLKRNDYSPERINSTFGLEIKIESAEEPPARETGRNSPEDDMQL

SEQ ID NO: 14254 - protein, 847 aa, Homo sapiens
MGKKGKVGKSRRDKFYHLAKETGYRSRSAFKLIQLNRRFQFLQKARALLDLCAAPGGWLQVAAKFMPVSSLIVGVDLVPIKPLPNVVTLQQDITTERCRQALRKELKTWKVDVVLNDGAPNVGASWVHDAYSQAHLTLMALRLACDFLARGGSFITKVFRSRDYQPLLWIFQQLFRRVQATKPQASRHESAEIFVVCQGFLAPDKVDSKFFDPKFAFKEVEVQAKTVTELVTKKKPKAEGYAEGDLTLYHRTSVTDFLRAANPVDFLSKASEIMVDDEELAQHPATTEDIRVCCQDIRVLGRKELRSLLNWRTKLRRYVAKKLKEQAKALDISLSSGEEDEGDEEDSTAGTTKQPSKEEEEEEEEEQLNQTLAEMKAQEVAELKRKKKKLLREQRKQRERVELKMDLPGVSIADEGETGMFSLSTIRGHQLLEEVTQGDMSAADTFLSDLPRDDIYVSDVEDDGDDTSLDSDLDPEELAGVRGHQGLRDQKRMRLTEVQDDKEEEEEENPLLVPLEEKAVLQEEQANLWFSKGSFAGIEDDADEALEISQAQLLFENRRKGRQQQQKQQLPQTPPSCLKTEIMSPLYQDEAPKGTEASSGTEAATGLEGEEKDGISDSDSSTSSEEEESWEPLRGKKRSRGPKSDDDGFEIVPIEDPAKHRILDPEGLALGAVIASSKKAKRDLIDNSFNRYTFNEDEGELPEWFVQEEKQHRIRQLPVGKKEVEHYRKRWREINARPIKKVAEAKARKKRRMLKRLEQTRKKAEAVVNTVDISEREKVAQLRSLYKKAGLGKEKRHVTYVVAKKGVGRKVRRPAGVRGHFKVVDSRMKKDQRAQQRKEQKKKHKRK

SEQ ID NO: 14255 - protein, 378 aa, Homo sapiens
MKMASFLAFLLLNFRVCLLLLQLLMPHSAQFSVLGPSGPILAMVGEDADLPCHLFPTMSAETMELKWVSSSLRQVVNVYADGKEVEDRQSAPYRGRTSILRDGITAGKAALRIHNVTASDSGKYLCYFQDGDFYEKALVELKVAALGSDLHVDVKGYKDGGIHLECRSTGWYPQPQIQWSNNKGENIPTVEAPVVADGVGLYAVAASVIMRGSSGEGVSCTIRSSLLGLEKTASISIADPFFRSAQRWIAALAGTLPVLLLLLGGAGYFLWQQQEEKKTQFRKKKREQELREMAWSTMKQEQSTRVKLLEELRWRSIQYASRGERHSAYNEWKKALFKPGPPIGQTQQQTRGQGSPVALSQESAQRTDSWGPEEGGES

SEQ ID NO: 14256 - protein, 1451 aa, Homo sapiens
IFGSVTNIPAKDAAPVEKIDTMLVLEGSGNLVLYTGVVRVGKVFIPGLPAPSLTMSNTMPRPSTPLDGVSTPKPLSKLLGSLDEVVLLSPVPELRDSSKLHDSLYNEDCTFQQLGTYIHSIRDPVHNRVTLELSNGSMVRITIPEIATSELVQTCLQAIKFILPKEIAVQMLVKWYNVHSAPGGPSYHSEWNLFVTCLMNMMGYNTDRLAWTRNFDFEGSLSPVIAPKKARPSETGSDDDWEYLLNSDYHQNVESHLLNRSLCLSPSEASQMKDEDFSQNLSLDSSTLLFTHIPAIFFVLHLVYEELKLNTLMGEGICSLVELLVQLARDLKLGPYVDHYYRDYPTLVRTTGQVCTIDPGQTGFMHHPSFFTSEPPSIYQWVSSCLKGEGMPPYPYLPGICERSRLVVLSIALYILGDESLVSDESSQYLTRITIAPQKLQVEQEENRFSFRHSTSVSSLAERLVVWMTNVGFTLRDLETLPFGIALPIRDAIYHCREQPASDWPEAVCLLIGRQDLSKQACEGNLPKGKSVLSSDVPSGTETEEEDDGMNDMNHEVMSLIWSEDLRVQDVRRLLQSAHPVRVNVVQYPELSDHEFIEEKENRLLQLCQRTMALPVGRGMFTLFSYHPVPTEPLPIPKLNLTGRAPPRNTTVDLNSGNIDVPPNMTSWASFHNGVAAGLKIAPASQIDSAWIVYNKPKHAELANEYAGFLMALGLNGHLTKLATLNIHDYLTKGHEMTSIGLLLGVSAAKLGTMDMSITRLLSIHIPALLPPTSTELDVPHNVQVAAVVGIGLVYQGTAHRHTAEVLLAEIGRPPGPEMEYCTDRESYSLAAGLALGMVCLGHGSNLIGMSDLNVPEQLYQYMVGGHRRFQTGMHREKHKSPSYQIKEGDTINVDVTCPGATLALAMIYLKTNNRSIADWLRAPDTMYLLDFVKPEFLLLRTLARCLILWDDILPNSKWVDSNVPQIIRENSISLSEIELPCSEDLNLETLSQAHVYIIAGACLSLGFRFAGSENLSAFNCLHKFAKDFMTYLSAPNASVTGPHNLETCLSVVLLSLAMVMAGSGNLKVLQLCRFLHMKTGGEMNYGFHLAHHMALGLLFLGGGRYSLSTSNSSIAALLCALYPHFPAHSTDNRYHLQALRHLYVLAAEPRLLVPVDVDTNTPCYALLEVTYKGTQWYEQTKEELMAPTLLPELHLLKQIKVKGPRYWELLIDLSKGTQHLKSILSKDGVLYVKLRAGQLSYKEDPMGWQSLLAQTVANRNSEARAFKPETISAFTSDPALLSFAEYFCKPTVNMGQKQEILDLFSSVLYECVTQETPEMLPAYIAMDQAIRRLGRREMSETSELWQIKLVLEFFSSRSHQERLQNHPKRGLFMNSEFLPVVKCTIDNTLDQWLQVGGDMCVHAYLSGQPLEESQLSMLACFLVYHSVPAPQHLPPIGLEGLLKDLAGDSG

SEQ ID NO: 14257 - protein, 335 aa, Homo sapiens
MACLNPVPKLYRSVIEDVIEGVRNLFAEEGIEEQVLKDLKQLWETKVLQSKATEDFFRNSIQSPLFTLQLPHSLHQTLQSSTGWIPLVNEYSSLVIPAGRTLPSFTTAELGTSNSSANFTFPGYPIHVPAGVTLQTVSGHLYKVNVPIMVTETSGRAGILQHPIQQVFQQLGQPSVIQTSVPQLNPWSLQATTEKSQRIETVLQQPAILPSGPVDRKHLENATSDILVSPGNEHKIVPEALLCHQESSHYISLPGVVFSPQVSQTNSNVESVLSGSASMAQNLHDESLSTSPHGALHQHVTDIQLHILKNRMYGCDSVKQPRNIEEPSNIPVSEK

SEQ ID NO: 14258 - protein, 1621 aa, Homo sapiens
MAKSGGCGAGAGVGGGNGALTWVNNAAKKEESETANKNDSSKKLSVERVYQKKTQLEHILLRPDTYIGSVEPLTQFMWVYDEDVGMNCREVTFVPGLYKIFDEILVNAADNKQRDKNMTCIKVSIDPESNIISIWNNGKGIPVVEHKVEKVYVPALIFGQLLTSSNYDDDEKKVTGGRNGYGAKLCNIFSTKFTVETACKEYKHSFKQTWMNNMMKTSEAKIKHFDGEDYTCITFQPDLSKFKMEKLDKDIVALMTRRAYDLAGSCRGVKVMFNGKKLPVNGFRSYVDLYVKDKLDETGVALKVIHELANERWDVCLTLSEKGFQQISFVNSIATTKGGRHVDYVVDQVVGKLIEVVKKKNKAGVSVKPFQVKNHIWVFINCLIENPTFDSQTKENMTLQPKSFGSKCQLSEKFFKAASNCGIVESILNWVKFKAQTQLNKKCSSVKYSKIKGIPKLDDANDAGGKHSLECTLILTEGDSAKSLAVSGLGVIGRDRYGVFPLRGKILNVREASHKQIMENAEINNIIKIVGLQYKKSYDDAESLKTLRYGKIMIMTDQDQDGSHIKGLLINFIHHNWPSLLKHGFLEEFITPIVKASKNKQELSFYSIPEFDEWKKHIENQKAWKIKYYKGLGTSTAKEAKEYFADMERHRILFRYAGPEDDAAITLAFSKKKIDDRKEWLTNFMEDRRQRRLHGLPEQFLYGTATKHLTYNDFINKELILFSNSDNERSIPSLVDGFKPGQRKVLFTCFKRNDKREVKVAQLAGSVAEMSAYHHGEQALMMTIVNLAQNFVGSNNINLLQPIGQFGTRLHGGKDAASPRYIFTMLSTLARLLFPAVDDNLLKFLYDDNQRVEPEWYIPIIPMVLINGAEGIGTGWACKLPNYDAREIVNNVRRMLDGLDPHPMLPNYKNFKGTIQELGQNQYAVSGEIFVVDRNTVEITELPVRTWTQVYKEQVLEPMLNGTDKTPALISDYKEYHTDTTVKFVVKMTEEKLAQAEAAGLHKVFKLQTTLTCNSMVLFDHMGCLKKYETVQDILKEFFDLRLSYYGLRKEWLVGMLGAESTKLNNQARFILEKIQGKITIENRSKKDLIQMLVQRGYESDPVKAWKEAQEKAAEEDETQNQHDDSSSDSGTPSGPDFNYILNMSLWSLTKEKVEELIKQRDAKGREVNDLKRKSPSDLWKEDLAAFVEELDKVESQEREDVLAGMSGKAIKGKVGKPKVKKLQLEETMPSPYGRRIIPEITAMKADASKKLLKKKKGDLDTAAVKVEFDEEFSGAPVEGAGEEALTPSVPINKGPKPKREKKEPGTRVRKTPTSSGKPSAKKVKKRNPWSDDESKSESDLEETEPVVIPRDSLLRRAAAERPKYTFDFSEEEDDDADDDDDDNNDLEELKVKASPITNDGEDEFVPSDGLDKDEYTFSPGKSKATPEKSLHDKKSQDFGNLFSFPSYSQKSEDDSAKFDSNEEDSASVFSPSFGLKQTDKVPSKTVAAKKGKPSSDTVPKPKRAPKQKKVVEAVNSDSDSEFGIPKKTTTPKGKGRGAKKRKASGSENEGDYNPGRKTSKTTSKKPKKTSFDQDSDVDIFPSDFPTEPPSLPRTGRARKEVKYFAESDEEEDDVDFAMFN

SEQ ID NO: 14259 - protein, 597 aa, Homo sapiens
MEQLSDEEIDHGAEEDSDKEDQDLDKMFGAWLGELDKLTQSLDSDKPMEPVKRSPLRQETNMANFSYRFSIYNLNEALNQGETVDLDALMADLCSIEQELSSIGSGNSKRQITETKATQKLPVSRHTLKHGTLKGLSSSSNRIAKPSHASYSLDDVTAQLEQASLSMDEAAQQSVLEDTKPLVTNQHRRTASAGTVSDAEVHSISNSSHSSITSAASSMDSLDIDKVTRPQELDLTHQGQPITEEEQAAKLKAEKIRVALEKIKEAQVKKLVIRVHMSDDSSKTMMVDERQTVRQVLDNLMDKSHCGYSLDWSLVETVSELQMERIFEDHENLVENLLNWTRDSQNKLIFMERIEKYALFKNPQNYLLGKKETAEMADRNKEVLLEECFCGSSVTVPEIEGVLWLKDDGKKSWKKRYFLLRASGIYYVPKGKAKVSRDLVCFLQLDHVNVYYGQDYRNKYKAPTDYCLVLKHPQIQKKSQYIKYLCCDDVRTLHQWVNGIRIAKYGKQLYMNYQEALKRTESAYDWTSLSSSSIKSGSSSSSIPESQSNHSNQSDSGVSDTQPAGHVRSQSIVSSVFSEAWKRGTQLEESSKVTASF

SEQ ID NO: 14260 - protein, 349 aa, Homo sapiens
MPSKTKYNLVDDGHDLRIPLHNEDAFQHGICFEAKYVGSLDVPRPNSRVEIVAAMRRIRYEFKAKNIKKKKVSIMVSVDGVKVILKKKKKKKEWTWDESKMLVMQDPIYRIFYVSHDSQDLKIFSYIARDGASNIFRCNVFKSKKKSQAMRIVRTVGQAFEVCHKLSLQHTQQNADGQEDGESERNSNSSGDPGRQLTGAERASTATAEETDIDAVEVPLPGNDVLEFSRGVTDLDAVGKEGGSHTGSKVSHPQEPMLTASPRMLLPSSSSKPPGLGTETPLSTHHQMQLLQQLLQQQQQQTQVAVAQCVVGQIALVLSTAISMCLLLPNFSLALPSLLMEELESRYTC

SEQ ID NO: 14261 - protein, 232 aa, Homo sapiens
MRLPWELLVLQSFILCLADDSTLHGPIFIQEPSPVMFPLDSEEKKVKLNCEVKGNPKPHIRWKLNGTDVDTGMDFRYSVVEGSLLINNPNKTQDAGTYQCTATNSFGTIVSREAKLQFAYLDNFKTRTRSTVSVRRGQGMVLLCGPPPHSGELSYAWIFNEYPSYQDNRRFVSQETGNLYIAKVEKSDVGNYTCVVTNTVTNHKVLGPPTPLILRNDVQYQLLSGEELMESQ

SEQ ID NO: 14262 - protein, 355 aa, Homo sapiens
MGVCGYLFLPWKCLVVVSLRLLFLVPTGVPVRSGDATFPKAMDNVTVRQGESATLRCTIDNRVTRVAWLNRSTILYAGNDKWCLDPRVVLLSNTQTQYSIEIQNVDVYDEGPYTCSVQTDNHPKTSRVHLIVQVSPKIVEISSDISINEGNNISLTCIATGRPEPTVTWRHISPKAVGFVSEDEYLEIQGITREQSGDYECSASNDVAAPVVRRVKVTVNYPPYISEAKGTGVPVGQKGTLQCEASAVPSAEFQWYKDDKRLIEGKKGVKVENRPFLSKLIFFNVSEHDYGNYTCVASNKLGHTNASIMLFEVKTTALTPWKGPGAVSEVSNGTSRRAGCVWLLPLLVLHLLLKF

SEQ ID NO: 14263 - protein, 121 aa, Homo sapiens
MLSTSRSRFIRNTNESGEEVTTFFDYDYGAPCHKFDVKQIGAQLLPPLYSLVFIFGFVGNMLVVLILINCKKLKCLTDIYLLNLAISDLLFLITLPLWAHSAANEWVFGNAMCKLFTGLYH

SEQ ID NO: 14264 - protein, 139 aa, Homo sapiens
MDMRWHCENLQTTDDILVASAECPSDDEDIDPCEPSSANPTRAGGREPYPGSAEVIRESSSTTGMVVGIVAAAALCILILLYAMYKYRNRDEGSYHVDESRNYISNSAQSNGAVVKEKQPSSAKSSNKNKKNKDKEYYV

SEQ ID NO: 14265 - protein, 345 aa, Homo sapiens
MTRGRAWGMRRAAAGAGGARAAGPTGGASRLHPNAGRRSGARAGAQGCGGPRVGSADSRALPAQPLACARGRSQRLVCDPKAASALPDLAPDVFVLRVRLEETGEMFRVANCRGDMTVRELKEELDLMVGIPFNLQRLQYLDEGVLMDDTTLKFHDVVPGGIISLCIWHHDGWTELVLAAVEGDPSKLSCLGLTEDSFYRTANSEHFEGEKWKHWTSQRAFVALYVASHRGHFDAVQYLLEHGASCLSRSPLGRTPLHVAAAMGRSDCIILLLQHGASIHDRDAKGETPISIAHRLNHTLSERQMVLLHRIAKSGIRDLNDLVMKNALQRVKSGFRSEKMTMTPH

SEQ ID NO: 14266 - protein, 290 aa, Homo sapiens
MLKAVILIGGPQKGTRFRPLSFEVPKPLFPVAGVPMIQHHIEACAQVPGMQEILLIGFYQPDEPLTQFLEAAQQEFNLPVRYLQEFAPLGTGGGLYHFRDQILAGSPEAFFVLNADVCSDFPLSAMLEAHRRQRHPFLLLGTTANRTQSLNYGCIVENPQTHEVLHYVEKPSTFISDIINCGIYLFSPEALKPLRDVFQRNQQDGQLEDSPGLWPGAGTIRLEQDVFSALAGQGQIYVHLTDGIWSQIKSAGSALYASRLYLSRYQDTHPERLAKHTPGGPWIRGPLFCF

SEQ ID NO: 14267 - protein, 333 aa, Homo sapiens
MGPLPAPSCTQRITWKGLLLTASLLNFWNPPTTAEVTIEAQPPKVSEGKDVLLLVHNLPQNLPGYFWYKGEMTDLYHYIISYIVDGKIIIYGPAYSGRETVYSNASLLIQNVTRKDAGTYTLHIIKRGDETREEIRHFTFTLYSKLPIPYITINNLNPRENKDVLAFTCEPKSENYTYIWWLNGQSLPVSPGVKRPIENRILILPSVTRNETGPYQCEIRDRYGGLRSNPVILNVLYGPDLPRIYPSFTYYRSGENLDLSCFTESNPPAEYFWTINGKFQQSGQKLFIPQITRNHSGLYACSVHNSATGKEISKSMTVKVSGPCHGDLTESQS

SEQ ID NO: 14268 - protein, 906 aa, Homo sapiens
MAHESERSSRLGVPCGEPAELGGDASEEDHPQVCAKCCAQFTDPTEFLAHQNACSTDPPVMVIIGGQENPNNSSASSEPRPEGHNNPQVMDTEHSNPPDSGSSVPTDPTWGPERRGEESSGHFLVAATGAETPKQAFFHLYHPLGSQHPFSAGGVGRSHKPTPAPSPALPGSTDQLIASPHLAFPSTTGLLAAQCLGAARGLEATASPGLLKPKNGSGELSYGEVMGPLEKPGGRHKCRFCAKVFGSDSALQIHLRSHTGERPYKCNVCGNRFTTRGNLKVHFHRHREKYPHVQMNPHPVPEHLDYVITSSGLPYGMSVPPEKAEEEAATPGGGVERKPLVASTTALSATESLTLLSTSAGTATAPGLPAFNKFVLMKAVEPKNKADENTPPGSEGSAISGVAESSTATRMQLSKLVTSLPSWALLTNHFKSTGSFPFPYVLEPLGASPSETSKLQQLVEKIDRQGAVAVTSAASGAPTTSAPAPSSSASSGPNQCVICLRVLSCPRALRLHYGQHGGERPFKCKVCGRAFSTRGNLRAHFVGHKASPAARAQNSCPICQKKFTNAVTLQQHVRMHLGGQIPNGGTALPEGGGAAQENGSEQSTVSGARSFPQQQSQQPSPEEELSEEEEEEDEEEEEDVTDEDSLAGRGSESGGEKAISVRGDSEEASGAEEEVGTVAAAATAGKEMDSNEKTTQQSSLPPPPPPDSLDQPQPMEQGSSGVLGGKEEGGKPERSSSPASALTPEGEATSVTLVEELSLQEAMRKEPGESSSRKACEVCGQAFPSQAALEEHQKTHPKEGPLFTCVFCRQGFLERATLKKHMLLAHHQNQYVAFLSNGLPMKPWNSSSTSTTTPSLAPPVLFGLGTVAGKVPPTMGSREAKEKTAPLLFQPPAPKAVPEKPIIDKK

SEQ ID NO: 14269 - protein, 889 aa, Homo sapiens
MPASISSIFPGPTLLLSCGSEELDSEDAPPCCRLALGEPPPYGAAPIGIPRPPPPRPGMHSPPPRPAPSPGTWESQPARSVRLGGPGGGAGGAGGGRVLECPSIRITSISPTPEPPAALEDNPDAWGDGSPRDYPPPEGFGGYREAGGQGGGAFFSPSPGSSSLSSWSFFSDASDEAALYAACDEVESELNEAASRFGLGSPLPSPRASPRPWTPEDPWSLYGPSPGGRGPEDSWLLLSAPGPTPASPRPASPCGKRRYSSSGTPSSASPALSRRGSLGEEGSEPPPPPPLPLARDPGSPGPFDYVGAPPAESIPQKTRRTSSEQAVALPRSEEPASCNGKLPLGAEESVAPPGGSRKEVAGMDYLAVPSPLAWSKARIGGHSPIFRTSALPPLDWPLPSQYEQLELRIEVQPRAHHRAHYETEGSRGAVKAAPGGHPVVKLLGYSEKPLTLQMFIGTADERNLRPHAFYQVHRITGKMVATASYEAVVSGTKVLEMTLLPENNMAANIDCAGILKLRNSDIELRKGETDIGRKNTRVRLVFRVHVPQGGGKVVSVQAASVPIECSQRSAQELPQVEAYSPSACSVRGGEELVLTGSNFLPDSKVVFIERGPDGKLQWEEEATVNRLQSNEVTLTLTVPEYSNKRVSRPVQVYFYVSNGRRKRSPTQSFRFLPVICKEEPLPDSSLRGFPSASATPFGTDMDFSPPRPPYPSYPHEDPACETPYLSEGFGYGMPPLYPQTGPPPSYRPGLRMFPETRGTTGCAQPPAVSFLPRPFPSDPYGGRGSSFSLGLPFSPPAPFRPPPLPASPPLEGPFPSQSDVHPLPAEGYNKVGPGYGPGEGAPEQEKSRGGYSSGFRDSVPIQGITLEEGGCGTGGCECECVQEIALHVC

SEQ ID NO: 14270 - protein, 1191 aa, Homo sapiens
IQWNNMYQALEQGGMTFGWVCWMILFDSSLYFLCGWYLSNLIPGTFGLRKPWYFPFTASYWKSVGFLVEKRQYFLSSSLFFFNENFDNKGSSLQNREGELEGSAPGVTLVSVTKEYEGHKAVVQDLSLTFYRDQITALLGTNGAGKTTIISMLTGLHPPTSGTIIINGKNLQTDLSRVRMELGVCPQQDILLDNLTVREHLLLFASIKAPQWTKKELHQQVNQTLQDVDLTQHQHKQTRALSGGLKRKLSLGIAFMGMSRTVVLDEPTSGVDPCSRHSLWDILLKYREGRTIIFTTHHLDEAEALSDRVAVLQHGRLRCCGPPFCLKEAYGQGLRLTLTRQPSVLEAHDLKDMACVTSLIKIYIPQAFLKDSSGSELTYTIPKDTDKACLKGLFQALDENLHQLHLTGYGISDTTLEEVFLMLLQDSNKKSHIALGTESELQNHRPTGHLSGYCGSLARPATVQGVQLLRAQVAAILARRLRRTLRAGKSTLADLLLPVLFVALAMGLFMVRPLATEYPPLRLTPGHYQRAETYFFSSGGDNLDLTRVLLRKFRDQDLPCADLNPRQKNSSCWRTDPFSHPEFQDSCGCLKCPNRSASAPYLTNHLGHTLLNLSGFNMEEYLLAPSEKPRLGGWSFGLKIPSEAGGANGNISKPPTLAKVWYNQKGFHSLPSYLNHLNNLILWQHLPPTVDWRQYGITLYSHPYGGALLNEDKILESIRQCGVALCIVLGFSILSASIGSSVVRDRVIGAKRLQHISGLGYRMYWFTNFLYDMLFYLVSVCLCVAVIVAFQLTAFTFRKNLAATALLLSLFGYATLPWMYLMSRIFSSSDVAFISYVSLNFIFGLCTMLITIMPRLLAIISKAKNLQNIYDVLKWVFTIFPQFCLGQGLVELCYNQIKYDLTHNFGIDSYVSPFEMNFLGWIFVQLASQGTVLLLLRVLLHWDLLRWPRGHSTLQGTVKSSKDTDVEKEEKRVFEGRTNGDILVLYNLSKHYRRFFQNIIAVQDISLGIPKGECFGLLGVNGAGKSTTFKMLNGEVSLTSGHAIIRTPMGDAVDLSSAGTAGVLIGYCPQQDALDELLTGWEHLYYYCSLRGIPRQCIPEVAGDLIRRLHLEAHADKPVATYSGGTKRKLSTALALVGKPDILLLDEPSSGMDPCSKRYLWQTIMKEVREGCAAVLTSHRFWYQDDAGLIK

SEQ ID NO: 14271 - protein, 613 aa, Homo sapiens
MEQKTVIPGMPTVIPPGLTREQERAYIVQLQIEDLTRKLRTGDLGIPPNPEDRSPSPEPIYNSEGKRLNTREFRTRKKLEEERHNLITEMVALNPDFKPPADYKPPATRVSDKVMIPQDEYPEINFVGLLIGPRGNTLKNIEKECNAKIMIRGKGSVKEGKVGRKDGQMLPGEDEPLHALVTANTMENVKKAVEQIRNILKQGIETPEDQNDLRKMQLRELARLNGTLREDDNRILRPWQSSETRSITNTTVCTKCGGAGHIASDCKFQRPGDPQSAQDKARMDKEYLSLMAELGEAPVPASVGSTSGPATTPLASAPRPAAPANNPPPPSLMSTTQSRPPWMNSGPSESRPYHGMHGGGPGGPGGGPHSFPHPLPSLTGGHGGHPMQHNPNGPPPPWMQPPPPPMNQGPHPPGHHGPPPMDQYLGSTPVGSGVYRLHQGKGMMPPPPMGMMPPPPPPPSGQPPPPPSGPLPPWQQQQQQPPPPPPPSSSMASSTPLPWQQNTTTTTTSAGTGSIPPWQQQQAAAAASPGAPQMQGNPTMVPLPPGVQPPLPPGAPPPPPPPPPGSAGMMYAPPPPPPPPMDPSNFVTMMGMGVAGMPPFGMPPAPPPPPPQN

SEQ ID NO: 14272 - protein, 1863 aa, Homo sapiens
MIEDKGPRVADYFVVAGLTDVSKPLEEEIHFNDACHKVAKPKEPITDVSVIIKSLGEEVPQDYICIDVTPTGLSADLNNGSLVGPQIYLCYRRGRDKPPLTDLGVLYDWKERLKQGCEIIQSTPYGRPANISGSTSSQRIYITYRRASENMTQNTLAVTDICIIIPSKGESPPHTFCKVDKNLNNSMWGSAVYLCYKKSVAKTNTVSYKAGLICRYPQEDYESFSLPESVPLFCLPMGATIECWPSNSKYPLPVFSTFVLTGASAEKVYGAAIQFYEPYSEENLTEKQRLLLGLTSADGKSDSSKTIHTNKCICLLSHWPFFDAFRKFLTFLYRYSISGPHVLPIEKHISHFMHKVPFPSPQRPRILVQLSPHDNLILSQPVSSPLPLSGGKFSTLLQNLGPENAVTLLVFAVTEHKILIHSLRPSVLTSVTEALVSMIFPFHWPCPYVPLCPLALADVLSAPCPFIVGIDSRYFDLYDPPPDVSCVDVDTNTISQIGDKKNVAWKILPKKPCKNLMNTLNNLHQQLAKLQQRPRDDGLMDLAINDYDFNSGKRLHMIDLEIQEAFLFFMASILKGYRSYLRPITQAPSETATDAASLFALQAFLRSRDRSHQKFYNMMTKTQMFIRFIEECSFVSDKDASLAFFDDCVDKVDMDKSGEVRLIELDESFKSEHTVFVTPPEIPHLPNGEEPPLQYSYNGFPVLRNNLFERPEGFLQAKKNKLPSKSSSPNSPLPMFRRTKQEIKSAHKIAKRYSSIPQMWSRCLLRHCYGLWFICLPAYVKVCHSKVRALKTAYDVLKKMQSKKMDPPDEVCYRILMQLCGQYDQPVLAVRVLFEMQKAGIDPNAITYGYYNKAVLESTWPSRSRSGYFLWTKVRNVVLGVTQFKRALKKHAHLSQTTLSGGQSDLGYNSLSKDEVRRGDTSTEDIQEEKDKKGSDCSSLSESESTKGSADCLPKLSYQNSSSIVRLTGTSNNSAGKISGESMESTPELLLISSLEDTNETRNIQSRCFRKRHKSDNETNLQQQVVWGNRNRNLSGGVLMGFMLNRINQEATPGDIVEKLGADAKILSNVISKSTRPNTLDIGKPPLRSKRDSLEKESSDDDTPFDGSNYLADKVDSPVIFDLEDLDSETDVSKAGCVATQNPKRIQRMNSSFSVKPFEKTDVATGFDPLSLLVAETEQQQKEEEEEDEDDSKSISTPSARRDLAEEIVMYMNNMSSPLTSRTPSIDLQRACDDKLNKKSPPLVKACRRSSLPPNSPKPVRLTKSKSYTKSEEKPRDRLWSSPAFSPTCPFREESQDTLTHSSPSFNLDTLLVPKLDVLRNSMFTAGKGVAEKASKWYSRFTMYTTSSKDQSSDRTSLSSVGAQDSESTSLTDEDVCHELEGPISSQETSATSGTKRIDLSRISLESSASLEGSLSKFALPGKSEVTSSFNASNTNIFQNYAMEVLISSCSRCRTCDCLVHDEEIMAGWTADDSNLNTTCPFCGNIFLPFLNIEIRDLRRPGRYFLKSSPSTENMHFPSSISSQTRQSCISTSASGLDTSALSVQGNFDLNSKSKLQENFCTRSIQIPANRSKTAMSKCPIFPMARSISTSGPLDKEDTGRQKLISTGSLPATLQGATDSLGLEWHLPSPDPVTVPYLSPLVVWKELESLLENEGDHAITVADFVDHHPIVFWNLVWYFRRLDLPSNLPGLILSSEHCNKYSKIPRHCMSEDSKYVLIQMLWDNMKLHQDPGQPLYILWNAHTQKYPMVHLLQKSDNSFNQELLKSMVKSIKMNDVYGPMSQILETLNKCPHFKRQRSLYREILFLSLVALGRENIDIDAFDKEYKMAYDRLTPSQVKSTHNCDRPPSTGVMECRKTFGEPYL

SEQ ID NO: 14273 - protein, 248 aa, Homo sapiens
MDHAEENEILAATQRYYVERPIFSHPVLQERLHTKDKVPDSIADKLKQAFTCTPKKIRNIIYMFLPITKWLPAYKFKEYVLGDLVSGISTGVLQLPQGLAFAMLAAVPPIFGLYSSFYPVIMYCFLGTSRHISIGPFAVISLMIGGVAVRLVPDDIVIPGGVNATNGTEARDALRVKVAMSVTLLSGIIQFCLGVCRFGFVAIYLTEPLVRGFTTAAAVHVFTSMLKYLFGVKTKRYSGIFSVVYASG

SEQ ID NO: 14274 - protein, 478 aa, Homo sapiens
MKSQGQHWYSSSDKNCKVSFREKLLIIDSNLGVQDVENLKFLCIGLVPNKKLEKSSSASDVFEHLLAEDLLSEEDPFFLAELLYIIRQKKLLQHLNCTKEEVERLLPTRQRVSLFRNLLYELSEGIDSENLKDMIFLLKDSLPKTEMTSLSFLAFLEKQGKIDEDNLTCLEDLCKTVVPKLLRNIEKYKREKAIQIVTPPVDKEAESYQGEEELVSQTDVKTFLEALPRAAVYRMNRNHRGLCVIVNNHSFTSLKDRQGTHKDAEILSHVFQWLGFTVHIHNNVTKVEMEMVLQKQKCNPAHADGDCFVFCILTHGRFGAVYSSDEALIPIREIMSHFTALQCPRLAEKPKLFFIQACQGEEIQPSVSIEADALNPEQAPTSLQDSIPAEADFLLGLATVPGYVSFRHVEEGSWYIQSLCNHLKKLVPRMLKFLEKTMEIRGRKRTVWGAKQISATSLPTAISAQTPRPPMRRWSSVS

SEQ ID NO: 14275 - protein, 117 aa, Homo sapiens
MMLTQAPSSVVRSRNSRNHTVNSGGSCLSASTVAIPAINDSSAAMSACSTISAQPASSMDTQMHSPKKQERVNKRVIWGIEVAEELHWKGWELGKETTRNLVLKNRSLKLQKMKYRP

SEQ ID NO: 14276 - protein, 508 aa, Homo sapiens
MYSSPLCLTQDEFHPFIEALLPHVRAFAYTWFNLQARKRKYFKKHEKRMSKDEERAVKDELLGEKPEVKQKWASRLLAKLRKDIRPECREDFVLSITGKKAPGCVLSNPDQKGKMRRIDCLRQADKVWRLDLVMVILFKGIPLESTDGERLVKAAQCGHPVLCVQPHHIGVAVKELDLYLAYFVRERDAEQSGSPRTGMGSDQEDSKPITLDTTDFQESFVTSGVFSVTELIQVSRTPVVTGTGPNFSLGELQGHLAYDLNPASTGLRRTLPSTSSSGSKRHKSGSMEEDVDTSPGGDYYTSPSSPTSSSRNWTEDMEGGISSPVKKTEMDKSPFNSPSPQDSPRLSSFTQHHRPVIAVHSGIARSPHPSSALHFPTTSILPQTASTYFPHTAIRYPPHLNPQDPLKDLVSLACDPASQQPGPLNGSGQLKMPSHCLSAQMLAPPPPGLPRLALPPATKPATTSEGGATSPTSPSYSPPDTSPANRSFVGLGPRDPAGIYQAQSWYLG

SEQ ID NO: 14277 - protein, 545 aa, Homo sapiens
MKQEDNQGVCAHQDSEDKGMGSDFEDSEDREGDPEEREMGSNPHDTNKREGHPEPEMGSNPQDSRHREAVPDICTEGQLSEEEGVSVRGEEDDQSGVADMAMFPGLSESDSISRSLREDDDESAGENRLEEEEEQPAPPVLPWRRHLSLGSRHRGDKPAHRRFHRLHHPMAVDLGELDSLVASIMDAPTICPDCGESFSPGAAFLQHQRIHRLAEAAAAASLEPFGLAGECDAMVGMMGVGVAGGFGAGPPLARPPREKPFRCGECGKGFSRNTYLTNHLRLHTGERPNLCADCGKSFSWRADLLKHRRLHTGEKPYPCPECGEAFSLSSHLLSHRRAHAAASGAGAAALRPFACGECGKGFVRRSHLANHQRIHTGEKPHGCGECGKRFSWRSDLVKHQRVHTGEKPYMCSECGETFSVSSHLFTHKRTHSGERPYVCRECGKGFGRNSHLVNHLRVHTGEKPFRCGQCEKRFSDFSTLTQHQRTHTGEKPYTCIECGKSFIQSSHLIRHRRIHTGNKPHKCAGCGKGFRYKTHLAQHQKLHLC

SEQ ID NO: 14278 - protein, 180 aa, Homo sapiens
NPIYEHIGYATLLREKVSRRLSRSKNEPRKTNVTHEEHTAVEKVHTFRGPHWCEYCANFMWGLIAQGVRCSDCGLNVHKQCSKHVPNDCQPDLKRIKKVYCCDLTTLVKAHNTQRPMVVDICIREIEARGLKSEGLYRVSGFTEHIEDVKMAFDRDGEKADISANVYPDINIITGALKLY

SEQ ID NO: 14279 - protein, 599 aa, Homo sapiens
MSPLFSWVAKVPEIISSIRQAGKIARQEELHCPSEFDDTFSKKFEVLFCGRVTVAHKKAPPALIDECIEKFNHVSGSRGSESPRPNPPHAAPTGSQEPVRRPMRKSFSQPGLRSLAFRKELQDGGLRSSGFFSSFEESDIENHLISGHNIVQPTDIEENRTMLFTIGQSEVYLISPDTKKIALEKNFKEISFCSQGIRHVDHFGFICRESSGGGGFHFVCYVFQCTNEALVDEIMMTLKQAFTVAAVQQTAKAPAQLCEGCPLQSLHKLCERIEGMNSSKTKLELQKHLTTLTNQEQATIFEEVQKLRPRNEQRENELIISFLRCLYEEKQKEHIHIGEMKQTSQMAAENIGSELPPSATRFRLDMLKNKAKRSLTESLESILSRGNKARGLQEHSISVDLDSSLSSTLSNTSKEPSVCEKEALPISESSFKLLGSSEDLSSDSESHLPEEPAPLSPQQAFRRRANTLSHFPIECQEPPQPARGSPGVSQRKLMRYHSVSTETPHERKDFESKANHLGDSGGTPVKTRRHSWRQQIFLRVATPQKACDSSSRYEDYSELGELPPRSPLEPVCEDGPFGPPPEEKKRTSRELRELWQKAI

SEQ ID NO: 14280 - protein, 747 aa, Homo sapiens
MLRACQLSGVTAAAQSCLCGKFVLRPLRPCRRYSTSGSSGLTTGKIAGAGLLFVGGGIGGTILYAKWDSHFRESVEKTIPYSDKLFEMVLGPAAYNVPLPKKSIQSGPLKISSVSEVMKESKQPASQLQKQKGDTPASATAGDTLSVPAPAVQPEESLKTDHPEIGEGKPTPALSEEASSSSIRERPPEEVAARLAQQEKQEQVKIESLAKSLEDALRQTASVTLQAIAAQNAAVQAVNAHSNILKAAMDNSEIAGEKKSAQWRTVEGALKERRKAVDEAADALLKAKEELEKMKSVIENAKKKEVAGAKPHITAAEGKLHNMIVDLDNVVKKVQAAQSEAKVVSQYHELVVQARDDFKRELDSITPEVLPGWKGMSVSDLADKLSTDDLNSLIAHAHRRIDQLNRELAEQKATEKQHITLALEKQKLEEKRAFDSAVAKALEHHRSEIQAEQDRKIEEVRDAMENEMRTQLRRQAAAHTDHLRDVLRVQEQELKSEFEQNLSEKLSEQELQFRRLSQEQVDNFTLDINTAYARLRGIEQAVQSHAVAEEEARKAHQLWLSVEALKYSMKTSSAETPTIPLGSAVEAIKANCSDNEFTQALTAAIPPESLTRGVYSEETLRARFYAVQKLARRVAMIDETRNSLYQYFLSYLQSLLLFPPQQLKPPPELCPEDINTFKLLSYASYCIEHGDLELAAKFVNQLKGESRRVAQDWLKEARMTLETKQIVEILTAYASAVGIGTTQVQPE

SEQ ID NO: 14281 - protein, 905 aa, Homo sapiens
MPVRRGHVAPQNTYLDTIIRKFEGQSRKFLIANAQMENCAIIYCNDGFCELFGYSRVEVMQQPCTCDFLTGPNTPSSAVSRLAQALLGAEECKVDILYYRKDASSFRCLVDVVPVKNEDGAVIMFILNFEDLAQLLAKCSSRSLSQRLLSQSFLGSEGSHGRPGGPGPGTGRGKYRTISQIPQFTLNFVEFNLEKHRSSSTTEIEIIAPHKVVERTQNVTEKVTQVLSLGADVLPEYKLQAPRIHRWTILHYSPFKAVWDWLILLLVIYTAVFTPYSAAFLLSDQDESRRGACSYTCSPLTVVDLIVDIMFVVDIVINFRTTYVNTNDEVVSHPRRIAVHYFKGWFLIDMVAAIPFDLLIFRTGSDETTTLIGLLKTARLLRLVRVARKLDRYSEYGAAVLFLLMCTFALIAHWLACICSLTSVGFGNVSPNTNSEKVFSICVMLIGSLMYASIFGNVSAIIQRLYSGTARYHTQMLRVKEFIRFHQIPNPLRQRLEEYFQHAWSYTNGIDMNAVLKGFPECLQADICLHLHRALLQHCPAFSGAGKGCLRALAVKFKTTHAPPGDTLVHLGDVLSTLYFISRGSIEILRDDVVVAILGKNDIFGEPVSLHAQPGKSSADVRALTYCDLHKIQRADLLEVLDMYPAFAESFWSKLEVTFNLRDAAGGLHSSPRQAPGSQDHQGFFLSDNQSDAAPPLSISDASGLWPELLQEMPPRHSPQSPQEDPDCWPLKLGSRLEQLQAQMNRLESRVSSDLSRILQLLQKPMPQGHASYILEAPASNDLALVPIASETTSPGPRLPQGFLPPAQTPSYGDLDDCSPKHRNSSPRMPHLAVATDKTLAPSSEQEQPEGLWPPLASPLHPLEVQGLICGPCFSSLPEHLGSVPKQLDFQRHGSDPGFAGSWGH

SEQ ID NO: 14282 - protein, 57 aa, Homo sapiens
FREVGPKNSYIAYIEDHSGNGTFVNTELVGKGKRRPLNNNSEIALSLSRNKVVPVER

SEQ ID NO: 14283 - protein, 544 aa, Homo sapiens
MPEELTSSLHAFKNKAFKKSKVCGVCKQIIDGQGISCRACKYSCHKKCEAKVVIPCGVQVRLEQAPGSSTLSSSLCRDKPLRPVILSPTMEEGHGLDLTYITERIIAVSFPAGCSEESYLHNLQEVTRMLKSKHGDNYLVLNLSEKRYDLTKLNPKIMDVGWPELHAPPLDKMCTICKAQESWLNSNLQHVVVIHCRGGKGRIGVVISSYMHFTNVSASADQALDRFAMKKFYDDKVSALMQPSQKRYVQFLSGLLSGSVKMNASPLFLHFVILHGTPNFDTGGVCRPFLKLYQAMQPVYTSGIYNVGPENPSRICIVIEPAQLLKGDVMVKCYHKKYRSATRDVIFRLQFHTGAVQGYGLVFGKEDLDNASKDDRFPDYGKVELVFSATPEKIQGSEHLYNDHGVIVDYNTTDPLIRWDSYENLSADGEVLHTQGPVDGSLYAKVRKKSSSDPGIPGGPQAIPATNSPDHSDHTLSVSSDSGHSTASARTDKTEERLAPGTRRGLSAQEKAELDQLLSGFGLEDPGSSLKEMTDARSKYSGTR

SEQ ID NO: 14284 - protein, 931 aa, Homo sapiens
MASPGIEVELLGKGHSDLGEVAPEIKASERRTAVAIADLEWREMEGDDCEFRYGDGTNEAQDNDFPTVERSRLQEMLSLLGLETYQVQKLSLQDSLQISFDSMKNWAPQVPKDLPWNFLRKLQALNADARNTTMVLDVLPDARPVEKESQMEEEIIYWDPADDLAADIYSFSELPTPDTPVNPLDLLCALLLSSDSFLQQEIALKMALCQFALPLVLPDSENHYHTFLLWAMRGIVRTWWSQPPRGMGSFREDSVVLSRAPAFAFVRMDVSSNSKSQLLNAVLSPGHRQWDCFWHRDLNLGTNAREISDGLVEISWFFPSGREDLDIFPEPVAFLNLRGDIGSHWLQFKLLTEISSAVFILTDNISKKEYKLLYSMKESTTKYYFILSPYRGKRNTNLRFLNKLIPVLKIDHSHVLVKVSSTDSDSFVKRIRAIVGNVLRAPCRRVSVEDMAHAARKLGLKVDEDCEECQKAKDRMERITRKIKDSDAYRRDELRLQGDPWRKAAQVEKEFCQLQWAVDPPEKHRAELRRRLLELRMQQNGHDPSSGVQEFISGISSPSLSEKQYFLRWMEWGLARVAQPRLRQPPETLLTLRPKHGGTTDVGEPLWPEPLGVEHFLREMGQFYEAESCLVEAGRLPAGQRRFAHFPGLASELLLTGLPLELIDGSTLSMPVRWVTGLLKELHVRLERRSRLVVLSTVGVPGTGKSTLLNTMFGLRFATGKSCGPRGAFMQLITVAEGFSQDLGCDHILVIDSGGLIGGALTSAGDRFELEASLATLLMGLSNVTVISLAETKDIPAAILHAFLRLEKTGHMPNYQFVYQNLHDVSVPGPRPRDKRQLLDPPGDLSRAAAQMEKQGDGFRALAGLAFCDPEKQHIWHIPGLWHGAPPMAAVSLAYSEAIFELKRCLLENIRNGLSNQNKNIQQLIELVRRL

SEQ ID NO: 14285 - protein, 555 aa, Homo sapiens
MPRRRPPASGAAQFPERIATRSPDPIPLCTFQRQVSEMAEDGSEEIMFIWCEDCSQYHDSECPELGPVVMVKDSFVLSRARSSLPPNLEIRRLEDGAEGVFAITQLVKRTQFGPFESRRVAKWEKESAFPLKVFQKDGHPVCFDTSNEDDCNWMMLVRPAAEAEHQNLTAYQHGSDVYFTTSRDIPPGTELRVWYAAFYAKKMDKPMLKQAGSGVHAAGTPENSAPVESEPSQWACKVCSATFLELQLLNEHLLGHLEQAKSLPPGSQSEAAAPEKEQDTPRGEPPAVPESENVATKEQKKKPRRGRKPKVSKAEQPLVIVEDKEPTEQVAEIITEVPPDEPVSATPDERIMELVLGKLATTTTDTSSVPKFTHHQNNTITLKRSLILSSRHGIRRKLIKQLGEHKRVYQCNICSKIFQNSSNLSRHVRSHGDKLFKCEECAKLFSRKESLKQHVSYKHSRNEVDGEYRYRCGTCEKTFRIESALEFHNCRTGLIAHPGEGGPGGSRLRDLPATSPSTRRSTATRSLPVRSAARCSTARTSCWTTSAGTWKECGE

SEQ ID NO: 14286 - protein, 265 aa, Homo sapiens
MLQLVAPRPRGCAPLGGTQKPDLLNFKKGWMSILDEPGEPPSPSLTTTSTSQWKKHWFVLTDSSLKYYRDSTAEEADELDGEIDLRSCTDVTEYAVQRNYGFQIHTKDAVYTLSAMTSGIRRNWIEALRKTVRPTSAPDVTKLSDSNKENALHSYSTQKGPLKAGEQRAGSEVISRGGPRKADGQRQALDYVELSPLTQASPQRARTPARTPDRLAKQEELERDLAQRSEERRKWFEATDSRTPEVPAGEGPRRGLGAPLTEDQQ

SEQ ID NO: 14287 - protein, 282 aa, Homo sapiens
MSLLATLGLELDRALLPASGLGWLVDYGKLPPAPAPLAPYEVLGGALEGGLPVGGEPLAGDGFSDWMTERVDFTALLPLEPPLPPGTLPQPSPTPPDLEAMASLLKKELEQMEDFFLDAPPLPPPSPPPLPPPPLPPAPSLPLSLPSFDLPQPPVLDTLDLLAIYCRNEAGQEEVGMPPLPPPQQPPPPSPPQPSRLAPYPHPATTRGDRKQKKRDQNKSAALRYRQRKRAEGEALEGECQGLEARNRELKERAESVEREIQYVKDLLIEVYKARSQRTRSC

SEQ ID NO: 14288 - protein, 17 aa, Homo sapiens
MSSVAVLTQESFAEHRS

SEQ ID NO: 14289 - protein, 126 aa, Homo sapiens
MSSVAVLTQESFAEHRSGLVPQQIKVATLNSEEESDPPTYKDAFPPLPEKAACLESAQEPAGAWGNKIRPIKASVITQVFHVPLEERKYKDMNQFGEGEQAKICLEIMQRTGAHLELSLAKDQGLS

SEQ ID NO: 14290 - protein, 780 aa, Homo sapiens
MTHTRRKSLPMLSSGLTGRREPLQMEDSNMEQGVEGVEPGMPESPGHLTGRRKNYPLRKRPLVPEKPKACKVLLTRLENVAGPRSADEADELPPDLPKPPSPAPSSEDPGLAQPRKRRLASLNAEALNNLLLEREDTSSLAGTRRSRAGDPHRSRDRDRATGGWSSSKKRPRLGDLGGGSRDLSPEPAPDEGPRRDGDPAPKRLASLNAAAFLKLSQERELPLRLPRAHAEVDGRSTEPPAPKAPRPKWPKVNGKNYPKAWQGASSGEAAGPPGWQGCPDEPWPSATPCGPSVQPSHQPLSKALESPLGLRPHLPLLMGGQAALKPEPGRPGEESPAPKQELHQPSFPTPQLSPLPMPGNPADYNGLCVGPELTALGSFYLYCGQEGLQCGGYSPCPMLPEGKLSPVAAPHEEGLLLAPSSVPSGTPFQHPPWGSSRYCSSEDTGVNGYSICGVLPLSVTHAGTTCGGCPYKMPFAAEGCRSLGQLEFPLPEAGHPASPAHPLLGCPVPSVPPAAEPVPHLQTPTSEPQTVARACPQSAKPPSGSKSGLRTGSSCRHTARSKAARRPSHPKQPRVQRPRPRRRRRRRTNGWVPVGAACEKAVYVLDEPEPAIRKSYQAVERHGETIRVRDTVLLKSGPRKTSTPYVAKISALWENPESGELMMSLLWYYRPEHLQGGRSPSMHEPLQNEVFASRHQDQNSVACIEEKCYVLTFAEYCRFCAMAKRRGEGLPSRKTALVPPSADYSTPPHRTVPEDTDPELVFLCRHVYDFRHGRILKNPQ

SEQ ID NO: 14291 - protein, 627 aa, Homo sapiens
MKVTLSALDTSESSFTPLVVIELAQDVKEETKEWLKNRIIAKKKDGGAQLLFRPLLNKYEQETLENQNLYLVGASKIRMLLGAEAVGLVKECNDNTMRAFTYRTRQNFKGFDDNNDDFLTMAECQFIIKHELENLRAKDEKMIPGYPQAKLYPGKSLLRRLLTSGIVIQVFPLHDSEALKKLEDTWYTRFALKYQPIDSIRGYFGETIALYFGFLEYFTFALIPMAVIGLPYYLFVWEDYDKYVIFASFNLIWSTVILELWKRGCANMTYRWGTLLMKRKFEEPRPGFHGVLGINSITGKEEPLYPSYKRQLRIYLVSLPFVCLCLYFSLYVMMIYFDMEVWALGLHENSGSEWTSVLLYVPSIIYAIVIEIMNRLYRYAAEFLTSWENHRLESAYQNHLILKVLVFNFLNCFASLFYIAFVLKDMKLLRQSLATLLITSQILNQIMESFLPYWLQRKHGVRVKRKVQALKADIDATLYEQVILEKEMGTYLGTFDDYLELFLQFGYVSLFSCVYPLAAAFAVLNNFTEVNSDALKMCRVFKRPFSEPSANIGVWQLAFETMSVISVVTNCALIGMSPQVNAVFPESKADLILIVVAVEAASCKLVSLPRYSWSTNSVPGTVIGPGV

SEQ ID NO: 14292 - protein, 908 aa, Homo sapiens
MKIIFPILSNPVFRRTVKLLLCLLWIGYSQGTTHVLRFGGIFEYVESGPMGAEELAFRFAVNTINRNRTLLPNTTLTYDTQKINLYDSFEASKKACDQLSLGVAAIFGPSHSSSANAVQSICNALGVPHIQTRWKHQVSDNKDSFYVSLYPDFSSLSRAILDLVQFFKWKTVTVVYDDSTGLIRLQELIKAPSRYNLRLKIRQLPADTKDAKPLLKEMKRGKEFHVIFDCSHEMAAGILKQALAMGMMTEYYHYIFTTLDLFALDVEPYRYSGVNMTGFRILNTENTQVSSIIEKWSMERLQAPPKPDSGLLDGFMTTDAALMYDAVHVVSVAVQQFPQMTVSSLQCNRHKPWRFGTRFMSLIKEAHWEGLTGRITFNKTNGLRTDFDLDVISLKEEGLEKIGTWDPASGLNMTESQKGKPANITDSLSNRSLIVTTILEEPYVLFKKSDKPLYGNDRFEGYCIDLLRELSTILGFTYEIRLVEDGKYGAQDDANGQWNGMVRELIDHKADLAVAPLAITYVREKVIDFSKPFMTLGISILYRKPNGTNPGVFSFLNPLSPDIWMYILLAYLGVSCVLFVIARFSPYEWYNPHPCNPDSDVVENNFTLLNSFWFGVGALMQQGSELMPKALSTRIVGGIWWFFTLIIISSYTANLAAFLTVERMESPIDSADDLAKQTKIEYGAVEDGATMTFFKKSKISTYDKMWAFMSSRRQSVLVKSNEEGIQRVLTSDYAFLMESTTIEFVTQRNCNLTQIGGLIDSKGYGVGTPMGSPYRDKITIAILQLQEEGKLHMMKEKWWRGNGCPEEESKEASALGVQNIGGIFIVLAAGLVLSVFVAVGEFLYKSKKNAQLEKRSFCSAMVEELRMSLKCQRRLKHKPQAPVIVKTEEVINMHTFNDRRLPGKETMA

SEQ ID NO: 14293 - protein, 424 aa, Homo sapiens
MTVELWLRLRGKGLAMLHVTRGVWGSRVRVWPLLPALLGPPRALSSLAAKMGEYRKMWNPREPRDWAQQYRERFIPFSKEQLLRLLIQALYDPINPDRETLDQPSLTDPQRLSNEQEVLRALEPLLAQANFSPLSEDTLAYALVVHHPQDEVQVTVNLDQYVYIHFWALGQRVGQMPLKSSVGSRRGFFTKLPPAERRYFKRVVLAARTKRGHLVLKSFKDTPLEGLEQLLPELKVRTPTLQRALLNLMLVVSGVAIFVNVGMVVLTDLKVATSLLLLLFAIFMGLRASKMFGQRRSAQALELAHMLYYRSTSNNSELLSALALRAQDEHTKEALLAHSFLARRPGGTQGSPEETSRWLRSEVENWLLAKSGCEVTFNGTRALAHLQALTPSMGLYPPPGFPKLDPVAPITSEPPQATPSSNIS

SEQ ID NO: 14294 - protein, 430 aa, Homo sapiens
MAVLARQLQRLLWTACKKKEREKEGREEEEEEEAGRRAPEGPRSLLTAPRRAQRPHGGAEASGGLRFGASAAQGWRARMEDAHCTWLSLPGLPPGWALFAVLDGHGGARAARFGARHLPGHVLQELGPEPSEPEGVREALRRAFLSADERLRSLWPRVETGGCTAVVLLVSPRFLYLAHCGDSRAVLSRAGAVAFSTEDHRPLRPRERERIHAAGGTIRRRRVEGSLAVSRALGDFTYKEAPGRPPELQLVSAEPEVAALARQAEDEFMLLASDGVWDTVSGAALAGLVASRLRLGLAPELLCAQLLDTCLCKGSLDNMTCILVCFPGAPRPSEEAIRRELALDAALGCRIAELCASAQKPPSLNTVFRTLASEDIPDLPPGGGLDCKATVIAEVYSQICQVSEECGEKGQDGAGKSNPTHLGSALDMEA

SEQ ID NO: 14295 - protein, 985 aa, Homo sapiens
MQDIAFLSGGRGKDNAWIITFPENCNFRCIPEEVIAKVLTYLTSIARQNGSDSRFTIILDRRLDTWSSLKISLQKISASFPGNLHLVLVLRPTSFLQRTFTDIGFWFSQEDFMLKLPVVMLSSVSDLLTYIDDKQLTPELGGTLQYCHSEWIIFRNAIENFALTVKEMAQMLQSFGTELAETELPDDIPSIEEILAIRAERYHLLKNDITAVTKEGKILLTNLEVPDTEGAVSSRLECHRQISGDWQTINKLLTQVHDMETAFDGFWEKHQLKMEQYLQLWKFEQDFQQLVTEVEFLLNQQAELADVTGTIAQVKQKIKKLENLDENSQELLSKAQFVILHGHKLAANHHYALDLICQRCNELRYLSDILVNEIKAKRIQLSRTFKMHKLLQQARQCCDEGECLLANQEIDKFQSKEDAQKALQDIENFLEMALPFINYEPETLQYEFDVILSPELKVQMKTIQLKLENIRSIFENQQAGFRNLADKHVRPIQFVVPTPENLVTSGTPFFSSKQGKKTWRQNQSNLKIEVVPDCQEKRSSGPSSSLDNGNSLDVLKNHVLNELIQTERVYVRELYTVLLGYRAEMDNPEMFDLMPPLLRNKKDILFGNMAEIYEFHNDIFLSSLENCAHAPERVGPCFLERKDDFQMYAKYCQNKPRSETIWRKYSECAFFQECQRKLKHRLRLDSYLLKPVQRITKYQLLLKELLKYSKDCEGSALLKKALDAMLDLLKSVNDSMHQIAINGYIGNLNELGKMIMQGGFSVWIGHKKGATKMKDLARFKPMQRHLFLYEKAIVFCKRRVESGEGSDRYPSYSFKHCWKMDEVGITEYVKGDNRKFEIWYGEKEEVYIVQASNVDVKMTWLKEIRNILLKQQELLTVKKRKQQDQLTERDKFQISLQQNDEKQQGAFISTEETELEHTSTVVEVCEAIASVQAEANTVWTEASQSAEISEEPAEWSSNYFYPTYDENEEENRPLMRPVSEMALLY

SEQ ID NO: 14296 - protein, 481 aa, Homo sapiens
MASAASVTSLADEVNCPICQGTLREPVTIDCGHNFCRACLTRYCEIPGPDLEESPTCPLCKEPFRPGSFRPNWQLANVVENIERLQLVSTLGLGEEDVCQEHGEKIYFFCEDDEMQLCVVCREAGEHATHTMRFLEDAAAPYREQIHKCLKCLRKEREEIQEIQSRENKRMQVLLTQVSTKRQQVISEFAHLRKFLEEQQSILLAQLESQDGDILRQRDEFDLLVAGEICRFSALIEELEEKNERPARELLTDIRSTLIRCETRKCRKPVAVSPELGQRIRDFPQQALPLQREMKMFLEKLCFELDYEPAHISLDPQTSHPKLLLSEDHQRAQFSYKWQNSPDNPQRFDRATCVLAHTGITGGRHTWVVSIDLAHGGSCTVGVVSEDVQRKGELRLRPEEGVWAVRLAWGFVSALGSFPTRLTLKEQPRQVRVSLDYEVGWVTFTNAVTREPIYTFTASFTRKVIPFFGLWGRGSSFSLSS

SEQ ID NO: 14297 - protein, 613 aa, Homo sapiens
MKYLSEWDQWKRYSSKSWKRFLEKAREMTTHLELWREDIRSIEGKFGTGIQSYFSFLRFLVLLNLVIFLIIFMLVLLPVLLTKYKITNSSFVLIPFKDMDKQCTVYPVSSSGLIYFYSYIIDLLSGTGFLEETSLFYGHYTIDGVKFQNFTYDLPLAYLLSTIASLALSLLWIVKRSVEGFKINLIRSEEHFQSYCNKIFAGWDFCITNRSMADLKHSSLRYELRADLEEERMRQKIAERTSEETIRIYSLRLFLNCIVLAVLGACFYAIYVATVFSQEHMKKEIDKMVFGENLFILYLPSIVITLANFITPMIFAKIIRYEDYSPGFEIRLTILRCVFMRLATICVLVFTLGSKITSCDDDTCDLCGYNQKLYPCWETQVGQEMYKLMIFDFIIILAVTLFVDFPRKLLVTYCSSCKLIQCWGQQEFAIPDNVLGIVYGQTICWIGAFFSPLLPAIATLKFIIIFYVKEWSLLYTCRPSPRPFRASNSNFFFLLVLLIGLCLAIIPLTISISRIPSSKACGPFTNFNTTWEVIPKTVSTFPSSLQSFIHGVTSEAFAVPFFMIICLIMFYFIALAGAHKRVVIQLREQLSLESRDKCYLIQKLTEAQRDMRN

SEQ ID NO: 14298 - protein, 163 aa, Homo sapiens
MLPPQKKPWESMAKGLVLGALFTSFLLLVYSYAVPPLHAGLASTRTPEAAASCSPPALEPEAVIRANGSAGECQPRRNIVFLKTHKTASSTLLNILFRFGQKHRLKFAFPNGRNDFDYPTFFARSLVQDYRPGACFNIICNHMRFHYDEVRGLVPTNAIFITV

SEQ ID NO: 14299 - protein, 215 aa, Homo sapiens
MPPAVGGPVGYTPPDGGWGWAVVIGAFISIGFSYAFPKSITVFFKEIEGIFHATTSEVSWISSIMLAVMYGGGPISSILVNKYGSRIVMIVGGCLSGCGLIAASFCNTVQQLYVCIGVIGGLGLAFNLNPALTMIGKYFYKRRPLANGLAMAGSPVFLCTLAPLNQVFFGIFGWRGSFLILGGLLLNCCVAGALMRPIGPKPTKAGKDKSKASLE

SEQ ID NO: 14300 - protein, 168 aa, Homo sapiens
MLPKRRRARVGSPSGDAASSTPPSTRFPGVAIYLVEPRMGRSRRAFLTGLARSKGFRVLDACSSEATHVVMEETSAEEAVSWQERRMAAAPPGCTPPALLDISWLTESLGAGQPVPVECRHRLEAFLPHQVDDTATPSGMTHGLAGACPLDAIRLPASDRWLGQGRGL

SEQ ID NO: 14301 - protein, 397 aa, Homo sapiens
MRPPQCLLHTPSLASPLLLLLLWLLGGGVGAEGREDAELLVTVRGGRLRGIRLKTPGGPVSAFLGIPFAEPPMGPRRFLPPEPKQPWSGVVDATTFQSVCYQYVDTLYPGFEGTEMWNPNRELSEDCLYLNVWTPYPRPTSPTPVLVWIYGGGFYSGASSLDVYDGRFLVQAERTVLVSMNYRVGAFGFLALPGSREAPGNVGLLDQRLALQWVQENVAAFGGDPTSVTLFGESAGAASVGMHLLSPPSRGLFHRAVLQSGAPNGPWATVGMGEARRRATQLAHLVGCPPGGTGGNDTELVACLRTRPAQVLVNHEWHVLPQESVFRFSFVPVVDGDFLSDTPEALINAGDFHGLQTRSTRRSASGRPSSTAGAPTWCTGRTSSTTTASRIAAQTCD

SEQ ID NO: 14302 - protein, 436 aa, Homo sapiens
LDSAKKAACEFSETDVTNTEHHQPSNNDLNTTEKRAAERHPEKYQGSSVSNLHVEPCGTNTHASSLQHENSSLLLTKDRMNVEKAEFCNKSKQPGLARSQHNRWAGSKETCNDRRTPSTEKKVDLNADPLCERKEWNKQKLPCSENPRDTEDVPWITLNSSIQKVNEWFSRSDELLGSDDSHDGESESNAKVADVLDVLNEVDEYSGSSEKIDLLASDPHEALICKSERVHSKSVESNIEDKIFGKTYRKKASLPNLSHVTENLIIGAFVTEPQIIQERPLTNKLKRKRRPTSGLHPEDFIKKADLAVQKTPEMINQGTNQTEQNGQVMNITNSGHENKTKGDSIQNEKNPNPIESLEKESAFKTKAEPISSSISNMELELNIHNSKAPKKNRLRRKSSTRHIHALELVVSRNLSPPNCTELQIDSCSSSEEIKKK

SEQ ID NO: 14303 - protein, 193 aa, Homo sapiens
MIRCGLACERCRWILPLLLLSAIAFDIIALAGRGWLQSSDHGQTSSLWWKCSQEGGGSGSYEEGCQSLMEYAWGRAAAAMLFCGFIILVICFILSFFALCGPQMLVFLRVIGGLLALAAVFQIISLVIYPVKYTQTFTLHANPAVTYIYNWAYGFGWAATIILIGCAFFFCCLPNYEDDLLGNAKPRYFYTSA

SEQ ID NO: 14304 - protein, 174 aa, Homo sapiens
FDDQRRMSLHLHGADCDPKTQNEMNICEEEFVEYKNRDAISALMPLFSEEESSDGSKHNNGLPDHISAQLQNTYTLKAFTVGSKCVVWSSLRNTWSKCEILETAEEGTRVLNLSNGMEEIVNPENVWNGIPKLDKSPPEAVSQRVGKDLYFMSVGDTTIKEKGFGGDGDLTVDL

SEQ ID NO: 14305 - protein, 214 aa, Homo sapiens
MGVPRTPSRTVLFERERTGLTYRVPSLLPVPPGPTLLAFVEQRLSPDDSHAHRLVLRRGTLAGGSVRTGPHSLWVPATVCSCPQAACWYPPTPTAWTAESVLARSAGPALTPSPSTAMTTAAPGAVEASCPTCAQASASWQRWTVGRPAASSTAMPGAHWAAVCRRSALTRAPPSCPQSAWLPCPRLPGAARAASWASQPPPPTGHGMTVGQWA

SEQ ID NO: 14306 - protein, 620 aa, Homo sapiens
MVPAETSSSGLLEEQKMMKSQGLVSFKDVAVDFTQEEWQQLDPSQRTLYRDVMLENYSHLVSMGYPVSKPDVISKLEQGEEPWIIKGDISNWIYPDEYQADGRQDRKSNLHNSQSCILGTVSFHHKILKGVTRDGSLCSILKVCQGDGQLQRFLENQDKLFRQVTFVNSKTVTEASGHKYNPLGKIFQECIETDISIQRFHKYDAFKKNLKPNIDLPSCYKSNSRKKPDQSFGGGKSSSQSEPNSNLEKIHNGVIPFDDNQCGNVFRNTQSLIQYQNVETKEKSCVCVTCGKAFAKKSQLIVHQRIHTGKKPYDCGACGKAFSEKFHLVVHQRTHTGEKPYDCSECGKAFSQKSSLIIHQRVHTGEKPYECSECGKAFSQKSPLIIHQRIHTGEKPYECRECGKAFSQKSQLIIHHRAHTGEKPYECTECGKAFCEKSHLIIHKRIHTGEKPYKCAQCEEAFSRKTELITHQLVHTGEKPYECTECGKTFSRKSQLIIHQRTHTGEKPYKCSECGKAFCQKSHLIGHQRIHTGEKPYICTECGKAFSQKSHLPGHQRIHTGEKPYICAECGKAFSQKSDLVLHQRIHTGERPYQCAICGKAFIQKSQLTVHQRIHTVVKS

SEQ ID NO: 14307 - protein, 302 aa, Homo sapiens
MYNMMLLIQKRKGIGSQLLRAGEAEGDRGAGTAERSSDWLDGRSWAIKETPTGLAGRRSEDSDNIFTGEEAKYAQSRSHSSSCRISFLLANSKLLNKMCKGLAGLPASCLRSAKDMKHRLGFLLQKSDSCEHNSSHNKKDKVVICQRVSQEEVKKWAESLENLISHECGLAAFKAFLKSEYSEENIDFWISCEEYKKIKSPSKLSPKAKKIYNEFISVQATKEVNLDSCTREETSRNMLEPTITCFDEAQKKIFNLMEKDSYRRFLKSRFYLDLVNPSSCGAEKQKGAKSSADCASLVPQCA

SEQ ID NO: 14308 - protein, 942 aa, Homo sapiens
MVPGGTMKSLKKDSRLRITPTRLLEASENVKEKKRAKGPEQPTPTIQEEPEPVSNVLQGDDILALAIKKEDLKEQHIPRLTEKEDKRVITQKFIIRKLKPMDPRRKVCHLVARPANPDEATKPLDYSGPGDSFDGSDQILPHHILGSLQDFKRIALARGNTQLAERIPTSPCLMTLISAEGESKQKAPKEEKRPPWAPPPQHNFLKNWQRNTALRKKQQEALSEHLKKPVSELLMHTGETYRRIQEERELIDCTLPTRRDRKSWENSGFWSRLEYLGDEMTGLVMTKTKTQRGLMEPITHIRKPHSIRVETGLPAQRDASYRYTWDRSLFLIYRRKELQRIMEELDFSQQDIDGLEVVGKGWPFSAVTVEDYTVFERSQGSSSEDTAYLGTLASSSDVSMPILGPSLLFCGKPACWIRGSNPQDKRQVGIAAHLTFETLEGEKTSSELTVVNNGTVAIWYDWRRQHQPDTFQDLKKNRMQRFYFDNREGVILPGEIKTFTFFFKSLTAGVFREFWEFRTHPTLLGGAILQVNLHAVSLTQDVFEDERKVLESKLTAHEAVTVVREVLQELLMGVLTPERTPSPVDAYLTEEDLFRHRNPPLHYEHQVVQSLHQLWRQYMTLPAKAEEARPGDKEHVSPIATEKASVNAELLPRFRSPISETQVPRPENEALRESGSQKARVGTKSPQRKSIMEEILVEESPDVDSTKSPWEPDGLPLLEWNLCLEDFRKAVMVLPDENHREDALMRLNKAALELCQKPRPLQSNLLHQMCLQLWRDVIDSLVGHSMWLRSVLGLPEKETIYLNVPEEQDQKSPPIMEVKVPVGKAGKEERKGAAQEKKQLGIKDKEDKKGAKLLGKEDRPNSKKHKAKDDKKVIKSASQDRFSLEDPTPDIILSSQEPIDPLVMGKYTQSLHSEVHPGRCVPWENTMQGAFPSTTRCGGSCL

SEQ ID NO: 14309 - protein, 529 aa, Homo sapiens
MELMIQEKSFGNSLLLNSAMQPDLTVSRTYSGPICLQDPLDKELMTESSLFNPLSDIKVKVQSSFMVSLGVSERAEYHGKNHSRTFPHGNNHSFSTMHPRNKMPYIQNLSSLPTRTELRTTGVFGHLGGRLVMPNTGVSLLIPHGAIPEENSWEIYMSINQGEPSLQSDGSEVLLSPEVTCGPPDMIVTTPFALTIPHCADVSSEHWNIHLKKRTQQGKWEEVMSVEDESTSCYCLLDPFACHVLLDSFGTYALTGEPITDCAVKQLKVAVFGCMSCNSLDYNLRVYCVDNTPCAFQEVVSDERHQGGQLLEEPKLLHFKGNTFSLQISVLDIPPFLWRIKPFTACQEVPFSRVWCSNRQPLHCAFSLERYTPTTTQLSCKICIRQLKGHEQILQVQTSILESERETITFFAQEDSTFPAQTGPKAFKIPYSIRQRICATFDTPNAKGKDWQMLAQKNSINRNLSYFATQSSPSAVILNLWEARHQHDGDLDSLACALEEIGRTHTKLSNISESQLDEADFNYSRQNGL

SEQ ID NO: 14310 - protein, 209 aa, Homo sapiens
MASSDLEQLCSHVNEKIGNIKKTLSLRNCGQEPTLKTVLNKIGDEIIVINELLNKLELEIQYQEQTNNSLKELCESLEEDYKDIEHLKENVPSHLPQVTVTQSWYMKSRLTYNQINDVIKEINKAVISKYKILHQPKKSMNSVTRNLYHRFIDEETKDTKGRYFIVEADIKEFTTLKADKKFHVLLNILRHCRRLSEVRGGGLTRYVIT

SEQ ID NO: 14311 - protein, 56 aa, Homo sapiens
MPYTLKVHYKYTVVMKTQPGLPYSQVRDMVSKKLELRLEHTKLSYRPRDSNELVPL

SEQ ID NO: 14312 - protein, 414 aa, Homo sapiens; identical to SEQ ID NO: 12231

SEQ ID NO: 14313 - protein, 532 aa, Homo sapiens
MKPGVISHAPDSVVPAAFPFPKPDLIFQLEQGEAAWGPDPWTLAGGEALRGMCTGGKTKTENEEKTAQLNISKESESHRLIVEGLLMDVPQHPDFKDRLEKSQLHDTGNKTKIGDCTDLTVQDHESSTTEREEIARKLEESSVSTHLITKQGFAKEQVFYKCGECGSYYNPHSDFHLHQRVHTNEKPYTCKECGKTFRYNSKLSRHQKIHTGEKPYSCEECGQAFSQNSHLLQHQKLHGGQRPYECTDCGKTFSYNSKLIRHQRIHTGEKPFKCKECGKAFSCSYDCIIHERIHNGEKPYECKECGKSLSSNSVLIQHQRIHTGEKPYECKECGKAFHRSSVFLQHQRFHTGEQLYKCNECWKTFSCSSRFIVHQRIHNGEKPYECQECGKTFSQKITLVQHQRVHTGEKPYECKECGKAFRWNASFIQHQKWHTRKKLINGTGLSAVKPYCPCAILSPLPPQHTCSALAPPGPPLSSSHAVVLPPSVPFFLLLPSSEKANPSPVQIAHFFQDLAFPGKSSLQSPNPLSHSL

SEQ ID NO: 14314 - protein, 117 aa, Homo sapiens
MAGPGSTGGQIGAAALAGGARSKVAPSVDFDHSCSDSVEYLTLNFGPFETVHRWRRLPPCDEFVGARRSKHTVVAYKDAIYVFGGDNGKTMLNDLLRFDVKDCSWCRGLHWGHLFQF

SEQ ID NO: 14315 - protein, 632 aa, Homo sapiens
MGGPAAPRGAGRLRALLLALVVAGIPAGAYNLDPQRPVHFQGPADSFFGYAVLEHFHDNTRWVLVGAPKADSKYSPSVKSPGAVFKCRVHTNPDRRCTELDMARGKNRGTSCGKTCREDRDDEWMGVSLARQPKADGRVLACAHRWKNIYYEADHILPHGFCYIIPSNLQAKGRTLIPCYEEYKKKYGEEHGSCQAGIAGFFTEELVVMGAPGSFYWAGTIKVLNLTDNTYLKLNDEVIMNRRYTYLGYAVTAGHFSHPSTIDVVGGAPQDKGIGKVYIFRADRRSGTLIKIFQASGKKMGSYFGSSLCAVDLNGDGLSDLLVGAPMFSEIRDEGQVTVYINRGNGALEEQLALTGDGAYNAHFGESIASLDDLDNDGFPDVAIGAPKEDDFAGAVYIYHGDAGGIVPQYSMKLSGQKINPVLRMFGQSISGGIDMDGNGYPDVTVGAFMSDSVVLLRARPVITVDVSIFLPGSINITAPQCHDGQQPVNCLNVTTCFSFHGKHVPGEIGLNYVLMADVAKKEKGQMPRVYFVLLGETMGQVTEKLQLTYMEETCRHYVAHVKRRVQDVISPIVFEAAYSLSEHVTGEEERELPPLTPVLRWKKGQKIAQKNQVRTLKLILSTQGGSCTEQK

SEQ ID NO: 14316 - protein, 644 aa, Homo sapiens
MSVTLTSVKRVQSSPNLLAAGRDSQSPDSAWRSYNDGNQETLNGDATYSSLAAKGFRSVRPNLQDKRSPTQSQITVNGNSGGAVSPMSYYQRPFSPSAYSLPASLNSSIVMQHGTSLDSTDTYPQHAQSLDGTTSSSIPLYRSSEEEKRVTVIKAPHYPGIGPVDESGIPTAIRTTVDRPKDWYKTMFKQIHMVHKPGLYNPPYSAQSHPAAKTQTYRPLSKSHSDNSPNAFKDASSPVPPPHVPPPVPPLRPRDRSSTEKHDWDPPDRKVDTRKFRSEPRSIFEYEPGKSSILQHERPASLYQSSIDRSLERPMSSASMASDFRKRRKSEPAVGPPRGLGDQSASRTSPGRVDLPGSSTTLTKSFTSSSPSSPSRAKDRESPRSYSSTLTDMGRSAPRERRGTPEKEKLPAKAVYDFKAQTSKELSFKKGDTVYILRKIDQNWYEGEHHGRVGIFPISYVEKLTPPEKAQPARPPPPAQPGEIGEAIAKYNFNADTNVELSLRKGDRVILLKRVDQNWYEGKIPGTNRQGIFPVSYVEVVKKNTKGAEDYPDPPIPHSYSSDRIHSLSSNKPQRPVFTHENIQGGGEPFQALYNYTPRNEDELELRESDVIDVMEKCDDGWFVGTSRRTKFFGTFPGNYVKRL

SEQ ID NO: 14317 - protein, 548 aa, Homo sapiens
MIAAPEIPTDFNLLQESETHFSSDTDFEDIEGKNQKQGKGKTCKKGKKGPAEKGKGGNGGGKPPSGPNRMNGHHQQNGVENMMLFEVVKMGKSAMQSVVDDWIESYKHDRDIALLDLINFFIQCSGCKGVVTAEMFRHMQNSEIIRKMTEEFDEDSGDYPLTMAGPQWKKFKSSFCEFIGVLVRQCQYSIIYDEYMMDTVISLLTGLSDSQVRAFRHTSTLAAMKLMTALVNVALNLSINMDNTQRQYEAERNKMIGKRANERLELLLQKRKELQENQDEIENMMNAIFKGVFVHRYRDAIAEIRAICIEEIGIWMKMYSDAFLNDSYLKYVGWTMHDKQGEVRLKCLTALQGLYYNKELNSKLELFTSRFKDRIVSMTLDKEYDVAVQAIKLLTLVLQSSEEVLTAEDCENVYHLVYSAHRPVAVAAGEFLYKKLFSRRDPEEDGMMKRRGRQGPNANLVKTLVFFFLESELHEHAAYLVDSMWDCATELLKDWECMNSLLLEEPLSGEEALTDRQESALIEIMLCTIRQAAECHPPVGRGTGKRVL

SEQ ID NO: 14318 - protein, 1067 aa, Homo sapiens
MAEKGASRGTLRRLWSLPRRRRGTAGRSRPDEIMHQDIVPLCAADIQDQLKKRFAYLSGGRGQDGSPVITFPDYPAFSEIPDKEFQNVMTYLTSIPSLQDAGIGFILVIDRRRDKWTSVKASVLRIAASFPANLQLVLVLRPTGFFQRTLSDIAFKFNRDDFKMKVPVIMLSSVPDLHGYIDKSQLTEDLGGTLDYCHSRWLCQRTAIESFALMVKQTAQMLQSFGTELAETELPNDVQSTSSVLCAHTEKKDKAKEDLRLALKEGHSVLESLRELQAEGSEPSVNQDQLDNQATVQRLLAQLNETEAAFDEFWAKHQQKLEQCLQLRHFEQGFREVKAILDAASQKIATFTDIGNSLAHVEHLLRDLASFEEKSGVAVERARALSLDGEQLIGNKHYAVDSIRPKCQELRHLCDQFSAEIARRRGLLSKSLELHRRLETSMKWCDEGIYLLASQPVDKCQSQDGAEAALQEIEKFLETGAENKIQELNAIYKEYESILNQDLMEHVRKVFQKQASMEEVFHRRQASLKKLAARQTRPVQPVAPRPEALAKSPCPSPGIRRGSENSSSEGGALRRGPYRRAKSEMSESRQGRGSAGEEEESLAILRRHVMSELLDTERAYVEELLCVLEGYAAEMDNPLMAHLLSTGLHNKKDVLFGNMEEIYHFHNRIFLRELENYTDCPELVGRCFLERMEDFQIYEKYCQNKPRSESLWRQCSDCPFFQECQRKLDHKLSLDSYLLKPVQRITKYQLLLKEMLKYSRNCEGAEDLQEALSSILGILKAVNDSMHLIAITGYDGNLGDLGKLLMQGSFSVWTDHKRGHTKVKELARFKPMQRHLFLHEKAVLFCKKREENGEGYEKAPSYSYKQSLNMAAVGITENVKGDAKKFEIWYNAREEVYIVQAPTPEIKAAWVNEIRKVLTSQLQACREASQHRALEQSQSLPLPAPTSTSPSRGNSRNIKKLEERKTDPLSLEGYVSSAPLTKPPEKGKGWSKTSHSLEAPEDDGGWSSAEEQINSSDAEEDGGLGPKKLVPGKYTVVADHEKGGPDALRVRSGDVVELVQEGDEGLW

SEQ ID NO: 14319 - protein, 1129 aa, Homo sapiens
MEEPGPPGGLSQDQVERCMGAMQEGMQMVKLRGGSKGLVRFYYLDEHRSCIRWRPSRKNEKAKISIDSIQEVSEGRQSEVFQRYPDGSFDPNCCFSIYHGSHRESLDLVSTSSEVARTWVTGLRYLMAGISDEDSLARRQRTRDQWLKQTFDEADKNGDGSLSIGEVLQLLHKLNVNLPRQRVKQMFREADTDDHQGTLGFEEFCAFYKMMSTRRDLYLLMLTYSNHKDHLDAASLQRFLQVEQKMAGVTLESCQDIIEQFEPCPENKSKGLLGIDGFTNYTRSPAGDIFNPEHHHVHQDMTQPLSHYFITSSHNTYLVGDQLMSQSRVDMYAWVLQAGCRCVEVDCWDGPDGEPIVHHGYTLTSKILFKDVIETINKYAFIKNEYPVILSIENHCSVIQQKKMAQYLTDILGDKLDLSSVSSEDATTLPSPQMLKGKILVKGKKLPANISEDAEEGEVSDEDSADEIDDDCKLLNGDASTNRKRVENTAKRKLDSLIKESKIRDCEDPNNFSVSTLSPSGKLGRKSKAEEDVESGEDAGASRRNGRLVVGSFSRRKKKGSKLKKAASVEEGDEGQDSPGGQSRGATRQKKTMKLSRALSDLVKYTKSVATHDIEMEAASSWQVSSFSETKAHQILQQKPAQYLRFNQQQLSRIYPSSYRVDSSNYNPQPFWNAGCQMVALNYQSEGRMLQLNRAKFSANGGCGYVLKPGCMCQGVFNPNSEDPLPGQLKKQLVLRIISGQQLPKPRDSMLGDRGEIIDPFVEVEIIGLPVDCSREQTRVVDDNGFNPTWEETLVFMVHMPEIALVRFLVWDHDPIGRDFIGQRTLAFSSMMPGYRHVYLEGMEEASIFVHVAVSDISGKVKQALGLKGLFLRGPKPGSLDSHAAGRPPARPSVSQRILRRTASAPTKSQKPGRRGFPELVLGTRDTGSKGVADDVVPPGPGPAPEAPAQEGPGSGSPRGKAPAAVAEKSPVRVRPPRVLDGPGPAGMAATCMKCVVGSCAGVNTGGLQRERPPSPGPASRQAAIRQQPRARADSLGAPCCGLDPHAIPGRSREAPKGPGAWRQGPGGSGSMSSDSSSPDSPGIPERSPRWPEGACRQPGALQGEMSALFAQKLEEIRSKSPMFSAVRN

SEQ ID NO: 14320 - protein, 270 aa, Homo sapiens
MVTFATILQVNKVMSILFYVIFLAYLRGIQGNNMDQRSLPEDSLNSLIIKLIQADILKNKLSKQMVDVKENYQSTLPKAEAPREPERGGPAKSAFQPVIAMDTELLRQQRRYNSPRVLLSDSTPLEPPPLYLMEDYVGSPVVANRTSRRKRYAEHKSHRGEYSVCDSESLWVTDKSSAIDIRGHQVTVLGEIKTGNSPVKQYFYETRCKEARPVKNGCRGIDDKHWNSQCKTSQTYVRALTSENNKLVGWRWIRIDTSCVCALSRKIGRT

SEQ ID NO: 14321 - protein, 127 aa, Homo sapiens
MASLAAANAEFCFNLFREMDDNQGNGNVFFSSLSLFAALALVRLGAQDDSLSQIDKLLHVNTASGYGNSSNSQSGLQSQLKRVFSDINASHKDYDLSIVNGLFAEKVYGFHKDYIECAEKLYDAKVE

SEQ ID NO: 14322 - protein, 758 aa, Homo sapiens
MTTAKEPSASGKSVQQQEQELVGSNPPQRNWKGIAIALLVILVICSLIVTSVILLTPAEDNSLSQKKKVTVEDLFSEDFKIHDPEAKWISDTEFIYREQKGTVRLWNVETNTSTVLIEGKKIESLRAIRYEISPDREYALFSYNVEPIFIFENNIYYCAHVGKQAIRVVSTGKEGVIYNGLSDWLYEEEILKTHIAHWWSPDGTRLAYAAINDSRVPIMELPTYTGSIYPTVKPYHYPKAGSENPSISLHVIGLNGPTHDLEMMPPDDPRMREYYITMVKWATSTKVAVTWLNRAQNVSILTLCDATTGVCTKKHEDESEAWLHRQNEEPVFSKDGRKFFFIRAIPQGGRGKFYHITVSSSQPNSSNDNIQSITSGDWDVTKILAYDEKGNKIYFLSTEDLPRRRQLYSANTVGNFNRQCLSCDLVENCTYFSASFSHSMDFFLLKCEGPGVPMVTVHNTTDKKKMFDLETNEHVKKAINDRQMPKVEYRDIEIDDYNLPMQILKPATFTDTTHYPLLLVVDGTPGSQSVAEKFEVSWETVMVSSHGAVVVKCDGRGSGFQGTKLLHEVRRRLGLLEEKDQMEAVRTMLKEQYIDRTRVAVFGKDYGGYLSTYILPAKGENQGQTFTCGSALSPITDFKLYASAFSERYLGLHGLDNRAYEMTKVAHRVSALEEQQFLIIHPTADEKIHFQHTAELITQLIRGKANYSLQIYPDESHYFTSSSLKQHLYRSIINFFVECFRIQDKLLTVTAKEDEEED

SEQ ID NO: 14323 - protein, 1412 aa, Homo sapiens
MMRGVEGPQGSPRPPAPIQQLNRSSSERDGPPVENEMFFCQHCDYGNRTVKGVLIHYQKKHRDFKANADVIRQHTATIRSLCDRNQKKPASCVLVSPSNLERDKTKLRALKCRQCSYTSPYFYALRKHIKKDHPALKATVTSIMRWAFLDGLIEAGYHCEWCIYSHTEPNGLLLHYQRRHPEHYVDYTYMATKLWAGPDPSPPSLTMPAEAKTYRCRDCVFEAVSIWDITNHYQAFHPWAMNGDESVLLDIIKEKDAVEKPILSSEELAGPVNCENSIPTPFPEQEAECPEDARLSPEKSLQLASANPAISSTPYQCTVCQSEYNNLHGLLTHYGKKHPGMKVKAADFAQDIDINPGAVYKCRHCPYINTRIHGVLTHYQKRHPSIKVTAEDFVHDVEQSADISQNDVEETSRIFKQGYGAYRCKLCPYTHGTLEKLKIHYEKYHNQPEFDVFSQSPPKLPVPLEPEMTTEVSPSQVSITEEEVGEEPVSTSHFSTSHLVSHTVFRCQLCKYFCSTRKGIARHYRIKHNNVRAQPEGKNNLFKCALCAYTNPIRKGLAAHYQKRHDIDAYYTHCLAASRTISDKPNKVIIPSPPKDDSPQLSEELRRAVEKKKCSLCSFQSFSKKGIVSHYMKRHPGVFPKKQHASKLGGYFTAVYADEHEKPTLMEEEERGNFEKAEVEGEAQEIEWLPFRCIKCFKLSFSTAELLCMHYTDHHSRDLKRDFIILGNGPRLQNSTYQCKHCDSKLQSTAELTSHLNIHNEEFQKRAKRQERRKQLLSKQKYADGAFADFKQERPFGHLEEVPKIKERKVVGYKCKFCVEVHPTLRAICNHLRKHVQYGNVPAVSAAVKQEADDPAHLFLDGLEAAKDASGALVGRVDGEHCLLDGMLEDETRPGGYHCSQCDRVLMSMQGLRSHERSHLALAMFTREDKYSCQYCSFVSAFRHNLDRHMQTHHGHHKPFRCKLCSFKSSYNSRLKTHILKAHAGEHAYKCSWCSFSTMTISQLKEHSLKVHGKALTLPRPRIVSLLSSHSHHSSQKATPAEEVEDSNDSSYSEPPDVQQQLNHYQSAALARNNSRVSPVPLSGAAAGTEQKTEAVLHCEFCEFSSGYIQSIRRHYRDKHGGKKLFKCKDCSFYTGFKSAFTMHVEAGHSAVPEEGPKDLRCPLCLYHTKYKRNMIDHIVLHREERVVPIEVCRSKLSKYLQGVVFRCDKCTFTCSSDESLQQHIEKHNELKPYKCQLCYYETKHTEELDSHLRDEHKVSRNFELVGRVNLDQLEQMKEKMESSSSDDEDKEEEMNSKAEDRELMRFSDHGAALNTEKRFPCEFCGRAFSQGSEWERHVLRHGMALNDTKQVSREEIHPKEIMENSVKMPSIEEKEDDEAIGIDFSLKNETVAICVVTADKSLLENAEAKKE

SEQ ID NO: 14324 - protein, 1445 aa, Homo sapiens
MRGMEILGNLCKAEDNGVLICEYVDQDSYREIICHLTLPDVLLVISTLEVLYMLTEMGDVACTKIAKVEKSIAAVKLIEHPSSSHQMLSEIRPQAIEQVQTQTHVASAPASRAVVAQHVAPPPGIVEIDSEKFACQWLNAHFEVNPDCSVSRAEMYSEYLSTCSKLARGGILTSTGFYKCLRTVFPNHTVKRVEDSSSNGQAHIHVVGVKRRAIPLPIQMYYQQQPVSTSVVRVDSVPDVSPAPSPAGIPHGSQTIGNHFQRTPVANQSSNLTATQMSFPVQGVHTVAQTVSRIPQNPSPHTHQQQNAPVTVIQSKAPIPCEVVKATVIQNSIPQTGVPVSIAVGGGPPQSSVVQNHSTGPQPVTVVNSQTLLHHPSVIPQQSPLHTVVPGQIPSGTPVTVIQQAVPQSHMFGRVQNIPACTSTVSQGQQLITTSPQPVQTSSQQTSAGSQSQDTVIIAPPQYVTTSASNIVSATSVQNFQVATGQMVTIAGVPSPQASRVGFQNIAPKPLPSQQVSSTVVQQPIQQPQQPTQQSVVIVSQPAQQGQTYAPAIHQIVLANPAALPAGQTVQLTGQPNITPSSSPSPVPATNNQVPTAMSSSSTPQSQGPPPTVSQMLSVKRQQQQQHSPAPPPQQVQVQVQQPQQVQMQVQPQQSNAGVGQPASGESSLIKQLLLPKRGPSTPGGKLILPAPQIPPPNNARAPSPQVVYQVASNQAAGFGVQGQTPAQQLLVGQQNVQLVPSAMPPSGGVQTVPISNLQILPGPLISNSPATIFQGTSGNQVTITVVPNTSFAPATVSQGNATQLIAPAGITMSGTQTGVGLPVQTLPATQASPAGQSSCTTATPPFKGDKIICQKEEEAKEATGLHVHERKIEVMENPSCRRGATNTSNGDTKENEMHVGSLLNGRKYSDSSLPPSNSGKIQSETNQCSLISNGPSLELGENGASGKQNSEQIDMQDIKSDLRKPLVNGICDFDKGDGSHLSKNIPNHKTSNHVGNGEISPMEPQGTLDITQQDTAKGDQLERISNGPVLTLGGSSVSSIQEASNAATQQFSGTDLLNGPLASSLNSDVPQQRPSVVVSPHSTTSVIQGHQIIAVPDSGSKVSHSPALSSDVRSTNGTAECKTVKRPAEDTDRETVAGIPNKVGVRIVTISDPNNAGCSATMVAVPAGADPSTVAKVAIESAVQQKQQHPPTYVQNVVPQNTPMPPSPAVQVQGQPNSSQPSPFSGSSQPGDPMRKPGQNFMCLWQSCKKWFQTPSQVFYHAATEHGGKDVYPGQCLWEGCEPFQRQRFSFITHLQDKHCSKDALLAGLKQDEPGQAGSQKSSTKQPTVGGTSSTPRAQKAIVNHPSAALMALRRGSRNLVFRDFTDEKEGPITKHIRLTAALILKNIGKYSECGRRLLKRHENNLSVLAISNMEASSTLAKCLYELNFTVQSKEQEKDSEMLQ

SEQ ID NO: 14325 - protein, 188 aa, Homo sapiens
EQKRRKIDTHPSPSHSSTVKDSLIELKESSAKLYINHTPPPLSKSKEREMDKKDLDKSRERSREREKKDEKDRKERKRDHSNNDREVPPDLTKRRKEENGTMGVSKHKSESPCESPYPNEKDKEKNKSKSSGKEKGSDSFKSEKMDKISSGGKKESRHDKEKIEKKEKRDSSGGKEEKKHHKSSDKHR

SEQ ID NO: 14326 - protein, 1424 aa, Homo sapiens
SLCSLVPGFQIKAFTALRFLSEPSDAVTMRGGNVLLDCSAESDRGVPVIKWKKDGIHLALGMDERKQQLSNGSLLIQNILHSRHHKPDEGLYQCEASLGDSGSIISRTAKVAVAGPLRFLSQTESVTAFMGDTVLLKCEVIGEPMPTIHWQKNQQDLTPIPGDSRVVVLPSGALQISRLQPGDIGIYRCSARNPASSRTGNEAEVRILSDPGLHRQLYFLQRPSNVVAIEGKDAVLECCVSGYPPPSFTWLRGEEVIQLRSKKYSLLGGSNLLISNVTDDDSGMYTCVVTYKNENISASAELTVLVPPWFLNHPSNLYAYESMDIEFECTVSGKPVPTVNWMKNGDVVIPSDYFQIVGGSNLRILGVVKSDEGFYQCVAENEAGNAQTSAQLIVPKPAIPSSSVLPSAPRDVVPVLVSSRFVRLSWRPPAEAKGNIQTFTVFFSREGDNRERALNTTQPGSLQLTVGNLKPEAMYTFRVVAYNEWGPGESSQPIKVATQPELQVPGPVENLQAVSTSPTSILITWEPPAYANGPVQGYRLFCTEVSTGKEQNIEVDGLSYKLEGLKKFTEYSLRFLAYNRYGPGVSTDDITVVTLSDVPSAPPQNVSLEVVNSRSIKVSWLPPPSGTQNGFITGYKIRHRKTTRRGEMETLEPNNLWYLFTGLEKGSQYSFQVSAMTVNGTGPPSNWYTAETPENDLDESQVPDQPSSLHVRPQTNCIIMSWTPPLNPNIVVRGYIIGYGVGSPYAETVRVDSKQRYYSIERLESSSHYVISLKAFNNAGEGVPLYESATTRSITDPTDPVDYYPLLDDFPTSVPDLSTPMLPPVGVQAVALTHDAVRVSWADNSVPKNQKTSEVRLYTVRWRTSFSASAKYKSEDTTSLSYTATGLKPNTMYEFSVMVTKNRRSSTWSMTAHATTYEAAPTSAPKDLTVITREGKPRAVIVSWQPPLEANGKITAYILFYTLDKNIPIDDWIMETISGDRLTHQIMDLNLDTMYYFRIQARNSKGVGPLSDPILFRTLKVEHPDKMANDQGRHGDGGYWPVDTNLIDRSTLNEPPIGQMHPPHGSVTPQKNSNLLVIIVVTVGVITVLVVVIVAVICTRRSSAQQRKKRATHSAGKRKGSQKDLRPPDLWIHHEEMEMKNIEKPSGTDPAGRDSPIQSCQDLTPVSHSQSETQLGSKSTSHSGQDTEEAGSSMSTLERSLAARRAPRAKLMIPMDAQSNNPAVVSAIPVPTLESAQYPGILPSPTCGYPHPQFTLRPVPFPTLSVDRGFGAGRSQSVSEGPTTQQPPMLPPSQPEHSSSEEAPSRTIPTACVRPTHPLRSFANPLLPPPMSAIEPKVPYTPLLSQPGPTLPKTHVKTASLGLAGKARSPLLPVSVPTAPEVSEESHKPTEDSANVYEQDDLSEQMASLEGLMKQLNAITGSAF

SEQ ID NO: 14327 - protein, 179 aa, Homo sapiens
KYFQKQCHECIEHIRKQNWFEAFEEPEDQLYYVKFLSLPEVRQAIHVGNQTFNDGTIVEKYLREDTVQSVKPWLTEIMNNYKVLIYNGQLDIIVAAALTERSLMGMDWKGSQEYKKAEKKVWKIFKSDSEVAGYIRQAGDFHQVIIRGGGHILPYDQPLRAFDMINRFIYGKGWDPYVG

SEQ ID NO: 14328 - protein, 1211 aa, Homo sapiens
MATTATPATNQGWPEDFGFRLGGSGPCFVLEVAKGSSAHAGGLRPGDQILEVEGLAVGGLSRERLVRLARRCPRVPPSLGVLPAPDGGPGPGSGPAAPTTVLRAPRCGRGLALGRELLRLAGRKRPDAVHRERRRKAQEFSRKVDEILGDQPTAKEQVFAALKQFAAEQRVDDLVWTLTLALPREACGPLLDNLRIFIPKKHRARFDEVVSQGLLGKLCRARRAQGAQRLRRSRSEERPERLLVSTRASAPPRRPDEPPPRRASLLVGGLAGPGGARRTVRVYKGNKSFGFTLRGHGPVWIESVLPGSPADNAALKSGDRILFLNGLDMRNCSHDKVVSMLQGSGAMPTLVVEEGLVPFASDSDSLDSPNPSSALTSLQWVAEILPSSIRVQGRTFSQQLEHLLTPPERYGVCRALESFFQHRNIDTLIVDVYPVLDTPAKQVLWQFIYQLLTYEEQELCQEKIACFLGYTAMTAEPEPELDLESEPTPEPQPRSSLRASSMCRRSLRSQGLEAGLSCGPSECPEMPLPLIPGERQAGDGTSLPETPNPKMMSAVYAELESRLNSSFKGKMGTVSKSRASPPGPSPAVTTGPRTLSGVSWPSERLLPSPCYHPLCSGGLASPSSSESHPYASLDSSRAPSPQPGPGPICPDSPPSPDPTRPPSRRKLFTFSHPVRSRDTDRFLDVLSEQLGPRVTIVDDFLTPENDYEEMSFHDDQGSFVTNERSSASDCISSSEEGSSLTYSSISDHIPPPPLSPPPPPPLPFHDAKPSSRSSDGSRGPAQALAKPLTQLSHPVPPPPPPPLPPPVPCAPPMLSRGLGHRRSETSHMSVKRLRWEQVENSEGTIWGQLGEDSDYDKLSDMVKYLDLELHFGTQKPAKPVPGPEPFRKKEVVEILSHKKAYNTSILLAHLKLSPAELRQVLMSMEPRRLEPAHLAQLLLFAPDADEEQRYQAFREAPGRLSEPDQFVLQMLSVPEYKTRLRSLHFQATLQEKTEEIRGSLECLRQASLELKNSRKLAKILEFVLAMGNYLNDGQPKTNKTTGFKINFLTELNSTKTVDGKSTFLHILAKSLSQHFPELLGFAQDLPTVPLAAKVNQRALTSDLADLHGTISEIQDACQSISPSSEDKFAMVMSSFLETAQPALRALDGLQREAMEELGKALAFFGEDSKATTSEAFFGIFAEFMSKFERALSDLQAGEGLRSSGMVSPLAW

SEQ ID NO: 14329 - protein, 380 aa, Homo sapiens
MGGLSARPTAGRTDPAGTCWGQDPGSKMATVIPGPLSLGEDFYREAIEHCRSYNARLCAERSLRLPFLDSQTGVAQNNCYIWMEKTHRGPGLAPGQIYTYPARCWRKKRRLNILEDPRLRPCEYKIDCEAPLKKEGGLPEGPVLEALLCAETGEKKIELKEEETIMDCQKQQLLEFPHDLEVEDLEDDIPRRKNRAKGKAYGIGGLRKRQDTASLEDRDKPYVCDKFYKELAWVPEAQRKHTAKKAPDGTVIPNGYCDFCLGGSKKTGCPEDLISCADCGRSGHPSCLQFTVNMTAAVRTYRWQCIECKSCSLCGTSENDGASWAGLTPQDQLLFCDDCDRGYHMYCLSPPMAEPPEGSWSCHLCLRHLKEKASAYITLT

SEQ ID NO: 14330 - protein, 958 aa, Homo sapiens
MLFRARGPVRGRGWGRPAEAPRRGRSPPWSPAWICCWALAGCQAAWAGDLPSSSSRPLPPCQEKDYHFEYTECDSSGSRWRVAIPNSAVDCSGLPDPVRGKECTFSCASGEYLEMKNQVCSKCGEGTYSLGSGIKFDEWDELPAGFSNIATFMDTVVGPSDSRPDGCNNSSWIPRGNYIESNRDDCTVSLIYAVHLKKSGYVFFEYQYVDNNIFFEFFIQNDQCQEMDTTTDKWVKLTDNGEWGSHSVMLKSGTNILYWRTTGILMGSKAVKPVLVKNITIEGVAYTSECFPCKPGTFSNKPGSFNCQVCPRNTYSEKGAKECIRCKDDSQFSEEGSSECTERPPCTTKDYFQIHTPCDEEGKTQIMYKWIEPKICREDLTDAIRLPPSGEKKDCPPCNPGFYNNGSSSCHPCPPGTFSDGTKECRPCPAGTEPALGFEYKWWNVLPGNMKTSCFNVGNSKCDGMNGWEVAGDHIQSGAGGSDNDYLILNLHIPGFKPPTSMTGATGSELGRITFVFETLCSADCVLYFMVDINRKSTNVVESWGGTKEKQAYTHIIFKNATFTFTWAFQRTNQGQDATTLRKKPTSARNVHLTPTCPYIRSMAKRLVFHAGLGVKTISNLSSVGSLMNGPSFTSKGTKYFHFFNISLCGHEGKKMALCTNNITDFTVKEIVAGSDDYTNLVGAFVCQSTIIPSESKGFRAALSSQSIILADTFIGVTVETTLKNINIKEDMFPVPTSQIPDVHFFYKSSTATTSCINGRSTAVKMRCNPTKSGAGVISVPSKCPAGTCDGCTFYFLWESAEACPLCTEHDFHEIEGACKRGFQETLYVWNEPKWCIKGISLPEKKLATCETVDFWLKVGAGVGAFTAVLLVALTCYFWKKNQKLEYKYSKLVMTTNSKECELPAADSCAIMEGEDNEEEVVYSNKQSLLGKLKSLATKEKEDHFESVQLKTSRSPNI

SEQ ID NO: 14331 - protein, 293 aa, Homo sapiens
MATRRLGVGETLGALNAALGPGGPVWIKETRTRHLRSRDFLAPHRALQARFDDGQRSAVFERVLSAVAAYATPASPASLGQRVLLHCPALRSSPCALRLSQLRTVLVADHLARALRAHGVCVRLVPAVRDPHMLTFLQQLRVDWPAASERASSHTLRSHALEELTSANDGRTLSPGILGRLCLKELVEEQGRTAGYDPNLDNCLVTEDLLSVLAELQEALWHWPEDSHPGLAGASDTGTGGCLVVHVVSCEEEFQQQKLDLLWQKLVDKAPLRQKHLICGPVKVAGAPGTLMT

SEQ ID NO: 14332 - protein, 1493 aa, Homo sapiens
MASITQLFDDLCEALLPAAKTHLGQRSVNRKRAKRSLKKVAYNALFTNLFQDETQQLQPDMSKLPARNKILMLSFDLRVGGLGPKADRLEELVEELEAAPCCPLLEVGSVLDLLVQLAGSGPPQVLPRKRDYFLNNKHVGRNVPYSGYDCDDLSVFEMDVQSLISREECLCHSMIQETLQVMEAAPGTGLPTVGLFSFGDPCGDRFERDTRVSLFGALVHSRTYDMDVRLGLPPVPDNADLSGLAIKVPPSVDQWEDEGFQSASNLTPDSQSEPSVTPDVDLWEAALTYEASKRRCWERVGCPPGHREEPYLTEAGRDAFDKFCRLHQGELQLLAGGVLQAPQPVLVKECELVKDVLNVLIGVVSATFSLCQPAQAFVVKRGVHVSGASPESISSLLSEVAEYGTCYTRLSHFSLQPVLDSLYSKGLVFQAFTSGLRRYLQYYRACVLSTPPTLSLLTIGFLFKKLGRQLRYLAELCGVGAVLPGTCGGGPRAAFPTGVKLLSYLYQEALHNCSNEHYPVLLSLLKTSCEPYTRFIHDWVYSGVFRDAYGEFMIQVNHEYLSFRDKLYWTHGYVLISKEVEDCVPVFLKHIAHDIYVCGKTINLLKLCCPRHYLCWSDVPVPRISVIFSLEELKEIEKDCAVYVGRMERVARHSSVSKEEKELRMEIAKQELIAHAREAASRVLSALSDRQMSERMALDARKREQFQRLKEQFVKDQERRQAARQEELDDDFSYARELRDRERRLKSLEEELERKARQALVDHYSKLSAEAARREQKALWRIQRHRLESARLRFLLEDEKHIQEMLKAVSEAHQPQEPPDVLLSVHPQVTSPGPEHPEGGQGCDSGSAEQHSPAWDGWNRPGLLTPQPLKPLAVGAGGRGLQQAEGARPFSDSLSIGDFLPVGPGAEPSVQTGMVPLLEVALQTINLDLPPSAPGEAPAAASTQPSRPQEYDFSTVLRPAVATSPAPGPLQAAECSLGSSGLQLWEDSCGKMDACGSASRETLLPSHPPRRAALEEGSSQPTERLFGQVSGGGLPTGDYASEIAPTRPRWNTHGHVSDASIRVGENVSDVAPTQPRWNTHGHVSNASISLGESVSDVAPTRPRWNIHGHVSNASIRVGENVSDVAPTRPRWNTHGHVSNASIRVGENVSDVAPTRPRWNTHGHVSDASISLGESVSDMAPARPRWNTHGHVSDASISLGESVSDMAPTRPRWNTHGHVSDTSIRVGENVSDVAPIRSRCNTHGHVSDASISLGEPVSDVVSTRPRWNTHVPIPPPHMVLGALSPEAEPNTPRPQQSPPGHTSQSALSLGAQSTVLDCGPRLPVEVGPSLSSPSSGCGEGSISVGENVSDVAPTQPWWPNTPGDSVSEELGQSRVAGGQEWDCGTHRAWEALGGAGTLRTSLQIGLSTHRKTQLPRAAQAVVRRRRHRRRRLRVGSRPTWQAWQGSTTWSGTRTVTSPCPSRPLLIFCAPCFPGPSPSPWTPRSSLPLMRLLCS

SEQ ID NO: 14333 - protein, 1998 aa, Homo sapiens
IASFRGTVPYGLSLEIGDTVQILEKCDGWYRGFALKNPNIKGIFPSSYVHLKNACVKNKGQFEMVIPTEDSVITEMTSTLRDWGTMWKQLYVRNEGDLFHRLWHIMNEILDLRRQVLVGHLTHDRMKDVKRHITARLDWGNEQLGLDLVPRKEYAMVDPEDISITELYRLMEHRHRKKDTPVQASSHHLFVQMKSLMCSNLGEELEVIFSLFDSKENRPISERFFLRLNRNGLPKAPDKPERHCSLFVDLGSSELRKDIYITVHIIRIGRMGAGEKKNACSVQYRRPFGCAVLSIADLLTGETKDDLILKVYMCNTESEWYQIHENIIKKLNARYNLTGSNAGLAVSLQLLHGDIEQIRREYSSVFSHGVSITRKLGFSNIIMPGEMRNDLYITIERGEFEKGGKSVARNVEVTMFIVDSSGQTLKDFISFGSGEPPASEYHSFVLYHNNSPRWSELLKLPIPVDKFRGAHIRFEFRHCSTKEKGEKKLFGFSFVPLMQEDGRTLPDGTHELIVHKCEENTNLQDTTRYLKLPFSKGIFLGNNNQAMKATKESFCITSFLCSTKLTQNGDMLDLLKWRTHPDKITGCLSKLKEIDGSEIVKFLQDTLDTLFGILDENSQKYGSKVFDSLVHIINLLQDSKFHHFKPVMDTYIESHFAGALAYRDLIKVLKWYVDRITEAERQEHIQEVLKAQEYIFKYIVQSRRLFSLATGGQNEEEFRCCIQELLMSVRFFLSQESKGSGALSQSQAVFLSSFPAVYSELLKLFDVREVANLVQDTLGSLPTILHVDDSLQAIKLQCIGKTVESQLYTNPDSRYILLPVVLHHLHIHLQEQKDLIMCARILSNVFCLIKKNSSEKSVLEEIDVIVASLLDILLRTILEITSRPQPSSSAMRFQFQDVTRTGFLNRESSHGSTTLSTFSVCADTYGKVPMTSRHTGEFVACLLSLLRQMTDRHYQQLLDSFNTKEELRDFLLQIFTVFRILIRPEMFPKDWTVMRLVANNVIITTVLYLSDALRKNFLNENFDYKIWDSYFYLAVIFINQLCLQLEMFTPSKKKKVLEKYGDMRVTMGCEIFSMWQNLGEHKLHFIPALIGPFLEVTLIPQPDLRNVMIPIFHDMMDWEQRRSGNFKQVEAKLIDKLDSLMSEGKGDETYRELFNSIIPLFGPYPSLLKKIERETWRESGVSLIATVTRLMERLLDYRDCMKMGEVDGKKIGCTVSLLNFYKTELNKEEMYIRYIHKLYDLHLKAQNFTEAAYTLLLYDELLEWSDRPLREFLTYPMQTEWQRKEHLHLTIIQNFDRGKCWENGIILCRKIAEQYESYYDYRNLSKMRMMEASLYDKIMDQQRLEPEFFRVGFYGKKFPFFLRNKEFVCRGHDYERLEAFQQRMLNEFPHAIAMQHANQPDETIFQAEAQYLQIYAVTPIPESQEVLQREGVPDNIKSFYKVNHIWKFRYDRPFHKGTKDKENEFKSLWVERTSLYLVQSLPGISRWFEVEKREVVEMSPLENAIEVLENKNQQLKTLISQCQTRQMQNINPLTMCLNGVIDAAVNGGVSRYQEAFFVKEYILSHPEDGEKIARLRELMLEQAQILEFGLAVHEKFVPQDMRPLHKKLVDQFFVMKSSLGIQEFSACMQASPVHFPNGSPRVCRNSAPASVSPDGTRVIPRRSPLSYPAVNRYSSSSLSSQASAEVSNITGQSESSDEVFNMQPSPSTSSLSSTHSASPNVTSSAPSSARASPLLSDKHKHSRENSCLSPRERPCSAIYPTPVEPSQRMLFNHIGDGALPRSDPNLSAPEKAVNPTPSSWSLDSGKEAKNMSDSGKLISPPVPPRPTQTASPARHTTSVSPSPAGRSPLKGSVQSFTPSPVEYHSPGLISNSPVLSGSYSSGISSLSRCSTSETSGFENQVNEQSAPLPVPVPVPVPSYGGEEPVRKESKTPPPYSVYERTLRRPVPLPHSLSIPVTSEPPALPPKPLAARSSHLENGARRTDPGPRPRPLPRKVSQL

SEQ ID NO: 14334 - protein, 120 aa, Homo sapiens
LCFESPEISRPVFPCLQMIQAIQVLRFHLLELEKVHELCDNFCHRYISCLKGKMPIDLVIDDREGGSKSDSEDITRSANLTDQPSWNRDHDDTASTRSGGTPGPSSGGHTSHSGDNSSEQ

SEQ ID NO: 14335 - protein, 810 aa, Homo sapiens
KREGFCQLLQQMKNKHSEQPEPDMITIFIGTWNMGNAPPPKKITSWFLSKGQGKTRDDSADYIPHDIYVIGTQEDPLSEKEWLEILKHSLQEITSVTFKTVAIHTLWNIRIVVLAKPEHENRISHICTDNVKTGIANTLGNKGAVGVSFMFNGTSLGFVNSHLTSGSEKKLRRNQNYMNILRFLALGDKKLSPFNITHRFTHLFWFGDLNYRVDLPTWEAETIIQKIKQQQYADLLSHDQLLTERREQKVFLHFEEEEITFAPTYRFERLTRDKYAYTKQKATGMKYNLPSWCDRVLWKSYPLVHVVCQSYGSTSDIMTSDHSPVFATFEAGVTSQFVSKNGPGTVDSQGQIEFLRCYATLKTKSQTKFYLEFHSSCLESFVKSQEGENEEGSEGELVVKFGETLPKLKPIISDPEYLLDQHILISIKSSDSDESYGEGCIALRLEATETQLPIYTPLTHHGELTGHFQGEIKLQTSQGKTREKLYDFVKTERDESSGPKTLKSLTSHDPMKQWEVTSRAPPCSGSSITEIINPNYMGVGPFGPPMPLHVKQTLSPDQQPTAWSYDQPPKDSPLGPCRGESPPTPPGQPPISPKKFLPSTANRGLPPRTQESRPSDLGKNAGDTLPQEDLPLTKPEMFENPLYGSLSSFPKPAPRKDQESPKMPRKEPPPCPEPGILSPSIVLTKAQEADRGEGPGKQVPAPRLRSFTCSSSAEGRAAGGDKSQGKPKTPVSSQAPVPAKRPIKPSRSEINQQTPPTPTPRPPLPVKSPAVLHLQHSKGRDYRDNTELPHHGKHRPEEGPPGPLGRTAMQ

SEQ ID NO: 14336 - protein, 2730 aa, Homo sapiens
MVSNSRTSSTEAVAGSAPLSQGSSGIMELYGSDIEPQPSSVNFIENPPDLNDSNQAQVDANVDLVSPDSGLATIRSSRSSKESSVFLSDDSPVGEGAGPHHTLLPGLDSYSPIPEGAVAEEHAWSGEHGEHFDLFNFDPAPMASGQSQQSSHSADYSPADDFFPNSDLSEGQLPAGPEGLDGMGTNMSNYSSSSLLSGAGKDSLVEHDEEFVQRQDSPRDNSERNLSLTDFVGDESPSPERLKNTGKRIPPTPMNSLVESSPSTEEPASLYTEDMTQKATDTGHMGPPQTHARCSSWWGGLEIDSKNIADAWSSSEQESVFQSPESWKEHKPSSIDRRASDSVFQPKSLEFTKSGPWESEFGQPELGSNDIQDKNEESLPFQNLPMEKSPLPNTSPQGTNHLIEDFASLWHSGRSPTAMPEPWGNPTDDGEPAAVAPFPAWSAFGKEDHDEALKNTWNLHPTSSKTPSVRDPNEWAMAKSGFAFSSSELLDNSPSEINNEAAPEIWGKKNNDSRDHIFAPGNPSSDLDHTWTNSKPPKEDQNGLVDPKTRGKVYEKVDSWNLFEENMKKGGSDVLVPWEDSFLSYKCSDYSASNLGEDSVPSPLDTNYSTSDSYTSPTFAGDEKETEHKPFAKEEGFESKDGNSTAEETDIPPQSLQQSSRNRISSGPGNLDMWASPHTDNSSEINTTHNLDENELKTEHTDGKNISMEDDVGESSQSSYDDPSMMQLYNETNRQLTLLHSSTNSRQTAPDSLDLWNRVILEDTQSTATISDMDNDLDWDDCSGGAAIPSDGQTEGYMAEGSEPETRFTVRQLEPWGLEYQEANQVDWELPASDEHTKDSAPSEHHTLNEKSGQLIANSIWDSVMRDKDMSSFMLPGSSHITDSEQRELPPEIPSHSANVKDTHSPDAPAASGTSESEALISHLDKQDTERETLQSDAASLATRLENPGYFPHPDPWKGHGDGQSESEKEAQGATDRGHLDEEEVIASGVENASGISEKGQSDQELSSLVASEHQEICIKSGKISSLAVTFSPQTEEPEEVLEYEEGSYNLDSRDVQTGMSADNLQPKDTHEKHLMSQRNSGETTETSDGMNFTKYVSVPEKDLEKTEECNFLEPENVGGGPPHRVPRSLDFGDVPIDSDVHVSSTCSEITKNLDVKGSENSLPGAGSSGNFDRDTISSEYTHSSASSPELNDSSVALSSWGQQPSSGYQEENQGNWSEQNHQESELITTDGQVEIVTKVKDLEKNRINEFEKSFDRKTPTFLEIWNDSVDGDSFSSLSSPETGKYSEHSGTHQESNLIASYQEKNEHDISATVQPEDARVISTSSGSDDDSVGGEESIEEEIQVANCHVAEDESRAWDSLNESNKFLVTADPKSENIYDYLDSSEPAENENKSNPFCDNQQSSPDPWTFSPLTETEMQITAVEKEKRSSPETGTTGDVAWQISPKASFPKNEDNSQLEMLGFSADSTEWWKASPQEGRLIESPFERELSDSSGVLEINSSVHQNASPWGVPVQGDIEPVETHYTNPFSDNHQSPFLEGNGKNSHEQLWNIQPRQPDPDADKFSQLVKLDQIKEKDSREQTFVSAAGDELTPETPTQEQCQDTMLPVCDHPDTAFTHAEENSCVTSNVSTNEGQETNQWEQEKSYLGEMTNSSIATENFPAVSSPTQLIMKPGSEWDGSTPSEDSRGTFVPDILHGNFQEGGQLASAAPDLWIDAKKPFSLKADGENPDILTHCEHDSNSQASDSPDICHDSEAKQETEKHLSACMGPEVESSELCLTEPEIDEEPIYEPGREFVPSNAELDSENATVLPPIGYQADIKGSSQPASHKGSPEPSEINGDNSTGLQVSEKGASPDMAPILEPVDRRIPRIENVATSIFVTHQEPTPEGDGSWISDSFSPESQPGARALFDGDPHLSTENPALVPDALLASDTCLDISEAAFDHSFSDASGLNTSTGTIDDMSKLTLSEGHPETPVDGDLGKQDICSSEASWGDFEYDVMGQNIDEDLLREPEHFLYGGDPPLEEDSLKQSLAPYTPPFDLSYLTEPAQSAETIEEAGSPEDESLGCRAAEIVLSALPDRRSEGNQAETKNRLPGSQLAVLHIREDPESVYLPVGAGSNILSPSNVDWEVETDNSDLPAGGDIGPPNGASKEISELEEEKTIPTKEPEQIKSEYKEERCTEKNEDRHALHMDYILVNREENSHSKPETCEERESIAELELYVGSKETGLQGTQLASFPDTCQPASLNERKGLSAEKMSSKSDTRSSFESPAQDQSWMFLGHSEVGDPSLDARDSGPGWSGKTVEPFSELGLGEGPQLQILEEMKPLESLALEEASGPVSQSQKSKSRGRAGPDAVTLQAVTHDNEWEMLSPQPVQKNMIPDTEMEEETEFLELGTRISRPNGLLSEDVGMDIPFEEGVLSPSAADMRPEPPNSLDLNDTHPRRIKLTAPNINLSLDQSEGSILSDDNLDSPDEIDINVDELDTPDEADSFEYTGHEDPTANKDSGQESESIPEYTAEEEREDNRLWRTVVIGEQEQRIDMKVIEPYRRVISHGGYYGDGLNAIIVFAACFLPDSSRADYHYVMENLFLYVISTLELMVAEDYMIVYLNGATPRRRMPGLGWMKKCYQMIDRRLRKNLKSFIIVHPSWFIRTILAVTRPFISSKFSSKIKYVNSLSELSGLIPMDCIHIPESIIKLDEELREASEAAKTSCLYNDPEMSSMEKDIDLKLKEKP

SEQ ID NO: 14337 - protein, 696 aa, Homo sapiens
MGLCLAGRRRSVQWCAVSQPEATKCFQWQRNMRKVRGPPVSCIKRDSPIQCIQAIAENRADAVTLDGGFIYEAGLAPYKLRPVAAEVYGTERQPRTHYYAVAVVKKGGSFQLNELQGLKSCHTGLRRTAGWNVPIGTLRPFLNWTGPPEPIEAAVARFFSASCVPGADKGQFPNLCRLCAGTGENKCAFSSQEPYFSYSGAFKCLRDGAGDVAFIRESTVFEDLSDEAERDEYELLCPDNTRKPVDKFKDCHLARVPSHAVVARSVNGKEDAIWNLLRQAQEKFGKDKSPKFQLFGSPSGQKDLLFKDSAIGFSRVPPRIDSGLYLGSGYFTAIQNLRKSEEEVAARRARVVWCAVGEQELRKCNQWSGLSEGSVTCSSASTTEDCIALVLKGEADAMSLDGGYVYTAGKCGLVPVLAENYKSQQSSDPDPNCVDRPVEGYLAVAVVRRSDTSLTWNSVKGKKSCHTAVDRTAGWNIPMGLLFNQTGSCKFDEYFSQSCAPGSDPRSNLCALCIGDEQGENKCVPNSNERYYGYTGAFRCLAENAGDVAFVKDVTVLQNTDGNNNEAWAKDLKLADFALLCLDGKRKPVTEARSCHLAMAPNHAVVSRMDKVERLKQVLLHQQAKFGRNGSDCPDKFCLFQSETKNLLFNDNTECLARLHGKTTYEKYLGPQYVAGITNLKKCSTSPLLEACEFLR

SEQ ID NO: 14338 - protein, 1073 aa, Homo sapiens
MHQPPESTAAAAAAADISARKMAHPAMFPRRGSGSGSASALNAAGTGVGSNATSSEDFPPPSLLQPPPPAASSTSGPQPPPPQSLNLLSQAQLQAQPLAPGGTQMKKKSGFQITSVTPAQISASISSNNSIAEDTESYDDLDESHTEDLSSSEILDVSLSRATDLGEPERSSSEETLNNFQEAETPGAVSPNQPHLPQPHLPHLPQQNVVINGNAHPHHLHHHHQIHHGHHLQHGHHHPSHVAVASASITGGPPSSPVSRKLSTTGSSDSITPVAPTSAVSSSGSPASVMTNMRAPSTTGGIGINSVTGTSTVNNVNITAVGSFNPNVTSSMLGNVNISTSNIPSAAGVSVGPGVTSGVNVNILSGMGNGTISSSAAVSSVPNAAAGMTGGSVSSQQQQPTVNTSRFRVVKLDSSSEPFKKGRWTCTEFYEKENAVPATEGVLINKVVETVKQNPIEVTSERESTSGSSVSSSVSTLSHYTESVGSGEMGAPTVVVQQQQQQQQQQQQQPALQGVTLQQMDFGSTGPQSIPAVSIPQSISQSQISQVQLQSQELSYQQKQGLQPVPLQATMSAATGIQPSPVNVVGVTSALGQQPSISSLAQPQLPYSQAAPPVQTPLPGAPPPQQLQYGQQQPMVSTQMAPGHVKSVTQNPASEYVQQQPILQTAMSSGQPSSAGVGAGTTVIPVAQPQGIQLPVQPTAVPAQPAGASVQPVGQAPAAVSAVPTGSQIANIGQQANIPTAVQQPSTQVPPSVIQQGAPPSSQVVPPAQTGIIHQGVQTSAPSLPQQLVIASQSSLLTVPPQPQGVEPVAQGIVSQQLPAVSSLPSASSISVTSQVSSTGPSGMPSAPTNLVPPQNIAQTPATQNGNLVQSVSQPPLIATNTNLPLAQQIPLSSTQFSAQSLAQAIGSQIEDARRAAEPSLVGLPQTISGDSGGMSAVSDGSSSSLAASASLFPLKVLPLTTPLVDGEDESSSGASVVAIDNKIEQAMDLVKSHLMYAVREEVEVLKEQIKELIEKNSQLEQENNLLKTLASPEQLAQFQAQLQTGSPPATTQPQGTTQPPAQPASQGSGPTA

SEQ ID NO: 14339 - protein, 657 aa, Homo sapiens
MAEGSGEVVAVSATGAANGLNNGAGGTSATTCNPLSRKLHKILETRLDNDKEMLEALKALSTFFVENSLRTRRNLRGDIERKSLAINEEFVSIFKEVKEELESISEDVQAMSNCCQDMTSRLQAAKEQTQDLIVKTTKLQSESQKLEIRAQVADAFLSKFQLTSDEMSLLRGTREGPITEDFFKALGRVKQIHNDVKVLLRTNQQTAGLEIMEQMALLQETAYERLYRWAQSECRTLTQESCDVSPVLTQAMEALQDRPVLYKYTLDEFGTARRSTVVRGFIDALTRGGPGGTPRPIEMHSHDPLRYVGDMLAWLHQATASEKEHLEALLKHVTTQGVEENIQEVVGHITEGVCRPLKVRIEQVIVAEPGAVLLYKISNLLKFYHHTISGIVGNSATALLTTIEEMHLLSKKIFFNSLSLHASKLMDKVELPPPDLGPSSALNQTLMLLREVLASHDSSVVPLDARQADFVQVLSCVLDPLLQMCTVSASNLGTADMATFMVNSLYMMKTTLALFEFTDRRLEMLQFQIEAHLDTLINEQASYVLTRVGLSYIYNTVQQHKPEQGSLANMPNLDSVTLKAAMVQFDRYLSAPDNLLIPQLNFLLSATVKEQIVKQSTELVCRAYGEVYAAVMNPINEYKDPENILHRSPQQVQTLLS

SEQ ID NO: 14340 - protein, 181 aa, Homo sapiens
MEPLLLGRGLIVYLMFLLLKFSKAIEIPSSVQQVPTIIKQSKVQVAFPFDEYFQIECEAKGNPEPTFSWTKDGNPFYFTDHRIIPSNNSGTFRIPNEGHISHFQGKYRCFASNKLGIAMSEEIEFIVPSVPKFPKEKIDPLEVEEGDPIVLPCNPPKGLPPLHIYWMNIELEHIEQDERVY

SEQ ID NO: 14341 - protein, 301 aa, Homo sapiens
MGALRPTLLPPSLPLLLLLMLGMGCWAREVLVPEGPLYRVAGTAVSISCNVTGYEGPAQQNFEWFLYRPEAPDTALGIVSTKDTQFSYAVFKSRVVAGEVQVQRLQGDAVVLKIARLQAQDAGIYECHTPSTDTRYLGSYSGKVELRVLPDVLQVSAAPPGPRGRQAPTSPPRMTVHEGQELALGCLARTSTQKHTHLAVSFGRSVPEAPVGRSTLQEVVGIRSDLAVEAGAPYAERLAAGELRLGKEGTDRYRMVVGGAQAGDAGTYHCTAAEWIQDPDGSWAQIAEKRAVLAHVDVQTL

SEQ ID NO: 14342 - protein, 478 aa, Homo sapiens
MAWPNVFQRGSLLSQFSHHHVVVFLLTFFSYSLLHASRKTFSNVKVSISEQWTPSAFNTSVELPVEIWSSNHLFPSAEKATLFLGTLDTIFLFSYAVGLFISGIVGDRLNLRWVLSFGMCSSALVVFVFGALTEWLRFYNKWLYCCLWIVNGLLQSTGWPCVVAVMGNWFGKAGRGVVFGLWSACASVGNILGACLASSVLQYGYEYAFLVTASVQFAGGIVIFFGLLVSPEEIGLSGIEAEENFEEDSHRPLINGGENEDEYEPNYSIQDDSSVAQVKAISFYQACCLPGVIPYSLAYACLKLVNYSFFFWLPFYLSNNFGWKEAEADKLSIWYDVGGIIGGTLQGFISDVLQKRAPVLALSLLLAVGSLIGYSRFFIGGPSNMISSAISADLGRQELIQRSSEALATVTGIVDGSGSIGAAVGQYLVSLIRDKLGWMWVFYFFILMTSCTIVFISPLIVREIFSLVLRRQAHILRE

SEQ ID NO: 14343 - protein, 1004 aa, Homo sapiens
MKATTPLQTVDRPKDWYKTMFKQIHMVHKPGLYNPPYSAQSHPAAKTQTYRPLSKSHSDNSPNAFKDASSPVPPPHVPPPVPPLRPRDRSSTEKHDWDPPDRKVDTRKFRSEPRSIFEYEPGKSSILQHERPASLYQSSIDRSLERPMSSASMASDFRKRRKSEPAVGPPRGLGDQSASRTSPGRVDLPGSSTTLTKSFTSSSPSSPSRAKGGDDSKICPSLCSYSGLNGNPSSELDYCSTYRQHLDVPRDSPRAISFKNGWQMARQNAEIWSSTEETVSPKIKSRSCDDLLNDDCDSFPDPKVKSESMGSLLCEEDSKESCPMAWGSPYVPEVRSNGRSRIRHRSARNAPGFLKMYKKMHRINRKDLMNSEVICSVKSRILQYESEQQHKDLLRAWSQCSTEEVPRDMVPTRISEFEKLIQKSKSMPNLGDDMLSPVTLEPPQNGLCPKRRFSIEYLLEEENQSGPPARGRRGCQSNALVPIHIEVTSDEQPRAHVEFSDSDQDGVVSDHSDYIHLEGSSFCSESDFDHFSFTSSESFYGSSHHHHHHHHHHHRHLISSCKGRCPASYTRFTTMLKHERARHENTEEPRRQEMDPGLSKLAFLVSPVPFRRKKNSAPKKQTEKAKCKASVFEALDSALKDICDQIKAEKKRGSLPDNSILHRLISELLPDVPERNSSLRALRRSPLHQPLHPLPPDGAIHCPPYQNDCGRMPRSASFQDVDTANSSCHHQDRGGALQDRESPRSYSSTLTDMGRSAPRERRGTPEKEKLPAKAVYDFKAQTSKELSFKKGDTVYILRKIDQNWYEGEHHGRVGIFPISYVEKLTPPEKAQPARPPPPAQPGEIGEAIAKYNFNADTNVELSLRKGDRVILLKRVDQNWYEGKIPGTNRQGIFPVSYVEVVKKNTKGAEDYPDPPIPHSYSSDRIHSLSSNKPQRPVFTHENIQGGGEPFQALYNYTPRNEDELELRESDVIDVMEKCDDGWFVGTSRRTKFFGTFPGNYVKRL

SEQ ID NO: 14344 - protein, 687 aa, Homo sapiens
MLTFFLVSGGSLWLFVEFVLSLLEKMQTQEILRILRLPELGDLGQFFRSLSATTLDSGGARRSVIGSGPQLLTHYYDDARTMYQVFRRGLSISGNGPCLGFRKPKQPYQWLSYQEVADRAEFLGSGLLQHNCKACTDQFIGVFAQNRPEWIIVELACYTYSMVVVPLYDTLGPGAIRYIINTADISTVIVDKPQKAVLLLEHVERKETPGLKLIILMDPFEEALKERGQKCGVVIKSMQAVEDCGQENHQAPVPPQPDDLSIVCFTSGTTGNPKGAMLTHGNVVADFSGFLKVTEKVIFPRQDDVLISFLPLAHMFERVIQSVVYCHGGRVGFFQGDIRLLSDDMKALCPTIFPVVPRLLNRMYDKIFSQANTPLKRWLLEFAAKRKQAEVRSGIIRNDSIWDELFFNKIQASLGGCVRMIVTGAAPASPTVLGFLRAALGCQVYEGYGQTECTAGCTFTTPGDWTSGHVGAPLPCNHIKLVDVEELNYWACKGEGEICVRGPNVFKGYLKDPDRTKEALDSDGWLHTGDIGKWLPAGTLKIIDRKKHIFKLAQGEYVAPEKIENIYIRSQPVAQIYVHGDSLKAFLVGIVVPDPEVMPSWAQKRGIEGTYADLCTNKDLKKAILEDMVRLGKESGLHSFEQVKAIHIHSDMFSVQNGLLTPTLKAKRPELREYFKKQIEELYSISM

SEQ ID NO: 14345 - protein, 444 aa, Homo sapiens
MQLPRWWELGDPCAWTGQGRGTRRMSPATTGTFLLTVYSIFSKVHSDRNVYPSAGVLFVHVLEREYFKGEFPPYPKPGEISNDPITFNTNLMGYPDRPGWLRYIQRTPYSDGVLYGSPTAENVGKPTIIEITAYNRRTFETARHNLIINIMSAEAEFFIKNMNVEEMLASEVLGDFLGAVKNVWQPERLNAINITSALDRGGRVPLPINDLKEGVYVMVGADVPFSSCLREVENPQNQLRCSQEMEPVITCDKKFRTQFYIDWCKISLVDKTKQVSTYQEVIRGEGILPDGGEYKPPSDSLKSRDYYTDFLITLAVPSAVALVLFLILAYIMCCRREGVIQLVHHSAIQKSTKELRDMSKNREIAWPLSTLPVFHPVTGEIIPPLHTDNYDSTNMPLMQTQQNLPHQTQIPQQQTTGDFRLTTFQRFEVNGIPEERKLTEAMNL

SEQ ID NO: 14346 - protein, 619 aa, Homo sapiens
MGTALVYHEDMTATRLLWDDPECEIERPERLTAALDRLRQRGLEQRCLRLSAREASEEELGLVHSPEYVSLVRETQVLGKEELQALSGQFDAIYFHPSTFHCARLAAGAGLQLVDAVLTGAVQNGLALVRPPGHHGQRAAANGFCVFNNVAIAAAHAKQKHGLHRILVVDWDVHHGQGIQYLFEDDPSVLYFSWHRYEHGRFWPFLRESDADAVGRGQGLGFTVNLPWNQVGMGNADYVAAFLHLLLPLAFEGGYHLESLAESVCMTVQTLLGDPAPPLSGPMAPCQSALESIQSARAAQAPHWKSLQQQDVTAVPMSPSSHSPEGRPPPLLPGGPVCKAAASAPSSLLDQPCLCPAPSVRTAVALTTPDITLVLPPDVIQQEASALREETEAWARPHESLAREEALTALGKLLYLLDGMLDGQVNSGIAATPASAAAATLDVAVRRGLSHGAQRLLCVALGQLDRPPDLAHDGRSLWLNIRGKEAAALSMFHVSTPLPVMTGGFLSCILGLVLPLAYGFQPDLVLVALGPGHGLQGPHAALLAAMLRGLAGGRVLALLEENSTPQLAGILARVLNGEAPPSLGPSSVASPEDVQALMYLRGQLEPQWKMLQCHPHLVA

SEQ ID NO: 14347 - protein, 220 aa, Homo sapiens
MELLCCEGTRHAPRAGPDPRLLGDQRVLQSLLRLEERYVPRASYFQCVQREIKPHMRKMLAYWMLEDWEVLVLGKLKWDLAAVIAHDFLAFILHRLSLPRDRQALVKKHAQTFLALCATDYTFAMYPPSMIATGSIGAAVQGLGACSMSGDELTELLAGITGTEVDCLRACQEQIEAALRESLREASQTSSSPAPKAPRGSSSQGPSQTSTPTDVTAIHL

SEQ ID NO: 14348 - protein, 487 aa, Homo sapiens
MAESAGASSFFPLVVLLLAGSGGSGPRGVQALLCACTSCLQANYTCETDGACMVSIFNLDGMEHHVRTCIPKVELVPAGKPFYCLSSEDLRNTHCCYTDYCNRIDLRVPSGHLKEPEHPSMWGPVELVGIIAGPVFLLFLIIIIVFLVINYHQRVYHNRQRLDMEDPSCEMCLSKDKTLQDLVYDLSTSGSGSGLPLFVQRTVARTIVLQEIIGKGRFGEVWRGRWRGGDVAVKIFSSREERSWFREAEIYQTVMLRHENILGFIAADNKDNGTWTQLWLVSDYHEHGSLFDYLNRYTVTIEGMIKLALSAASGLAHLHMEIVGTQGKPGIAHRDLKSKNILVKKNGMCAIADLGLAVRHDAVTDTIDIAPNQRVGTKRYMAPEVLDETINMKHFDSFKCADIYALGLVYWEIARRCNSGGTFLFCLCSYLPFQDAGSPKAVLLPPFFLQPVGCLLPEPESSFKVAIKGVEVAVLRVRLFFRDQFVE

SEQ ID NO: 14349 - protein, 249 aa, Homo sapiens
MANSASPEQNQNHCSAINNSIPLMQGNLPTLTLSGKIRVTVTFFLFLLSATFNASFLLKLQKWTQKKEKGKKLSRMKLLLKHLTLANLLETLIVMPLDGMWNITVQWYAGELLCKVLSYLKLFSMYAPAFMMVVISLDRSLAITRPLALKSNSKVGQSMVGLAWILSSVFAGPQLPLHHPSFHHADLQCKNHLHPDTGPSSGPPRTTTESVQEQYTKSTAEDSKNDGCICHFIYCLLDSLLCPRNLVLV

SEQ ID NO: 14350 - protein, 976 aa, Homo sapiens
MALLGKRCDVPTNGCGPDRWNSAFTRKDEIITSLVSALDSMCSALSKLNAEVACVAVHDESAFVVGTEKGRMFLNARKELQSDFLRFCLSAAQHRAATSQLEGRVVRRVLTVASRALCPTGGPPWKDPEAEHPKKVQRGEGGGRSLPRSSLEHGSDVYLLRKMVEEVFDVLYSEALGRASVVPLPYERLLREPGLLAVQGLPEGLAFRRPAEYDPKALMAILEHSHRIRFKLKRPLEDGGRDSKALVELNGVSLIPKGSRDCGLHGQAPKVPPQDLPPTATSSSMASFLYSTALPNHAIRELKQEAPSCPLAPSDLGLSRPMPEPKATGAQDFSDCCGQKPTGPGGPLIQNVHASKRILFSIVHDKSEKWDAFIKETEDINTLRECVQILFNSRYAEALGLDHMVPVPYRKIACDPEAVEIVGIPDKIPFKRPCTYGVPKLKRILEERHSIHFIIKRMFDERIFTGNKFTKDTTKLEPASPPEDTSAEVSRATVLDLAGNARSDKGSMSEDCGPGTSGELGGLRPIKIEPEDLDIIQVTVPDPSPTSEEMTDSMPGHLPSEDSGYGMEMLTDKGLSEDARPEERPVEDSHGDVIRPLRKQVELLFNTRYAKAIGISEPVKVPYSKFLMHPEELFVVGLPEGISLRRPNCFGIAKLRKILEASNSIQFVIKRPELLTEGVKEPIMDSQERDSGDPLVDESLKRQGFQENYDARLSRIDIANTLREQVQDLFNKKYGEALGIKYPVQVPYKRIKSNPGSVIIEGLPPGIPFRKPCTFGSQNLERILAVADKIKFTVTRPFQGLIPKPDEDDANRLGEKVILREQVKELFNEKYGEALGLNRPVLVPYKLIRDSPDAVEVTGLPDDIPFRNPNTYDIHRLEKILKAREHVRMVIINQLQPFAEICNDAKVPAKDSSIPKRKRKRVSEGNSVSSSSSSSSSSSSNPDSVASANQISLVQWPMYMVDYAGLNVQLPGPLNY

SEQ ID NO: 14351 - protein, 1508 aa, Homo sapiens
MAVEGSTITSRIKNLLRSPSIKLRRSKAGNRREDLSSKVTLEKVLGITVSGGRGLACDPRSGLVAYPAGCVVVLFNPRKHKQHHILNSSRKTITALAFSPDGKYLVTGESGHMPAVRVWDVAEHSQVAELQEHKYGVACVAFSPSAKYIVSVGYQHDMIVNVWAWKKNIVVASNKVSSRVTAVSFSEDCSYFVTAGNRHIKFWYLDDSKTSKVNATVPLLGRSGLLGELRNNLFTDVACGRGKKADSTFCITSSGLLCEFSDRRLLDKWVELRTTVAHCISVSQDYIFCGCADGTVRLFNPSNLHFLSTLPRPHALGTDIASVTEASRLFSGVANARYPDTIALTFDPTNQWLSCVYNDHSIYVWDVRDPKKVGKVYSALYHSSCVWSVEVYPEVKDSNQACLPPSSFITCSSDNTIRLWNTESSGVHGSTLHRNILSSDLIKIIYVDGNTQALLDTELPGGDKADASLLDPRVGIRSVCVSPNGQHLASGDRMGTLRVHELQSLSEMLKVEAHDSEILCLEYSKPDTGLKLLASASRDRLIHVLDAGREYSLQQTLDEHSSSITAVKFAASDGQVRMISCGADKSIYFRTAQKSGDGVQFTRTHHVVRKTTLYDMDVEPSWKYTAIGCQDRNIRIFNISSGKQKKLFKGSQGEDGTLIKVQTDPSGIYIATSCSDKNLSIFDFSSGECVATMFGHSEIVTGMKFSNDCKHLISVSGDSCIFVWRLSSEMTISMRQRLAELRQRQRGGKQQGPSSPQRASGPNRHQAPSMLSPGPALSSDSDKEGEDEGTEEELPALPVLAKSTKKALASVPSPALPRSLSHWEMSRAQESVGFLDPAPAANPGPRRRGRWVQPGVELSVRSMLDLRQLETLAPSLQDPSQDSLAIIPSGPRKHGQEALETSLTSQNEKPPRPQASQPCSYPHIIRLLSQEEGVFAQDLEPAPIEDGIVYPEPSDNPTMDTSEFQVQAPARGTLGRVYPGSRSSEKHSPDSACSVDYSSSCLSSPEHPTEDSESTEPLSVDGISSDLEEPAEGDEEEEEEEGGMGPYGLQEGSPQTPDQEQFLKQHFETLASGAAPGAPVQVPERSESRSISSRFLLQVQTRPLREPSPSSSSLALMSRPAQVPQASGEQPRGNGANPPGAPPEVEPSSGNPSPQQAASVLLPRCRLNPDSSWAPKRVATASPFSGLQKAQSVHSLVPQERHEASLQAPSPGALLSREIEAQDGLGSLPPADGRPSRPHSYQNPTTSSMAKISRSISVGENLGLVAEPQAHAPIRVSPLSKLALPSRAHLVLDIPKPLPDRPTLAAFSPVTKGRAPGEAEKPGFPVGLGKAHSTTERWACLGEGTTPKPRTECQAHPGPSSPCAQQLPVSSLFQGPENLQPPPPEKTPNPMECTKPGAALSQDSEPAVSLEQCEQLVAELRGSVRQAVRLYHSVAGCKMPSAEQSRIAQLLRDTFSSVRQELEAVAGAVLSSPGSSPGAVGAEQTQALLEQYSELLLRAVERRMERKL

SEQ ID NO: 14352 - protein, 379 aa, Homo sapiens
LGSKFRYSGRTQAQTRQASTLIDRPAPHFERTSSKRVSRSLDGAPIGVMDQSLMKDFPGAAGEISAYGPGLVSIAVVQDGDGRREVRSPTKAPHLQLIEGKKNSLRVEGDNIYVRHSNLMLEELDKAQEDILKHQASISELKRNFMESTPEPRPNEWEKRRITPLSLQTQGRKGDHLFKDILSVKEKYLMPTIWTVEEKAQETDKTRAPESEGPCTGARDAVKSSHETLNIVEEKKRAEVGKDERVITEEMNGKEISPGSGPGEIRKVEPVTQKDSTSLSSESSSSSSESEEEDVGEYRPHHRVTEGTIREEQEYEEEVEEEPRPAAKVVEREEAVPEASPVTQAGASVITVETVIQENVGAQKIPGEKSVHEGALKQD

SEQ ID NO: 14353 - protein, 511 aa, Homo sapiens
MKFFLLLFTIGFCWAQYSPNTQQGRTSIVHLFEWRWVDIALECERYLAPKGFGGVQVSPPNENVAIYNPFRPWWERYQPVSYKLCTRSGNEDEFRNMVTRCNNVGVRIYVDAVINHMCGNAVSAGTSSTCGSYFNPGSRDFPAVPYSGWDFNDGKCKTGSGDIENYNDATQVRDCRLTGLLDLALEKDYVRSKIAEYMNHLIDIGVAGFRLDASKHMWPGDIKAILDKLHNLNSNWFPAGSKPFIYQEVIDLGGEPIKSSDYFGNGRVTEFKYGAKLGTVIRKWNGEKMSYLKNWGEGWGFVPSDRALVFVDNHDNQRGHGAGGASILTFWDARLYKMAVGFMLAHPYGFTRVMSSYRWPRQFQNGNDVNDWVGPPNNNGVIKEVTINPDTTCGNDWVCEHRWRQIRNMVIFRNVVDGQPFTNWYDNGSNQVAFGRGNRGFIVFNNDDWSFSLTLQTGLPAGTYCDVISGDKINGNCTGIKIYVSDDGKAHFSISNSAEDPFIAIHAESKL

SEQ ID NO: 14354 - protein, 216 aa, Homo sapiens
MSWIKEGELSLWERFCANIIKAGPMPKHIAFIMDGNRRYAKKCQVERQEGHSQGFNKLAETLRWCLNLGILEVTVYAFSIENFKRSKSEVDGLMDLARQKFSRLMEEKCFLNVCFAYTSRHEISNAVREMAWGVEQGLLDPSDISESLLDKCLYTNRSPHPDILIRTSGEVRLSDFLLWQTSHSCLVFQPVLWPEYTFWNLFEAILQFQMNHSVLQ

SEQ ID NO: 14355 - protein, 1242 aa, Homo sapiens
MGAASGRRGPGLLLPLPLLLLLPPQPALALDPGLQPGNFSADEAGAQLFAQSYNSSAEQVLFQSVAASWAHDTNITAENARRQEEAALLSQEFAEAWGQKAKELYEPIWQNFTDPQLRRIIGAVRTLGSANLPLAKRQQYNALLSNMSRIYSTAKVCLPNKTATCWSLDPDLTNILASSRSYAMLLFAWEGWHNAAGIPLKPLYEDFTALSNEAYKQDGFTDTGAYWRSWYNSPTFEDDLEHLYQQLEPLYLNLHAFVRRALHRRYGDRYINLRGPIPAHLLGDMWAQSWENIYDMVVPFPDKPNLDVTSTMLQQGWNATHMFRVAEEFFTSLELSPMPPEFWEGSMLEKPADGREVVCHASAWDFYNRKDFRIKQCTRVTMDQLSTVHHEMGHIQYYLQYKDLPVSLRRGANPGFHEAIGDVLALSVSTPEHLHKIGLLDRVTNDTESDINYLLKMALEKIAFLPFGYLVDQWRWGVFSGRTPPSRYNFDWWYLRTKYQGICPPVTRNETHFDAGAKFHVPNVTPYIRYFVSFVLQFQFHEALCKEAGYEGPLHQCDIYRSTKAGAKLRKVLQAGSSRPWQEVLKDMVGLDALDAQPLLKYFQPVTQWLQEQNQQNGEVLGWPEYQWHPPLPDNYPEGIDLVTDEAEASKFVEEYDRTSQVVWNEYAEANWNYNTNITTETSKILLQKNMQIANHTLKYGTQARKFDVNQLQNTTIKRIIKKVQDLERAALPAQELEEYNKILLDMETTYSVATVCHPNGSCLQLEPDLTNVMATSRKYEDLLWAWEGWRDKAGRAILQFYPKYVELINQAARLNGYVDAGDSWRSMYETPSLEQDLERLFQELQPLYLNLHAYVRRALHRHYGAQHINLEGPIPAHLLGNMWAQTWSNIYDLVVPFPSAPSMDTTEAMLKQGWTPRRMFKEADDFFTSLGLLPVPPEFWNKSMLEKPTDGREVVCHASAWDFYNGKDFRIKQCTTVNLEDLVVAHHEMGHIQYFMQYKDLPVALREGANPGFHEAIGDVLALSVSTPKHLHSLNLLSSEGGSDEHDINFLMKMALDKIAFIPFSYLVDQWRWRVFDGSITKENYNQEWWSLRLKYQGLCPPVPRTQGDFDPGAKFHIPSSVPYIRYFVSFIIQFQFHEALCQAAGHTGPLHKCDIYQSKEAGQRLATAMKLGFSRPWPEAMQLITGQPNMSASAMLSYFKPLLDWLRTENELHGEKLGWPQYNWTPNSGTATHPTSSLGS

SEQ ID NO: 14356 - protein, 661 aa, Homo sapiens
MELKKDINAVSIDMLLIVHSEKRRAAQGTLSDQQANPSSLLQRGGGFQGVGNGVRRWQKLEGNDFHENLVEKQHPQQPQVITSYNSQGTQLTVEVHPRDAMPQLLKKFSLAKRLQGDKNGNTRPRQPGGKDAHAYPWDRSSLKSMSLDLQQFEKLDIYASQVTAKSGLDELVSDLLQEAHTDLERVRAIWIWICHHIEYDIAAAQEKDRQAFKPTDILRTQKTNCDGYAGLFERMCRLAGVQCMTVPGYSKGFGYQTGQSFSGEFDHAWNAVYLEGRWHLVDSTWGSGLVDTITSKFTFLYNEFYFLTHPALFIEDHFPDNKNWQLLKPPQSLRQFENNMYHKSEFYNKGMLSAHPETSMIRTVNGKATVTIESCAPTLFMFMLNGKQEHGLLSLRKNGMKLEVYPPTMGTHKLQIFAKGNSDIYSSVLEYTLKCNYVDMGVQLPAELHQPVGPSWFSEQMGIMKPSHPDPIIHTSDGRCSISFSVEEGINVLASLHGDDGPITEETQRRYIFQLHREKQTELKVQLPHAGKFALKIFVKKRQEPGNYIFVFNYLVCCANTKVNWPMFPESFGNWGQDNELLEPLSGVLPANRNVPFKLKLHGIAKVLVKGQDTWPLTLNHEGYWEGSCSTAGCQEVYVMVLENANHNFYSYILKYKVNAQ

SEQ ID NO: 14357 - protein, 216 aa, Homo sapiens
DKCMNTTLTECDFSSLSKYGDHTLRVRAEFADEHSDWVNITFCPVDDTIIGPPGMQVEVLADSLHMRFLAPKIENEYETWTMKNVYNSWTYNVQYWKNGTDEKFQITPQYDFEVLRNLEPWTTYCVQVRGFLPDRNKAGEWSEPVCEQTTHDETVPSWMVAVILMASVFMVCLALLGCFALLWCVYKKTKYAFSPRNSLPQHLKERNWSDRKEQTE

SEQ ID NO: 14358 - protein, 238 aa, Homo sapiens
LVPCLNDCGPYGQCLLLRRHSYLYASCSCKAGWRGWSCTDNSTAQTVAQQRAATLLLTLSNLMFLAPIAVSVRRFFLVEASVYAYTMFFSTFYHACDQPGEAVLCILSYDTLQYCDFLGSGAAIWVTILCMARLKTVLKYAYRCGHRRQCYPTSWQRWAFYLLPGVSMASVGIAIYTSMMTSDNYYYTHSIWHILLAGSAALLLPPPDQPAEPWACSQKFPCHYQICKNDREELYAVT

SEQ ID NO: 14359 - protein, 518 aa, Homo sapiens
MSLVPATNYIYTPLNQLKGGTIVNVYGVVKFFKPPYLSKGTDYCSVVTIVDQTNVKLTCLLFSGNYEALPIIYKNGDIVRFHRLKIQVYKKETQGITSSGFASLTFEGTLGAPIIPRTSSKYFNFTTEDHKMVEALRVWASTHMSPSWTLLKLCDVQPMQYFDLTCQLLGKAEVDGASFLLKVWDGTRTPFPSWRVLIQDLVLEGDLSHIHRLQNLTIDILVYDNHVHVARSLKVGSFLRIYSLHTKLQSMNSENQTMLSLEFHLHGGTSYGRGIRVLPESNSDVDQLKKDLESANLTANQHSDVICQSEPDDSFPSSGSVSLYEVERCQQLSATILTDHQYLERTPLCAILKQKAPQQYRIRAKLRSYKPRRLFQSVKLHCPKCHLLQEVPHEGDLDIIFQDGATKTPDVKLQNTSLYDSKIWTTKNQKGRKVAVHFVKNNGILPLSNECLLLIEGGTLSEICKLSNKFNSVIPVRSGHEDLELLDLSAPFLIQGTIHHYGTGYCTPPICVCYDLYT

SEQ ID NO: 14360 - protein, 173 aa, Homo sapiens
MSDKSELKAELERKKQRLAQIREEKKRKEEERKKKETDQKKEAVAPVQEESDLEKKRREAEALLQSMGLTPESPIAEQPLRVVTADTCLFHYLVPPPMSPSSKSVSTPSEAGSQDSGDGAVGSRRGPIKLGMAKITQVDFPPREIVTYTKETQTPVMAQPKEDEEEDDDVVAP

SEQ ID NO: 14361 - protein, 170 aa, Homo sapiens
MVLTLGESWPVLVGRRFLSLSAADGSDGSHDSWDVERVAEWPWLSGTIRAVSHTDVTKKDLKVCVEFDGESWRKRRWIEVYSLLRRAFLVEHNLVLAERKSPEISERIVQWPAITYKPLLDKAGLGSITSVRFLGDQQRVFLSKDLLKPIQDVNSLRLSLTDNQIVSKEF

SEQ ID NO: 14362 - protein, 605 aa, Homo sapiens
MEVLIGDPITTCLSPSVYDIICNLGFQLRENCDINSIVTQNGEVCWKTITDCVSYTESEQGLDYWGSVRLLGPVCEAVHSHFLSLTKGQFEIRYAPWFQWTSFPELFPEIFDALESLQSPAISLSLMKLTSCLERALGDVFLLIGKECPFLLRDLLSSEELAQVFSQSVMNVLKVFVGSPCGLNLRNVLWHGFASPEEIPPKYCSMMILLTAGLGQLLKSYLQNTKLTLAHRSFISLTNLEDLIVFPDVTYEVLSVLEEVMMKSAFILKIMLPYWEVALVKFKSHRFADCAILLLTQLETGLRNVFATLNRCPKRLLTAESTALYTTFDQILAKHLNDGKINQLPLFLGEPAMEFLWDFLNHQEGPRIRDHLSHGEINLHEFSKETTNQLLAFSLVLLLRFVDDCLLSVFKEKSAVELLISLAEGYSSRCHPVFQLKKQVLSCEESIRVWALLPFPEELTRQAVRLEDNSETNACHSLITKMTDELYHHMPENRCVLKDLDRLPTETIRLLSPVLSLILLLIALELVNIHAVCGKNAHEYQQYLKFVKSILQYTENLVAYTSYEKNKWNETINLTHTALLKMWTFSEKKQMLIHLAKKSTSKVLL

SEQ ID NO: 14363 - protein, 1085 aa, Homo sapiens
IRDYKDEQGRLLCELFIRAPKRRNQPDYYEVVSQPIDLMKIQQKLKMEEYDDVNLLTADFQLLFNNAKSYYKPDSPEYKAACKLWDLYLRTRNEFVQKGEADDEDDDEDGQDNQGTVTEGSSPAYLKEILEQLLEAIVVATNPSGRLISELFQKLPSKVQYPDYYAIIKEPIDLKTIAQRIQNGSYKSIHAMAKDIDLLAKNAKTYNEPGSQVFKDANSIKKIFYMKKAEIEHHEMAKSSLRMRTPSNLAAARLTGPSHSKGSLGEERNPTSKYYRNKRAVQGGRLSAITMALQYGSESEEDAALAAARYEEGESEAESITSFMDVSNPFYQLYDTVRSCRNNQGQLIAEPFYHLPSKKKYPDYYQQIKMPISLQQIRTKLKNQEYETLDHLECDLNLMFENAKRYNVPNSAIYKRVLKLQQVMQAKKKELARRDDIEDGDSMISSATSDTGSAKRKRNTHDSEMLGLRRLSSKKNIRKQRMKILFNVVLEAREPGSGRRLCDLFMVKPSKKDYPDYYKIILEPMDLKIIEHNIRNDKYAGEEGMIEDMKLMFRNARHYNEEGSQVYNDAHILEKLLKEKRKELGPLPDDDDMASPKLKLSRKSGISPKKSKYMTPMQQKLNEVYEAVKNYTDKRGRRLSAIFLRLPSRSELPDYYLTIKKPMDMEKIRSHMMANKYQDIDSMVEDFVMMFNNACTYNEPESLIYKDALVLHKVLLETRRDLEGDEDSHVPNVTLLIQELIHNLFVSVMSHQDDEGRCYSDSLAEIPAVDPNFPNKPPLTFDIIRKNVENNRYRRLDLFQEHMFEVLERARRMNRTDSEIYEDAVELQQFFIKIRDELCKNGEILLSPALSYTTKHLHNDVEKERKEKLPKEIEEDKLKREEEKRAEKSEDSSGAAGLSGLHRTYSQDCSFKNSMYHVGDYVYVEPAEANLQPHIVCIERLWEDSAGEKWLYGCWFYRPNETFHLATRKFLEKEVFKSDYYNKVPVSKILGKCVVMFVKEYFKLCPENFRDEDVFVCESRYSAKTKSFKKIKLWTMPISSVRFVPRDVPLPVVRVASVFANADKGDDEKNTDNSEDSRAEDNFNL

SEQ ID NO: 14364 - protein, 667 aa, Homo sapiens
MFAMDSNHQSNYKLSKTEKKFLRKQIKAKHTLLRHEGIETVSYATQSLVVANGGLGNGVSRNQLLPVLEKCGLVDALLMPPNKPYSFARYRTTEESKRAYVTLNGKEVVDDLGQKITLYLNFVEKVQWKELRPQALPPGLMVVEEIISSEEEKMLLESVDWTEDTDNQNSQKSLKHRRVKHFGYEFHYENNNVDKDKPLSGGLPDICESFLEKWLRKGYIKHKPDQMTINQYEPGQGIPAHIDTHSAFEDEIVSLSLGSEIVMDFKHPDGIAVPVMLPRRSLLVMTGESRYLWTHGITCRKFDTVQASESLKSGIITSDVGDLTLSKRGLRTSFTFRKVRQTPCNCSYPLVCDSQRKETPPSFPESDKEASRLEQEYVHQVYEEIAGHFSSTRHTPWPHIVEFLKALPSGSIVADIGCGNGKYLGINKELYMIGCDRSQNLVDICRERQFQAFVCDALAVPVRSGSCDACISIAVIHHFATAERRVAALQEIVRLLRPGGKALIYVWAMEQEYNKQKSKYLRGNRNSQGKKEEMNSDTSVQRSLVEQMRDMGSRDSASSVPRINDSQEGGCNSRQVSNSKLPVHVNRTSFYSQDVLVPWHLKGNPDKGKPVEPFGPIGSQDPSPVFHRYYHVFREGELEGACRTVSDVRILQSYYDQGNWCVILQKA

SEQ ID NO: 14365 - protein, 410 aa, Homo sapiens
MRACISLVLAVLCGLAWAGKIESCASRCNEKFNRDAACQCDRRCLWHGNCCEDYEHLCTEDHKESEPLPQLEEETEEALASNLYSAPTSCQGRCYEAFDKHHQCHCNARCQEFGNCCKDFESLCSDHEVSHSSDAITKEEIQSISEKIYRADTNKAQKEDIVLNSQNCISPSETRNQVDRCPKPLFTYVNEKLFSKPTYAAFINLLNNYQRATGHGEHFSAQELAEQDAFLREIMKTAVMKELYSFLHHQNRYGSEQEFVDDLKNMWFGLYSRGNEEGDSSGFEHVFSGEVKKGKVTGFHNWIRFYLEEKEGLVDYYSHIYDGPWDSYPDVLAMQFNWDGYYKEVGSAFIGSSPEFEFALYSLCFIARPGKVCQLSLGGYPLAVRTYTWDKSTYGNGKKYIATAYIVSST

SEQ ID NO: 14366 - protein, 718 aa, Homo sapiens
MALPQGLLTFRDVAIEFSQEEWKCLDPAQRTLYRDVMLENYRNLVSLDISSKCMMKTFFSTGQGNTEAFHTGTLQRQASHHIGDFCFQKIEKDIHGFQFQWKEDETNDHAAPMTEIKELTGSTGQHDQRHAGNKHIKDQLGLSFHSHLPELHIFQPEGKIGNQVEKSINNASSVSTSQRICCRPKTHISNKYGNNSLHSSLLTQKRNVHMREKSFQCIESGKSFNCSSLLKKHQITHLEEKQCKCDVYGKVFNQKRYLACHRRSHIDEKPYKCNECGKIFGHNTSLFLHKALHTADKPYECEECDKVFSRKSHLETHKIIYTGGKPYKCKVCDKAFTCNSYLAKHTIIHTGEKPYKCNECGKVFNRLSTLARHRRLHTGEKPYECEECEKVFSRKSHLERHKRIHTGEKPYKCKVCDKAFAYNSYLAKHSIIHTGEKPYKCNECGKVFNQQSTLARHHRLHTAEKPYKCEECDKVFRCKSHLERHRRIHTGEKPYKCKVCDKAFRSDSCLTEHQRVHTGEKPYMCNECGKVFSTKANLACHHKLHTAEKPYKCEECEKVFSRKSHMERHRRIHTGEKPYKCKVCDKAFRRDSHLAQHQRVHTGEKPYKCNECGKTFRQTSSLIIHRRLHTGEKPYKCNECGKTFSQMSSLVYHHRLHSGEKPYKCNECGKVFNQQAHLAQHQRVHTGEKPYKCNECGKTFSQMSNLVYHHRLHSGEKP

SEQ ID NO: 14367 - protein, 372 aa, Homo sapiens
MNGPCQSLRKAEGLLEGCTSAVTVFRKLPLDSKAQSQKMRYKTSLVMRKRLRLYRNTLKESSSSSGHHGPQLTAASSPSVFPGLHEEPPQASPSRPLNGLLRLGLPGDMYARPEPFPPGPAARSDALAAAAALHGYGGMNLTVNLAAPHGPGAFFRYMRQPIKQELICKWLAADGTATPSLCSKTFSTMHELVTHVTVEHVGGPEQANHICFWEECPRQGKPFKAKYKLVNHIRVHTGEKPFPCPFPGCGKVFARSENLKIHKRTHTGEKPFRCEFEGCERRFANSSDRKKHSHVHTSDKPYTCKVRGCDKCYTHPSSLRKHMKVHGRSPPPSSGYDSATPSALVSPSSDCGHKSQVASSAAVAARTADLSE

SEQ ID NO: 14368 - protein, 333 aa, Homo sapiens
MQTDSLSPSPNPVSPVPLNNPTSAPRYGTVIPNRIFVGGIDFKTNESDLRKFFSQYGSVKEVKIVNDRAGVSKGYGFVTFETQEDAQKILQEAEKLNYKDKKLNIGPAIRKQQVGIPRSSIMPAAGTMYLTTSTGYPYTYHNGVAYFHTPEVTSVPPPWPSRSVCSSPVMVAQPIYQQPAYHYQGIKQCHTRRWMDSLLPFTKCDEATTQYLPGQWQWSVPQPSASSAPFLYLQPSEVIYQPVEIAQDGGCVPPPLSLMETSVPEPYSDHGVQATYHQVYAPSAITMPAPVMQPEPIKCGAFIIKTIGQLYSSSTDFLSNDPCVAEIQLQRTS

SEQ ID NO: 14369 - protein, 1350 aa, Homo sapiens
FVCPGTLKAIVDSPCIYEAEQKAGAWCKDPLQAADKIYFMPWTPYRTDTLIEYASLEDFQNSRQTTTYKLPNRVDGTGFVVYDGAVFFNKERTRNIVKFDLRTRIKSGEAIINYANYHDTSPYRWGGKTDIDLAVDENGLWVIYATEQNNGMIVISQLNPYTLRFEATWETVYDKRAASNAFMICGVLYVVRSVYQDNESETGKNSIDYIYNTRLNRGEYVDVPFPNQYQYIAAVDYNPRDNQLYVWNNNFILRYSLEFGPPDPAQVPTTAVTITSSAELFKTIISTTSTTSQKGPMSTTVAGSQEGSKGTKPPPAVSTTKIPPITNIFPLPERFCEALDSKGIKWPQTQRGMMVERPCPKGTRGTASYLCMISTGTWNPKGPDLSNCTSHWVNQLAQKIRSGENAASLANELAKHTKGPVFAGDVSSSVRLMEQLVDILDAQLQELKPSEKDSAGRSYNKLQKREKTCRAYLKAIVDTVDNLLRPEALESWKHMNSSEQAHTATMLLDTLEEGAFVLADNLLEPTRVSMPTENIVLEVAVLSTEGQIQDFKFPLGIKGAGSSIQLSANTVKQNSRNGLAKLVFIIYRSLGQFLSTENATIKLGADFIGRNSTIAVNSHVISVSINKESSRVYLTDPVLFTLPHIDPDNYFNANCSFWNYSERTMMGYWSTQGCKLVDTNKTRTTCACSHLTNFAILMAHREIAYKDGVHELLLTVITWVGIVISLVCLAICIFTFCFFRGLQSDRNTIHKNLCINLFIAEFIFLIGIDKTKYAIACPIFAGLLHFFFLAAFAWMCLEGVQLYLMLVEVFESEYSRKKYYYVAGYLFPATVVGVSAAIDYKSYGTEKACWLHVDNYFIWSFIGPVTFIILLNIIFLVITLCKMVKHSNTLKPDSSRLENINNYRVCDGYYNTDLPGYEDNKPFIKSWVLGAFALLCLLGLTWSFGLLFINEETIVMAYLFTIFNAFQGVFIFIFHCALQKKVRKEYGKCFRHSYCCGGLPTESPHSSVKASTTRTSARYSSGTQSRIRRMWNDTVRKQSESSFISGDINSTSTLNQGMTGNYLLTNPLLRPHGTNNPYNTLLAETVVCNAPSAPVFNSPGHSLNNARDTSAMDTLPLNGNFNNSYSLHKGDYNDSVQVVDCGLSLNDTAFEKMIISELVHNNLRGSSKTHNLELTLPVKPVIGGSSSEDDAIVADASSLMHSDNPGLELHHKELEAPLIPQRTHSLLYQPQKKVKSEGTDSYVSQLTAEAEDHLQSPNRDSLYTSMPNLRDSPYPESSPDMEEDLSPSRRSENEDIYYKSMPNLGAGHQLQMCYQISRGNSDGYIIPINKEGCIPEGDVREGQMQLVTSL

SEQ ID NO: 14370 - protein, 227 aa, Homo sapiens
MAEEVSTLMKATVLMRQPGRVQEIVGALRKGGGDRLQVISDFDMTLSRFAYNGKRCPSSYNILDNSKIISEECRKELTALLHHYYPIEIDPHRTVKEKLPHMVEWEGYKTFFNTLYHNNIPLFIFSAGIGDILEEIIRQMKVFHPNIHIVSNYMDFNEDGFLQGFKGQLIHTYNKNSSACENSGYFQQLEGKTNVILLGDSIGDLTMADGVPGVQNILKIGFLNDKV

SEQ ID NO: 14371 - protein, 1014 aa, Homo sapiens
METCAGPHPLRLFLCRMQLCLALLLGPWRPGTAEEVILLDSKASQAELGWTALPSNGWEEISGVDEHDRPIRTYQVCNVLEPNQDNWLQTGWISRGRGQRIFVELQFTLRDCSSIPGAAGTCKETFNVYYLETEADLGRGRPRLGGSRPRKIDTIAADESFTQGDLGERKMKLNTEVREIGPLSRRGFHLAFQDVGACVALVSVRVYYKQCRATVRGLATFPATAAESAFSTLVEVAGTCVAHSEGEPGSPPRMHCGADGEWLVPVGRCSCSAGFQERGDFCEACPPGFYKVSPRRPLCSPCPEHSRALENASTFCVCQDSYARSPTDPPSASCTRPPSAPRDLQYSLSRSPLVLRLRWLPPADSGGRSDVTYSLLCLRCGREGPAGACEPCGPRVAFLPRQAGLRERAATLLHLRPGARYTVRVAALNGVSGPAAAAGTTYAQVTVSTGPGAPWEEDEIRRDRVEPQSVSLSWREPIPAGAPGANDTEYEIRYYEKGQSEQTYSMVKTGAPTVTVTNLKPATRYVFQIRAASPGPSWEAQSFNPSIEVQTLGEAASGSRDQSPAIVVTVVTISALLVLGSVMSVLAIWRRPCSYGKGGGDAHDEEELYFHFKVPTRRTFLDPQSCGDLLQAVHLFAKELDAKSVTLERSLGGGRFGELCCGCLQLPGRQELLVAVHMLRDSASDSQRLGFLAEALTLGQFDHSHIVRLEGVVTRGSTLMIVTEYMSHGALDGFLRRHEGQLVAGQLMGLLPGLASAMKYLSEMGYVHRGLAARHVLVSSDLVCKISGFGRGPRDRSEAVYTTMSGRSPALWAAPETLQFGHFSSASDVWSFGIIMWEVMAFGERPYWDMSGQDVIKAVEDGFRLPPPRNCPNLLHRLMLDCWQKDPGERPRFSQIHSILSKMVQDPEPPKCALTTCPRPPTPLADRAFSTFPSFGSVGAWLEALDLCRYKDSFAAAGYGSLEAVAEMTAQDLVSLGISLAEHREALLSGISALQARVLQLQGQGVQVIIKTCL

SEQ ID NO: 14372 - protein, 748 aa, Homo sapiens [sequence omitted]

SEQ ID NO: 14373 - protein, 619 aa, Homo sapiens
MEQLSDEEIDHGAEEDSDKEDQDLDKMFGAWLGELDKLTQSLDSDKPMEPVKRSPLRQETNMANFSYRFSIYNLNEALNQGETVDLDALMADLCSIEQELSSIGSGNSKRQITETKATQKLPVSRHTLKHGTLKGLSSSSNRIAKPSHASYSLDDVTAQLEQASLSMDEAAQQSVLEDTKPLVTNQHRRTASAGTVSDAEVHSISNSSHSSITSAASSMDSLDIDKVTRPQELDLTHQGQPITEHAISLRCSSKQAKRHIDFTEEQAELTPEEQAAKLKAEKIRVALEKIKEAQVKKLVIRVHMSDDSSKTMMVDERQTVRQVLDNLMDKSHCGYSLDWSLVETVSELQMERIFEDHENLVENLLNWTRDSQNKLIFMERIEKYALFKNPQNYLLGKKETAEMADRNKEVLLEECFCGSSVTVPEIEGVLWLKDDGKKSWKKRYFLLRASGIYYVPKGKAKVSRDLVCFLQLDHVNVYYGQDYRNKYKAPTDYCLVLKHPQIQKKSQYIKYLCCDDVRTLHQWVNGIRIAKYGKQLYMNYQEALKRTESAYDWTSLSSSSIKSGSSSSSIPESQSNHSNQSDSGVSDTQPAGHVRSQSIVSSVFSEAWKRGTQLEESSK

SEQ ID NO: 14374 - protein, 469 aa, Homo sapiens
MCSLASGATGYSHLLKKHFHTVSLSISLILTAWFINMNPTVEYMNSIYNPVPWEKEEYLKPVLEDDLLLQFDVEDLYEPVSVPFSYPNGLSENTSVVEKLKHMEARALSAEAALARAREDLQKMKQFAQDFVMHTDVRTCSSSTSVIADLQEDEDGVYFSSYGHYGIHEEMLKDKIRTESYRDFIYQNPHIFKDKVVLDVGCGTGILSMFAAKAGAKKVLGVDQSEILYQAMDIIRLNKLEDTITLIKGKIEEVHLPVEKVDVIISEWMGYFLLFESMLDSVLYAKNKYLAKGGSVYPDICTISLVAVSDVNKHADRIAFWDDVYGFKMSCMKKAVIPEAVVEVLDPKTLISEPCGIKHIDCHTTSISDLEFSSDFTLKITRTSMCTAIAGYFDIYFEKNCHNRVVFSTGPQSTKTHWKQTVFLLEKPFSVKAGEALKGKVTVHKNKKDPRSLTVTLTLNNSTQTYGLQ

SEQ ID NO: 14375 - protein, 285 aa, Homo sapiens
MAAPKGSLWVRTQLGLPPLLLLTMALAGGSGTASAEAFDSVLGDTASCHRACQLTYPLHTYPKVSASLYTVDHIEEELYACQRGCRLFSICQFVDDGIDLNRTKLECESACTEAYSQSDEQYACHLGCQNQLPFAELRQEQLMSLMPKMHLLFPLTLVRSFWSDMMDSAQSFITSSWTFYLQADDGKIVIFQSKPEIQYAPHLEQEPTNLRESSLSKMSYLQMRNSQAHRNFLEDGESDGFLRCLSLNSGWILTTTLVLSVMVLLWICCATVATAVEQYVPSEVN

SEQ ID NO: 14376 - protein, 144 aa, Homo sapiens
MAGPVKDREAFQRLNFLYQAAHCVLAQDPENQALARFYCYTERTIAKRLVLRRDPSVKRTLCRGCSSLLVPGLTCTQRQRRCRGQRWTVQTCLTCQRSQRFLNDPGHLLWGDRPEAQLGSQAGERFQTTTTLAKHSPLHFRPPS

SEQ ID NO: 14377 - protein, 1679 aa, Homo sapiens
MSTPDPPLGGTPRPGPSPGPGPSPGAMLGPSPGPSPGSAHSMMGPSPGPPSAGHPIPTQGPGGYPQDNMHQMHKPMESMHEKGMSDDPRYNQMKGMGMRSGGHAGMGPPPSPMDQHSQGYPSPLGGSEHASSPVPASGPSSGPQMSSGPGGAPLDGADPQALGQQNRGPTPFNQNQLHQLRAQIMAYKMLARGQPLPDHLQMAVQGKRPMPGMQQQMPTLPPPSVSATGPGPGPGPGPGPGPGPAPPNYSRPHGMGGPNMPPPGPSGVPPGMPGQPPGGPPKPWPEGPMANAAAPTSTPQKLIPPQPTGRPSPAPPAVPPAASPVMPPQTQSPGQPAQPAPMVPLHQKQSRITPIQKPRGLDPVEILQEREYRLQARIAHRIQELENLPGSLAGDLRTKATIELKALRLLNFQRQLRQEVVVCMRRDTALETALNAKAYKRSKRQSLREARITEKLEKQQKIEQERKRRQKHQEYLNSILQHAKDFKEYHRSVTGKIQKLTKAVATYHANTEREQKKENERIEKERMRRLMAEDEEGYRKLIDQKKDKRLAYLLQQTDEYVANLTELVRQHKAAQVAKEKKKKKKKKKAENAEGQTPAIGPDGEPLDETSQMSDLPVKVIHVESGKILTGTDAPKAGQLEAWLEMNPGYEVAPRSDSEESGSEEEEEEEEEEQPQAAQPPTLPVEEKKKIPDPDSDDVSEVDARHIIENAKQDVDDEYGVSQALARGLQSYYAVAHAVTERVDKQSALMVNGVLKQYQIKGLEWLVSLYNNNLNGILADEMGLGKTIQTIALITYLMEHKRINGPFLIIVPLSTLSNWAYEFDKWAPSVVKVSYKGSPAARRAFVPQLRSGKFNVLLTTYEYIIKDKHILAKIRWKYMIVDEGHRMKNHHCKLTQVLNTHYVAPRRLLLTGTPLQNKLPELWALLNFLLPTIFKSCSTFEQWFNAPFAMTGEKVDLNEEETILIIRRLHKVLRPFLLRRLKKEVEAQLPEKVEYVIKCDMSALQRVLYRHMQAKGVLLTDGSEKDKKGKGGTKTLMNTIMQLRKICNHPYMFQHIEESFSEHLGFTGGIVQGLDLYRASGKFELLDRILPKLRATNHKVLLFCQMTSLMTIMEDYFAYRGFKYLRLDGTTKAEDRGMLLKTFNEPGSEYFIFLLSTRAGGLGLNLQSADTVIIFDSDWNPHQDLQAQDRAHRIGQQNEVRVLRLCTVNSVEEKILAAAKYKLNVDQKVIQAGMFDQKSSSHERRAFLQAILEHEEQDESRHCSTGSGSASFAHTAPPPAGVNPDLEEPPLKEEDEVPDDETVNQMIARHEEEFDLFMRMDLDRRREEARNPKRKPRLMEEDELPSWIIKDDAEVERLTCEEEEEKMFGRGSRHRKEVDYSDSLTEKQWLKKITGKDIHDTASSVARGLQFQRGLQFCTRASKAIEEGTLEEIEEEVRQKKSSRKRKRDSDAGSSTPTTSTRSRDKDDESKKQKKRGRPPAEKLSPNPPNLTKKMKKIVDAVIKYKDSSSGRQLSEVFIQLPSRKELPEYYELIRKPVDFKKIKERIRNHKYRSLNDLEKDVMLLCQNAQTFNLEGSLIYEDSIVLQSVFTSVRQKIEKEDDSEGEESEEEEEGEEEGSESESRSVKVKIKLGRKEKAQDRLKGGRRRPSRGSRAKPVVSDDDSEEEQEEDRSGSGSEED

SEQ ID NO: 14378 - protein, 19 aa, Homo sapiens
MSSVAVLTQESFAEHRSGL

SEQ ID NO: 14379 - protein, 692 aa, Homo sapiens
MGPWGWKLRWTVALLLAAAGTAVGDRCERNEFQCQDGKCISYKWVCDGSAECQDGSDESQETCLSVTCKSGDFSCGGRVNRCIPQFWRCDGQVDCDNGSDEQGCLTLCEGPNKFKCHSGECITLDKVCNMARDCRDWSDEPIKECGTNECLDNNGGCSHVCNDLKIGYECLCPDGFQLVAQRRCEDIDECQDPDTCSQLCVNLEGGYKCQCEEGFQLDPHTKACKAVGSIAYLFFTNRHEVRKMTLDRSEYTSLIPNLRNVVALDTEVASNRIYWSDLSQRMICSTQLDRAHGVSSYDTVISRDIQAPDGLAVDWIHSNIYWTDSVLGTVSVADTKGVKRKTLFRENGSKPRAIVVDPVHGFMYWTDWGTPAKIKKGGLNGVDIYSLVTENIQWPNGITLDLLSGRLYWVDSKLHSISSIDVNGGNRKTILEDEKRLAHPFSLAVFEDKVFWTDIINEAIFSANRLTGSDVNLLAENLLSPEDMVLFHNLTQPRGVNWCERTTLSNGGCQYLCLPAPQINPHSPKFTCACPDGMLLARDMRSCLTEAEAAVATQETSTVRLKVSSTAVRTQHTTTRPVPDTSRLPGATPGLTTVEIVTMSHQALGDVAGRGNEKKPSSVRALSIVLPIVLLVFLCLGVFLLWKNWRLKNINSINFDNPVYQKTTEDEVHICHNQDGYSYPSRQMVSLEDDVA

SEQ ID NO: 14380 - protein, 159 aa, Homo sapiens
MIMNKMKNFKRRFSLSVPRTETIEESLAEFTEQFNQLHNRRNENSGEEPGQLSPGVQFQRRQNQRRFSMEVRASGALPRQVAGCTHKGVHRRAAALQPDFDVSKRLSLPMDIRLPQEFLQKLQMESPDLPKPLSRMSRRASLSDIGFGKLETYVKLDKL

SEQ ID NO: 14381 - protein, 433 aa, Homo sapiens
MAEAELHKERLQAIAEKRKRQTEIEGKRQQLDEQILLLQHSKSKVLREKWLLQGIPAGTAEEEEARRRQSEEDEFRVKQLEDNIQRLEQEIQTLESEESQISAKEQIILEKLKETEKSFKDFQKGFSSTDGDAVNYISSQLPDLPILCSRTAEPSPGQDGTSRAAAVYAMEINVEKDKQTGETKILSTSTIGPEGVHQKGVKVYDDGTKVVYEVRSGGTVVENGVHKLSTKDVEELIQKAGQSSLGGGHVSERTVIADGSLSHPKEHMLCKEAKLEMVHKSRKDHSSGNPGQQAQAPSAAGPEANLDQPVTMIFMGYQNIEDEEETKKVLGYDETIKAELVLIDEDDEKSLREKTVTDVSTIDGNAAELVSGRPVSDTTEPSSPEGKEESLATEPAPGVGWENVLLKEGESASNATETSGPDMTIKKPPQLSE

SEQ ID NO: 14382 - protein, 188 aa, Homo sapiens
MGVPRTPSRTVLFERERTGLTYRVPSLLPVPPGPTLLAFVEQRLSPDDSHAHRLVLRRGTLAGGSVRWGALHVLGTAALAEHRSMNPCPVHDAGTGTVFLFFIAVLGHTPEAVQIATGRNAARLCCVASRDAGLSWGSARDLTEEAIGGAVQDWATFAVGPGHGVQLPSGRLLVPAYTYRVDRRECFG

SEQ ID NO: 14383 - protein, 2695 aa, Homo sapiens
MSDKMSSFLHIGDICSLYAEGSTNGFISTLGLVDDRCVVQPETGDLNNPPKKFRDCLFKLCPMNRYSAQKQFWKAAKPGANSTTDAVLLNKLHHAADLEKKQNETENRKLLGTVIQYGNVIQLLHLKSNKYLTVNKRLPALLEKNAMRVTLDEAGNEGSWFYIQPFYKLRSIGDSVVIGDKVVLNPVNAGQPLHASSHQLVDNPGCNEVNSVNCNTSWKIVLFMKWSDNKDDILKGGDVVRLFHAEQEKFLTCDEHRKKQHVFLRTTGRQSATSATSSKALWEVEVVQHDPCRGGAGYWNSLFRFKHLATGHYLAAEVDPDQDASRSRLRNAQEKMVYSLVSVPEGNDISSIFELDPTTLRGGDSLVPRNSYVRLRHLCTNTWVHSTNIPIDKEEEKPVMLKIGTSPVKEDKEAFAIVPVSPAEVRDLDFANDASKVLGSIAGKLEKGTITQNERRSVTKLLEDLVYFVTGGTNSGQDVLEVVFSKPNRERQKLMREQNILKQIFKLLQAPFTDCGDGPMLRLEELGDQRHAPFRHICRLCYRVLRHSQQDYRKNQEYIAKQFGFMQKQIGYDVLAEDTITALLHNNRKLLEKHITAAEIDTFVSLVRKNREPRFLDYLSDLCVSMNKSIPVTQELICKAVLNPTNADILIETKLVLSRFEFEGVSSTGENALEAGEDEEEVWLFWRDSNKEIRSKSVRELAQDAKEGQKEDRDVLSYYRYQLNLFARMCLDRQYLAINEISGQLDVDLILRCMSDENLPYDLRASFCRLMLHMHVDRDPQEQVTPVKYARLWSEIPSEIAIDDYDSSGASKDEIKERFAQTMEFVEEYLRDVVCQRFPFSDKEKNKLTFEVVNLARNLIYFGFYNFSDLLRLTKILLAILDCVHVTTIFPISKMAKGEENKGSNVMRSIHGVGELMTQVVLRGGGFLPMTPMAAAPEGNVKQAEPEKEDIMVMDTKLKIIEILQFILNVRLDYRISCLLCIFKREFDESNSQTSETSSGNSSQEGPSNVPGALDFEHIEEQAEGIFGGSEENTPLDLDDHGGRTFLRVLLHLTMHDYPPLVSGALQLLFRHFSQRQEVLQAFKQVQLLVTSQDVDNYKQIKQDLDQLRSIVEKSELWVYKGQGPDETMDGASGENEHKKTEEGNNKPQKHESTSSYNYRVVKEILIRLSKLCVQESASVRKSRKQQQRLLRNMGAHAVVLELLQIPYEKAEDTKMQEIMRLAHEFLQNFCAGNQQNQALLHKHINLFLNPGILEAVTMQHIFMNNFQLCSEINERVVQHFVHCIETHGRNVQYIKFLQTIVKAEGKFIKKCQDMVMAELVNSGEDVLVFYNDRASFQTLIQMMRSERDRMDENSPLMYHIHLVELLAVCTEGKNVYTEIKCNSLLPLDDIVRVVTHEDCIPEVKIAYINFLNHCYVDTEVEMKEIYTSNHMWKLFENFLVDICRACNNTSDRKHADSILEKYVTEIVMSIVTTFFSSPFSDQSTTLQTRQPVFVQLLQGVFRVYHCNWLMPSQKASVESCIRVLSDVAKSRAIAIPVDLDSQVNNLFLKSHSIVQKTAMNWRLSARNAARRDSVLAASRDYRNIIERLQDIVSALEDRLRPLVQAELSVLVDVLHRPELLFPENTDARRKCESGGFICKLIKHTKQLLEENEEKLCIKVLQTLREMMTKDRGYGEKGEALRQVLVNRYYGNVRPSGRRESLTSFGNGPLSAGGPGKPGGGGGGSGSSSMSRGEMSLAEVQCHLDKEGASNLVIDLIMNASSDRVFHESILLAIALLEGGNTTIQHSFFCRLTEDKKSEKFFKVFYDRMKVAQQEIKATVTVNTSDLGNKKKDDEVDRDAPSRKKAKEPTTQITEEVRDQLLEASAATRKAFTTFRREADPDDHYQPGEGTQATADKAKDDLEMSAVITIMQPILRFLQLLCENHNRDLQNFLRCQNNKTNYNLVCETLQFLDCICGSTTGGLGLLGLYINEKNVALINQTLESLTEYCQGPCHENQNCIATHESNGIDIITALILNDINPLGKKRMDLVLELKNNASKLLLAIMESRHDSENAERILYNMRPKELVEVIKKAYMQGEVEFEDGENGEDGAASPRNVGHNIYILAHQLARHNKELQSMLKPGGQVDGDEALEFYAKHTAQIEIVRLDRTMEQIVFPVPSICEFLTKESKLRIYYTTERDEQGSKINDFFLRSEDLFNEMNWQKKLRAQPVLYWCARNMSFWSSISFNLAVLMNLLVAFFYPFKGVRGGTLEPHWSGLLWTAMLISLAIVIALPKPHGIRALIASTILRLIFSVGLQPTLFLLGAFNVCNKIIFLMSFVGNCGTFTRGYRAMVLDVEFLYHLLYLVICAMGLFVHEFFYSLLLFDLVYREETLLNVIKSVTRNGRSIILTAVLALILVYLFSIVGYLFFKDDFILEVDRLPNETAVPETGESLASEFLFSDVCRVESGENCSSPAPREELVPAEETEQDKEHTCETLLMCIVTVLSHGLRSGGGVGDVLRKPSKEEPLFAARVIYDLLFFFMVIIIVLNLIFGVIIDTFADLRSEKQKKEEILKTTCFICGLERDKFDNKTVTFEEHIKEEHNMWHYLCFIVLVKVKDSTEYTGPESYVAEMIKERNLDWFPRMRAMSLVSSDSEGEQNELRNLQEKLESTMKLVTNLSGQLSELKDQMTEQRKQKQRIGLLGHPPHMNVNPQQPA

SEQ ID NO: 14384 - protein, 1004 aa, Homo sapiens
MALIMEPVSKWSPSQVVDWMKGLDDCLQQYIKNFEREKISGDQLLRITHQELEDLGVSRIGHQELILEAVDLLCALNYGLETENLKTLSHKLNASAKNLQNFITGRRRSGHYDGRTSRKLPNDFLTSVVDLIGAAKSLLAWLDRSPFAAVTDYSVTRNNVIQLCLELTTIVQQDCTVYETENKILHVCKTLSGVCDHIISLSSDPLVSQSAHLEVIQLANIKPSEGLGMYIKSTYDGLHVITGTTENSPADRCKKIHAGDEVIQVNHQTVVGWQLKNLVNALREDPSGVILTLKKRPQSMLTSAPALLKNMRWKPLALQPLIPRSPTSSVATPSSTISTPTKRDSSALQDLYIPPPPAEPYIPRDEKGNLPCEDLRGHMVGKPVHKGSESPNSFLDQEYRKRFNIVEEDTVLYCYEYEKGRSSSQGRRESTPTYENSLLRYMSNEKIAQEEYMFQRNSKKDTGKKSKKKGDKSNSPTHYSLLPSLQMDALRQDIMGTPVPETTLYHTFQQSSLQHKSKKKNKGPIAGKSKRRISCKDLGRGDCEGWLWKKKDAKSYFSQKWKKYWFVLKDASLYWYINEEDEKAEGFISLPEFKIDRASECRKKYAFKACHPKIKSFYFAAEHLDDMNRWLNRINMLTAGYAERERIKQEQDYWSESDKEEADTPSTPKQDSPPPPYDTYPRPPSMSCASPYVEAKHSRLSSTETSQSQSSHEEFRQEVTGSSAVSPIRKTASQRRSWQDLIETPLTSSGLHYLQTLPLEDSVFSDSAAISPEHRRQSTLPTQKCHLQDHYGPYPLAESERMQVLNGNGGKPRSFTLPRDSGFNHCCLNAPVSACDPQDDVQPPEVEEEEEEEEEEGEAAGENIGEKSESREEKLGDSLQDLYRALEQASLSPLGEHRISTKMEYKLSFIKRCNDPVMNEKLHRLRILKSTLKAREGEVAIIDKVLDNPDLTSKEFQQWKQMYLDLFLDICQNTTSNDPLSISSEVDVITSSLAHTHSYIETHV

SEQ ID NO: 14385 - protein, 975 aa, Homo sapiens
MGEQDGIRSSSWETSQGKSSPDSAWSWIPIMRDPGWIRNVWSSNINVQTMNYVGQLAGQVFVTVKELYKGLNPATLSGCIDIIVIRQPNGNLQCSPFHVRFGKMGVLRSREKVVDIEINGESVDLHMKLGDNGEAFFVQETDNDQEVIPMHLATSPILSEGASRMECQLKRGSVDRMRGLDPSTPAQVIAPSETPSSSSVVKKRRKRRRKSQLDSLKRDDNMNTSEDEDMFPIEMSSDEAMELLESSRTLPNDIPPFQDDIPEENLSLAVIYPQSASYPNSDREWSPTPSSLVDCKRTAPHLAVAAEGGLSSSCPPQSSLFHPSESPSGSRPSTPKSDSELVSKSTERTGQKNPEMLWLWGELPQAAKSSSPHKMKESSPLSSRKICDKSHFQAIHSESSDTFSDQSPTLVGGALLDQNKPQTEMQFVNEEDLETLGAAAPLLPMIEELKPPSASVVQTANKTDSPSRKRDKRSRHLGADGVYLDDLTDMDPEVAALYFPKNGDPSGLAKHASDNGARSANQSPQSVGSSGVDSGVESTSDGLRDLPSIAISLCGGLSDHREITKDAFLEQAVSYQQFVDNPAIIDDPNLVVKIGSKYYNWTTAAPLLLAMQAFQKPLPKATVESIMRDKMPKKGGRWWFSWRGRNTTIKEESKPEQCLAGKAHSTGEQPPQLSLATRVKHESSSSDEERAAAKPSNAGHLPLLPNVSYKKTLRLTSEQLKSLKLKNGPNDVVFSVTTQYQGTCRCEGTIYLWNWDDKVIISDIDGTITRSDTLGHILPTLGKDWTHQGIAKLYHKVSQNGYKFLYCSARAIGMADMTRGYLHWVNERGTVLPQGPLLLSPSSLFSALHREVIEKKPEKFKVQCLTDIKNLFFPNTEPFYAAFGNRPADVYSYKQVGVSLNRIFTVNPKGELVQEHAKTNISSYVRLCEVVDHVFPLLKRSHSSDFPCSDTFSNFTFWREPLPPFENQDIHSASA

SEQ ID NO: 14386 - protein, 580 aa, Homo sapiens
MAGGGSDLSTRGLNGGVSQVANEMNHLPAHSQSLQRLFTEDQDVDEGLVYDTVFKHFKRHKLEISNAIKKTFPFLEGLRDRELITNKMFEDSEDSCRNLVPVQRVVYNVLSELEKTFNLSVLEALFSEVNMQEYPDLIHIYKSFKNAIQDKLSFQESDRKEREERPDIKLSLKQGEVPESPEARKESDQACGKMDTVDIANNSTLGKPKRKRRKKKGHGWSRMGTRTQKNNQQNDNSKADGQLVSSEKKANMNLKDLSKIRGRKRGKPGTHFTQSDRAPQKRVRSRASRKHKDETVDFQAPLLPVTCGGVKGILHKEKLEQGTLAKCIQTEDGKWFTPMEFEIKGGYARSKNWRLSVRCGGWPLRRLMEEGSLPNPPRIYYRNKKRILKSQNNSSVDPCMRNLDECEVCRDGGELFCCDTCSRVFHEDCHIPPVESEKTPWNCIFCRMKESPGSQQCCQESEVLERQMCPEEQLKCEFLLLKVYCCSESSFFAKIPYYYYIREACQGLKEPMWLDKIKKRLNEHGYPQVEGFVQDMRLIFQNHRASYKYKDFGQMGLRLEAEFEKDFKEVFAIQETNGNS

SEQ ID NO: 14387 - protein, 354 aa, Homo sapiens
SKVRRCRKPGPRDRQLTRVDKSPEMWCIVLFSLLAWVYAEPTMYGEILSPNYPQAYPSEVEKSWDIEVPEGYGIHLYFTHLDIELSENCAYDSVQIISGDTEEGRLCGQRSSNNPHSPIVEEFQVPYNKLQVIFKSDFSNEERFTGFAAYYVATDINECTDFVDVPCSHFCNNFIGGYFCSCPPEYFLHDDMKNCGVNCSGDVFTALIGEIASPNYPKPYPENSRCEYQIRLEKGFQVVVTLRREDFDVEAADSAGNCLDSLVFVAGDRQFGPYCGHGFPGPLNIETKSNALDIIFQTDLTGQKKGWKLRYHGDPMPCPKEDTPNSVWEPAKAKYVFRDVVQITCLDGFEVVEK

SEQ ID NO: 14388 - protein, 313 aa, Homo sapiens
MNILGLVVFAIVFGVALRKLGPEGELLIRFFNSFNEATMVLVSWIMWYAPVGIMFLVAGKIVEMEDVGLLFARLGKYILCCLLGHAIHGLLVLPLIYFLFTRKNPYRFLWGIVTPLATAFGTSSSSATLPLMMKCVEENNGVAKHISRFILPIGATVNMDGAALFQCVAAVFIAQLSQQSLDFVKIITILVTATASSVGAAGIPAGGVLTLAIILEAVNLPVDHISLILAVDWLVDRSCTVLNVEGDALGAGLLQNYVDRTESRSTEPELIQVKSELPLDPLPVPTEEGNPLLKHYRGPAGDATVASEKESVM

SEQ ID NO: 14389 - protein, 975 aa, Homo sapiens
MVEGRVSEFLKKLGFSGGGRQYQALEKDEEEALIDEQSELKAIEKEKKVTALPPKEACKCQKEDLARAFCVDLHTGLSEFSVTQRRLAHGWNEFVADNSEPVWKKYLDQFKNPLILLLLGSALVSVLTKEYEDAVSIATAVLVVVTVAFIQEYRSEKSLEELTKLVPPECNCLREGKLQHLLARELVPGDVVSLSIGDRIPADIRLTEVTDLLVDESSFTGEAEPCSKTDSPLTGGGDLTTLSNIVFMGTLVQYGRGQGVVIGTGESSQFGEVFKMMQAEETPKTPLQKSMDRLGKQLTLFSFGIIGLIMLIGWSQGKQLLSMFTIGVSLAVAAIPEGLPIVVMVTLVLGVLRMAKKRVIVKKLPIVETLGCCSVLCSDKTGTLTANEMTVTQLVTSDGLRAEVSGVGYDGQGTVCLLPSKEVIKEFSNVSVGKLVEAGCVANNAVIRKNAVMGQPTEGALMALAMKMDLSDIKNSYIRKKEIPFSSEQKWMAVKCSLKTEDQEDIYFMKGALEEVIRYCTMYNNGGIPLPLTPQQRSFCLQEEKRMGSLGLRVLALASGPELGRLTFLGLVGIIDPPRVGVKEAVQVLSESGVSVKMITGDALETALAIGRNIGLCNGKLQAMSGEEVDSVEKGELADRVGKVSVFFRTSPKHKLKIIKALQESGAIVAMTGDGVNDAVALKSADIGIAMGQTGTDVSKEAANMILVDDDFSAIMNAVEEGKGIFYNIKNFVRFQLSTSISALSLITLSTVFNLPSPLNAMQILWINIIMDGPPAQRSSQKTEVCCTAVRLGVEGRGESTWAGRAGLGVEPVDKDAFRQPPRSVRDTILSRALILKILMSAAIIISGTLFIFWKEMPEDRASTPRTTTMTFTCFVFFDLFNALTCRSQTKLIFEIGFLRNHMFLYSVLGSILGQLAVIYIPPLQRVFQTENLGALDLLFLTGLASSVFILSELLKLCEKYCCSPKRVQMHPEDV

SEQ ID NO: 14390 - protein, 421 aa, Homo sapiens
MGKRLDQPQMYPQYTYYYPHYLQTKQSYAPAPHPMAPPSPSTNSSSNNSSNNSSGEQLSKTNLYIRGLPPGTTDQDLIKLCQPYGKIVSTKAILDKNTNQCKGYGFVDFDSPAAAQKAVASLKANGVQAQMAKQQEQDPTNLYISNLPISMDEQELENMLKPFGHVISTRILRDANGVSRGVGFARMESTEKCEVVIQHFNGKYLKTPPGIPAPSEPLLCKFADGGQKKRQNQSKYTQNGRPWPREGEAGMALTYDPTAAIQNGFYSSPYSIATNRMIPQTSITPFIAASPVSTYQVQSTSWMPHPPYVMQPTGAVITPTMDHPMSMQPANMMGPLTQQMNHLSLGTTGTYMTAAAPMQGTYIPQYTPVPPTAVSIEGVVADTSPQTVAPSSQDTSGQQQQIAVDTSNEHAPAYSYQQSKP

SEQ ID NO: 14391 - protein, 185 aa, Homo sapiens
LKMQRVEHAVSEFIKYEISFNVYMFHGGTNFGFMNGATYFGKHSGIVTSYDYDAVLTEAGDYTEKYLKLQKLFQSVSATPLPRVPKLPPKAVYPPVRPSLYLPLWDALSYLNEPVRSRQPVNMENLPINNGSGQSYGLVLYEKSICSGGRLRAHAHDVAQVFLDETMIGILNENNKDLHIPELRE

SEQ ID NO: 14392 - protein, 737 aa, Homo sapiens
MEGLTLSDAEQKYYSDLFSYCDIESTKKVVVNGRVLELFRAAQLPNDVVLQIMELCGATRLGYFGRSQFYIALKLVAVAQSGFPLRVESINTVKDLPLPRFVASKNEQESRHAASYSSDSENQGSYSGVIPPPPGRGQVKKGSVSHDTVQPRTSADAQEPASPVVSPQQSPPTSPHTWRKHSRHPSGGNSERPLAGPGPFWSPFGEAQSGSSAGDAVWSGHSPPPPQENWVSFADTPPTSTLLTMHPASVQDQTTVRTVASATTAIEIRRQSSSYDDPWKITDEQRQYYVNQFKTIQPDLNGFIPGSAAKEFFTKSKLPILELSHIWELSDFDKDGALTLDEFCAAFHLVVARKNGYDLPEKLPESLMPKLIDLEDSADVGDQPGEVGYSGSPAEAPPSKSPSMPSLNQTWPELNQSSEDTAIVHPVPIRMTPSKIHMQEMELKRTGSDHTNPTSPLLVKPSDLLEENKINSSVKFASGNTVADGYSSSDSFTSDPEQIGSNVTRQRSHSGTSPDNTAPPPPPPRPQPSHSRSSSLDMNRTFTVTTGQQQAGVVAHPPAVPPRPQPSQAPGPAVHRPVDADGLITHTSTSPQQIPEQPNFADFSQFEVFAASNVNDEQDDEAEKHPEVLPSKGTTPLAPPPKPVRRRLKSEDELRPEVDEHTQKTGVLAAVLASQPSIPRSVGKDKKAIQASIRRNKETNTVLARLNSELQQQLKDVLEERISLEVQLEQLRPFSHL

SEQ ID NO: 14393 - protein, 227 aa, Homo sapiens
MEEEGVKEAGEKPRGAQMVDKAGWIKKSSGGLLGFWKDRYLLLCQAQLLVYENEDDQKCVETVELGSYEKCQDLRALLKRKHRFILLRSPGNKVSDIKFQAPTGEEKESWIKALNEGINRGKNKAFDEVKVDKSCALEHVTRDRVRGGQRRRPPTRVHLKEFGMNALLLSAWFGHLRILQILVNSGAKIHCESKEGNTALHLAAGRGHMAVLQRLVDIGLDLEEQNA

SEQ ID NO: 14394 - protein, 519 aa, Homo sapiens
MEGVLYKWTNYLSGWQPRWFLLCGGILSYYDSPEDAWKGCKGSIQMAVCEIQVHSVDNTRMDLIIPGEQYFYLKARSVAERQRWLVALGSAKACLTDSRTQKEKEFAENTENLKTKMSELRLYCDLLVQQVDKTKEVTTTGVSNSEEGIDVGTLLKSTCNTFLKTLEECMQIANAAFTSELLYRTPPGSPQLAMLKSSKMKHPIIPIHNSLERQMELSTCENGSLNMEINGEEEILMKNKNSLYLKSAEIDCSISSEENTDDNITVQGEIRKEDGMENLKNHDNNLTQSGSDSSCSPECLWEEGKEVIPTFFSTMNTSFSDIELLEDSGIPTEAFLASCYAVVPVLDKLGPTVFAPVKMDLVGNIKKVNQKYITNKEEFTTLQKIVLHEVEADVAQVRNSATEALLWLKRGLKFLKGFLTEVKNGEKDIQTALNNAYGKTLRQHHGWVVRGVFALALRAAPSYEDFVAALTVKEGDHQKEAFSIGMQRDLSLYLPAMEKQLAILDTLYEVHGLESDEVV

SEQ ID NO: 14395 - protein, 547 aa, Homo sapiens
MSEPPVYCNLVDLRRCPRSPPPGPACPLLQRLDAWEQHLDPNSGRCFYINSLTGCKSWKPPRRSRSETNPGSMEGTQTLKRNNDVLQPQAKGFRSDTGTPEPLDPQGSLSLSQRTSQLDPPALQAPRPLPQLLDDPHEVEKSGLLNMTKIAQGGRKLRKNWGPSWVVLTGNSLVFYREPPPTAPSSGWGPAGSRPESSVDLRGAALAHGRHLSSRRNVLHIRTIPGHEFLLQSDHETELRAWHRALRTVIERLDRENPLELRLSGSGPAELSAGEDEEEESELVSKPLLRLSSRRSSIRGPEGTEQNRVRNKLKRLIAKRPPLQSLQERGLLRDQVFGCQLESLCQREGDTVPSFLRLCIAAVDKRGLDVDGIYRVSGNLAVVQKLRFLVDRERAVTSDGRYVFPEQPGQEGRLDLDSTEWDDIHVVTGALKLFLRELPQPLVPPLLLPHFRAALALSESEQCLSQIQELIGSMPKPNHDTLRYLLEHLCRVIAHSDKNRMTPHNLGIVFGPTLFRPEQETSDPAAHALYPGQLVQLMLTNFTSLFP

SEQ ID NO: 14396 - protein, 201 aa, Homo sapiens
MESNHKSGDGLSGTQKEAALRALVQRTGYSLVQENGQRKYGGPPPGWDAAPPERGCEIFIGKLPRDLFEDELIPLCEKIGKIYEMRMMMDFNGNNRGYAFVTFSNKVEAKNAIKQLNNYEIRNGRLLGVCASVDNCRLFVGGIPKTKKREEILSEMKKVTEGVVDVIVYPSAADKTKNRGFAFVEYESHRAAAMARRKLLP

SEQ ID NO: 14397 - protein, 1655 aa, Homo sapiens
MSSASSEPGNGDASQQPLLGLDTVIQRLEDTILSPTASREDRALTVRGEGRQASPTPVPTRIREIVAGSLSEEPPQAGVQEPTATVARVQEENELLQEELTRLGDLLAQASAERDELASRCRVVSEQLQARLETTEAQLRRSELEHSVDLEEALGRLEAAEERSTGLCQVNALLREQLEHMKKANDALGRELAGMTGSVQRLQGELELRRWAQRQTRSGGLGQPRDLLLLWRQAVVLGTDLAELRVATERGLADLQADTARTARRLHTACLNLDSNLRLSASSTASTLGQQLRDKAGEMLQLQGRWDAEKVALQARLSEQTLLVEKLTEQNEQKAKTIAALRTDLQNLVAQEDARCLELAGSSITELGEPRRPLRSPQRATSPHQGASPPHICSPATLDPALQAMRAAIERRWRREQELCLQLKSSQALVASLQEQLSESRRELWAAQKLQQERAREQAREREALRGQLEAQRLEVQQCRASCKLLGREKAALEMVVEELKGKADAADAEKQGLEAEAAELQRSLLLQAERREELALRRERSCRALETSQGRLQQLEEKVSGLREELASVREALSTAQLQRDVVESEREGLRSALARAECSNADLELLVRRLKSEGVEQRDSLAAMAALMEGLAQDKSALNHLALQLEQERDQLREQRKTLEQERARAGEQLAQAEQQLALERAERRGLQQACGRLEQRQEQLEGQAALLGREKAQLQEQVGQVTCQKQALEEQLAQSLQDQEAQMGTLQQALQGKDALSEERAQLLAKQEALERQGRLAAEEAADLRVERDSLESSLLEAQQLATKLQEQLEEEARSAGLARQALQVEMEQLQSDWEVQEMKLRQDTVRLQRQVAQQEREAQRALESQALAHREALAQLQREKETLSLTLAEEKEVARCQLEQEKELVTKSAAEREALKGEIQSLKQERDESLLQLEHKMQQVMALSLKETERSLLSEELSRARRTLERVQQEAQSQQEQAQATISATTEELKALQAQFEDAITAHQRETTALRESLQDLAAERGDVEREAERLRAQLTVAQEGLAALRQELQGVEESREGLHREAQEARRALSDEAREKDVLLLFNSELRATICRAEQEKASFKRSKEEKEQKLLILEEAQAALQQEASALRAHLWELEQAGGDARQELRELHRQVRTLKAENQRRSGEAHELQAQCSQEVLELRRQAAKAEAKHEGARKEVLGLQRKLAEVEAAGEAHGQRLQEHLRESRGAEQTLRAELHSVTRKLQEASGVADALQARLDQACHRIHSLEQELAQAEGARQDAEAQLGRLCSTLRRGLGLQRQSPWASPEQPGSPTKGSDSSQALPGQQGTSPPARPHSPLRWPSPTPGGRSSELMDVATVQDILRDFVQKLREAQRERDDSRIQMATLSSRLSEAECRCARAQSRVGQLQKALAEAEEGQRRVEGALSSARAARALQKEALRRLELEHLASVRAAGQEKRRLQEQLETLRQALEESRRHSQGLAKQGKLLEEQLTNLEHRCQKAEVSLEPLRQMEQETLKREEDVARLGAEKEQLDQSLNSLHQEVDGALRQNQQLQAQMTEMEQAHTQRLQDLTAQHQRDLATEAERLHGARPQATQALESQEWTHQQQVKVLEEQVASLKEQLDQEVQWRQQAHLGQAFQTGHAQRD

SEQ ID NO: 14398 - protein, 742 aa, Homo sapiens
MEPNDSTSTAVEEPDSLEVLVKTLDSQTRTFIVGAQMNVKEFKEHIAASVSIPSEKQRLIYQGRVLQDDKKLQEYNVGGKVIHLVERAPPQTHLPSGASSGTGSASATHGGGSPPGTRGPGASVHDRNANSYVMVGTFNLPSDGSAVDVHINMEQAPIQSEPRVRLVMAQHMIRDIQTLLSRMECRGGPQPQHSQPPPQPPAVTPEPVALSSQTSEPVESEAPPREPMEAEEVEERAPAQNPELTPGPAPAGPTPAPETNAPNHPSPAEYVEVLQELQRLESRLQPFLQRYYEVLGAAATTDYNNNHEGREEDQRLINLVGESLRLLGNTFVALSDLRCNLACTPPRHLHVVRPMSHYTTPMVLQQAAIPIQINVGTTVTMTGNGTRPPPTPNAEAPPPGPGQASSVAPSSTNVESSAEGAPPPGPAPPPATSHPRVIRISHQSVEPVVMMHMNIQDSGTQPGGVPSAPTGPLGPPGHGQTLGSTLIQLPSLPPEFMHAVAHQITHQAMVAAVASAAAGQQVPGFPTAPTRVVIARPTPPQARPSHPGGPPVSGTLQGAGLGTNASLAQMVSGLVGQLLMQPVLVAQGTPGMAPPPAPATASASAGTTNTATTAGPAPGGPAQPPPTPQPSMADLQFSQLLGNLLGPAGPGAGGSGVASPTITVAMPGVPAFLQGMTDFLQATQTAPPPPPPPPPPPPAPEQQTMPPPGSPSGGAGSPGGLGLESLSPEFFTSVVQGVLSSL

SEQ ID NO: 14399 - protein, 449 aa, Homo sapiens
MELSMGPIQANHTGTGLLLTLQPEQKFQKVKGFGGAMTDAAALNILALSPPAQNLLLKSYFSEEGIGYNIIRVPMASCDFSIRTYTYADTPDDFQLHNFSLPEEDTKLKIPLIHRALQLAQRPVSLLASPWTSPTWLKTNGAVNGKGSLKGQPGDIYHQTWARYFVKFLDAYAEHKLQFWAVTAENEPSAGLLSGYPFQCLGFTPEHQRDFIARDLGPTLANSTHHNVRLLMLDDQRLLLPHWAKVVLTDPEAAKYVHGIAVHWYLDFLAPAKATLGETHRLFPNTMLFASEACVGSKFWEQSVRLGSWDRGMQYSHSIITNLLYHVVGWTDWNLALNPEGGPNWVRNFVDSPIIVDITKDTFYKQPMFYHLGHFSKFIPEGSQRVGLVASQKNDLDAVALMHPDGSAVVVVLNRSSKDVPLTIKDPAVGFLETISPGYSIHTYLWRRQ

SEQ ID NO: 14400 - protein, 477 aa, Homo sapiens
MYDAERGWSLSFAGCGFLGFYHVGATRCLSEHAPHLLRDARMLFGASAGALHCVGVLSEQTLQVLSDLVRKARSRNIGIFHPSFNLSKFLRQGLCKCLPANVHQLISGKIGISLTRVSDGENVLVSDFRSKDEVVDALVCSCFIPFYSGLIPPSFRGVRYVDGGVSDNVPFIDAKTTITVSPFYGEYDICPKVKSTNFLHVDITKLSLRLCTGNLYLLSRAFVPPDLKVLGEICLRGYLDAFRFLEEKGICNRPQPGLKSSSEGMDPEVAMPSWANMSLDSSPESAALAVRLEGDELLDHLRLSILPWDESILDTLSPRLATALSEEMKDKGGYMSKICNLLPIRIMSYVMLPCTLPVESAIAIVQRLVTWLPDMPDDVLWLQWVTSQVFTRVLMCLLPASRSQMPVSSQQASPCTPEQDWPCWTPCSPKGCPAETKAEATPRSILRSSLNFFLGNKVPAGAEGLSTFPSFSLEKSL

SEQ ID NO: 14401 - protein, 650 aa, Homo sapiens
MACREFEMGRKKCERYWPLYGEDPITFAPFKISCEDEQARTDYFIRTLLLEFQNESRRLYQFHYVNWPDHDVPSSFDSILDMISLMRKYQEHEDVPICIHCSAGCGRTGAICAIDYTWNLLKAGKIPEEFNVFNLIQEMRTQRHSAVQTKEQYELVHRAIAQLFEKQLQLYEIHGAQKIADGVNEINTENMVSSIEPEKQDSPPPKPPRTRSCLVEGDAKEEILQPPEPHPVPPILTPSPPSAFPTVTTVWQDNDRYHPKPVLHMVSSEQHSADLNRNYSKSTELPGKNESTIEQIDKKLERNLSFEIKKVPLQEGPKSFDGNTLLNRGHAIKIKSASPCIADKISKPQELSSDLNVGDTSQNSCVDCSVTQSNKVSVTPPEESQNSDTPPRPDRLPLDEKGHVTWSFHGPENAIPIPDLSEGNSSDINYQTRKTVSLTPSPTTQVETPDLVDHDNTSPLFRTPLSFTNPLHSDDSDSDERNSDGAVTQNKTNISTASATVSAATSTESISTRKVLPMSIARHNIAGTTHSGAEKDVDVSEDSPPPLPERTPESFVLASEHNTPVRSEWSELQSQERSEQKKSEGLITSENEKCDHPAGGIHYEMCIECPPTFSDKREQISENPTEATDIGFGNRCGKPKGPRDPPSEWT

SEQ ID NO: 14402 - protein, 213 aa, Homo sapiens
MAHFSSEDQAMLQAMLRRLFQSVKEKITGAPSLECAEEILLHLEETDENFHNYEFVKYLRQHIGNTLGSMIEEEMEKCTSDRNQGEECGYDTVVQQVTKRTQESKEYKEMMHYLKNIMIAVVESMINKFEEDETRNQERQKKIQKEKSHSYRTDNCSDSDSSLNQSYKFCQGKLQLILDQLDPGQPKEVRYEALQTLCSAPPSDVLNCENWTT

SEQ ID NO: 14403 - protein, 820 aa, Homo sapiens
PLPMAVSRGLPPQQPQQPLLNLQGTNSASLLNGSMLQRALLLQQLQGNLRGYGMASPGLAAPSLTPPQLATPNLQQFFPQATRQSLLGPPPVGVPMNPSQFNLSGRNPQKQARTSSSTTPNRKTMPVEDKSDPPEGSEEAAEPRMDTPEDQDLPPCPEDIAKEKRTPAPEPEPCEASELPAKRLRSSEEPTEKEPPGQLQVKAQPQARMTVPKQTQTPDLLPEALEAQVLPRFQPRVLQVQAQVQSQTQPRIPSTDTQVQPKLQKQAQTQTSPEHLVLQQKQVQPQLQQEAEPQKQVQPQVQPQAHSQGPRQVQLQQEAEPLKQVQPQVQPQAHSQPPRQVQLQLQKQVQTQTYPQVHTQAQPSVQPQEHPPAQVSVQPPEQTHEQPHTQPQVSLLAPEQTPVVVHVCGLEMPPDAVEAGGGMEKTLPEPVGTQVSMEEIQNESACGLDVGECENRAREMPGVWGAGGSLKVTILQSSDSRAFSTVPLTPVPRPSDSVSSTPAATSTPSKQALQFFCYICKASCSSQQEFQDHMSEPQHQQRLGEIQHMSQACLLSLLPVPRDVLETEDEEPPPRRWCNTCQLYYMGDLIQHRRTQDHKIAKQSLRPFCTVCNRYFKTPRKFVEHVKSQGHKDKAKELKSLEKEIAGQDEDHFITVDAVGCFEGDEEEEEDDEDEEEIEVEEELCKQVRSRDISREEWKGSETYSPNTAYGVDFLVPVMGYICRICHKFYHSNSGAQLSHCKSLGHFENLQKYKAAKNPSPTTRPVSRRCAINARNALTALFTSSGRPPSQPNTQDKTPSKVTARPSQPPLPRRSTRLKT

SEQ ID NO: 14404 - protein, 567 aa, Homo sapiens
MGQPAPYAEGPIQGGDAGELCKCDFLVSISIPQTRSDIPAGARRSSMGPRSLDTCWGRGPERHVHRVSLLLPRLECNGVIFTHRNLCLPGGKTKTENEEKTAQLNISKESESHRLIVEGLLMDVPQHPDFKDRLEKSQLHDTGNKTKIGDCTDLTVQDHESSTTEREEIARKLEESSVSTHLITKQGFAKEQVFYKCGECGSYYNPHSDFHLHQRVHTNEKPYTCKECGKTFRYNSKLSRHQKIHTGEKPYSCEECGQAFSQNSHLLQHQKLHGGQRPYECTDCGKTFSYNSKLIRHQRIHTGEKPFKCKECGKAFSCSYDCIIHERIHNGEKPYECKECGKSLSSNSVLIQHQRIHTGEKPYECKECGKAFHRSSVFLQHQRFHTGEQLYKCNECWKTFSCSSRFIVHQRIHNGEKPYECQECGKTFSQKITLVQHQRVHTGEKPYECKECGKAFRWNASFIQHQKWHTRKKLINGTGLSAVKPYCPCAILSPLPPQHTCSALAPPGPPLSSSHAVVLPPSVPFFLLLPSSEKANPSPVQIAHFFQDLAFPGKSSLQSPNPLSHSL

SEQ ID NO: 14405 - protein, 540 aa, Homo sapiens
MPSLLVLTFSPCVLLGWALLAGGTGGGGVGGGGGGAGIGGGRQEREALPPQKIEVLVLLPQDDSYLFSLTRVRPAIEYALRSVEGNGTGRRLLPPGTRFQVAYEDSDCGNRALFSLVDRVAAARGAKPDLILGPVCEYAAAPVARLASHWDLPMLSAGALAAGFQHKDSEYSHLTRVAPAYAKMGEMMLALFRHHHWSRAALVYSDDKLERNCYFTLEGVHEVFQEEGLHTSIYSFDETKDLDLEDIVRNIQASERVVIMCASSDTIRSIMLVAHRHGMTSGDYAFFNIELFNSSSYGDGSWKRGDKHDFEAKQAYSSLQTVTLLRTVKPEFEKFSMEVKSSVEKQGLNMEDYVNMFVEGFHDAILLYVLALHEVLRAGYSKKDGGKIIQQTWNRTFEGIAGQVSIDANGDRYGDFSVIAMTDVEAGTQEVIGDYFGKEGRFEMRPNVKYPWGPLKLRIDENRIVEHTNSSPCKSCGLEESAVTGIVVGALLGAGLLMAFYFFRKKYRITIERRTQQEESNLGKHRELREDSIRSHFSVA

SEQ ID NO: 14406 - protein, 1110 aa, Homo sapiens
MERPLENGDESPDSQGHATDWRFAVCSFRDAWEEEEPASQMHVKDPGPPRPPAGATQDEELQGSPLSRKFQLPPAADESGDAQRGTVESSSVLSEGPGPSGVESLLCPMSSHLSLAQGTRDVQGRAVLLLCAHSPAWLQSECSSQELIRLLLYLRSIPRPEVQALGLTVLVDARICAPSSSLFSGLSQLQEAAPGAVYQVLLVGSTLLKEVPSGLQLEQLPSQSLLTHIPTAGLPTSLGGGLPYCHQAWLDFRRRLEALLQNCQAACALLQGAIESVKAVPQPMEPGEVGQLLQQTEVLMQQVLDSPWLAWLQCQGGRELTWLKQEVPEVTLSPDYRTAMDKADELYDRVDGLLHQLTLQSNQRIQALELVQTLEARESGLHQIEVWLQQVGWPALEEAGEPSLDMLLQAQGSFQELYQVAQEQVRQGEKFLQPLTGWEAAELDPPGARFLALRAQLTEFSRALAQRCQRLADAERLFQLFREALTWAEEGQRVLAELEQERPGVVLQQLQLHWTRHPDLPPAHFRKMWALATGLGSEAIRQECRWAWARCQDTWLALDQKLEASLKLPPVGSTASLCVSQVPAAPAHPPLRKAYSFDRNLGQSLSEPACHCHHAATIAACRRPEAGGGALPQASPTVPPPGSSDPRSLNRLQLVLAEMVATEREYVRALEYTMENYFPELDRPDVPQGLRGQRAHLFGNLEKLRDFHCHFFLRELEACTRHPPRVAYAFLRHRVQFGMYALYSKNKPRSDALMSSYGHTFFKDKQQALGDHLDLASYLLKPIQRMGKYALLLQELARACGGPTQELSALREAQSLVHFQLRHGNDLLAMDAIQGCDVNLKEQGQLVRQDEFVVRTGRHKSVRRIFLFEELLLFSKPRHGPTGVDTFAYKRSFKMADLGLTECCGNSNLRFEIWFRRRKARDTFVLQASSLAIKQAWTADISHLLWRQAVHNKEVRMAEMVSMGVGNKAFRDIAPSEEAINDRTVNYVLKCREVRSRASIAVAPFDHDSLYLGASNSLPGDPASCSVLGSLNLHLYRDPALLGLRCPLYPSFPEEAALEAEAELGGQPSLTAEDSEISSQCPSASGSSGSDSSCVSGQALGRGLEDLPCV

SEQ ID NO: 14407 - protein, 262 aa, Homo sapiens
MATQAKRPRVAGPVDGGDLDPVACFLSWCRRVGLELSPKVAVSRQGTVAGYGMVARESVQAGELLFVVPRAALLSQHTCSIGGLLERERVALQSQSGWVPLLLALLHELQAPASRWRPYFALWPELGRLEHPMFWPEEERRCLLQGTGVPEAVEKDLANIRSEYQSIVLPFMEAHPDLFSLRVRSLELYHQLVALVMAYSFQEPLEEEEDEKEPNSPVMVPAADILNHLANHNANLEYSAAWPQLLPFTSELSSDGSHSAHS

SEQ ID NO: 14408 - protein, 171 aa, Homo sapiens
MFENLNTALTPKLQASRSFPHLSKPVAPGSAPLGSGEPGGPGLWVGSSQHLKNLGKAMGAKVNDFLRRKEPSSLGSVGVTEINKTAGAQLASGTDAAPEAWLEDERSVLQETFPRLDPPPPITRKRTPRALKTTQDMLISSQPVLSSLEYGTEPSPGQAQDSAPTAQPDVP

SEQ ID NO: 14409 - protein, 1246 aa, Homo sapiens
REIGRTRTQSKIERVKVKTESQDPTSSWRSLIPVIKVNVSTGRLAFGNHYQPQTLCINFDDAFLTYTTKPPSSHLDQFMHIVKGKLENVRVMLVPSPRYVGLQNDEPPRLMGEGFVVMQSNDVDIYYYMDEPGLVPEETEENIEGEMSSEDCKLQDLPPCWGLDIVCGKGTDFNYGPWADRQRDCLWKFFFPPDYQVLKVSEIAQPGRPRQILAFELRMNIIADATIDLLFTKNRETNAVHVNVGAGSYLEINIPMTVEENGYTPAIKGQLLHVDATTSMQYRTLLEAEMLAFHINASYPRIWNMPQTWQCELEVYKATYHFIFAQKNFFTDLIQDWSSDSPPDIFSFVPYTWNFKIMFHQFEMIWAANQHNWIDCSTKQQENVYLAACGETLNIDFSLPFTDFVPATCNTKFSLRGEDVDLHLFLPDCHPSKYSLFMLVKNCHPNKMIHDTGIPAECQSGQKTVKPKWRNVTQEKSGWVECWTVPSVMLTIDYTWHPIYPQKADEQLKQSLSEMEETMLSVLRPSQKTSDRVVSSPSTSSRPPIDPSELPPDKLHVEMELSPDSQITLYGPLLNAFLCIKENYFGEDDMYMDFEEVISSPVLSLSTSSSSGWTAVGMENDKKENEGSAKSIHPLALRPWDITVLVNLYKVHGRLPVHGTTDGPECPTAFLERLCFEMKKGFRETMLQLILSPLNVFVSDNYQRPPVDEVLREGHINLSGLQLRAHAMFSAEGLPLGSDSLEYAWLIDVQAGSLTAKVTAPQLACLLEWGQTFVFHVVCREYELERPKSVIICQHGIDRRFCESKLSCIPGPCPTSDDLKYTMIRLAVDGADIYIVEHGCATNIKMGAIRVANCNLHNQSVGEGISAAIQDFQVRQYIEQLNNCRIGLQPAVLRRAYWLEAGSANLGLITVDIALAADHHSKHEAQRHFLETHDARTKRLWFLWPDDILKNKRCRNKCGCLGGCRFFGGTVTGLDFFKLEELTPSSSSAFSSTSAESDMYYGQSLLQPGEWIITKEIPKIIDGNVNGMKRKEWENKSVGIEVERKTQHLSLQVPLRSHSSSSSSEENSSSSAAQPLLAGEKESPSSVADDHLVQKEFLHGTKRDDGQASIPTEISGNSPVSPNTQDKSVGQSPLRSPLKRQASVCSTRLGSTKSLTAAFYGDKQPVTVGVQFSSDVSRSDENVLDSPKQRRSFGSFPYTPSADSNSFHQYRSMDSSMSMADSEAYFSAAEEFEPISSDEGPGTYPG

SEQ ID NO: 14410 - protein, 195 aa, Homo sapiens
STSYSQSDSQCGSPPRGWSEELDERGHTLYTSDYTNEKWLKHVDDQGRQYYYSADGSRSEWELPKYNASSQQQREIIKSRSLDRRLQEPIVLTKWRHSTIVLDTNDKESPTASKPCFPENESSPSSPKHQDTDQEKYGLLNVTKIAENGKKVRKNWLSSWAVLQGSSLLFTKTQGSSTSWFGSNQSKPEFTVDLK

SEQ ID NO: 14411 - protein, 892 aa, Homo sapiens
GKHKLLSTGPTEPWSIREKLCLASSVMRSGDQNWVSVSRAIKPFAEPGRPPDWFSQKHCASQYSELLETTETPKRKRGEKGEVVETVEDVIVRKLTAERVEELKKVIKETQERYRRLKRDAELIQAGHMDSRLDELCNDIATKKKLEEEEAEVKRKATDAAYQARQAVKTPPRRLPTVMVRSPIDSASPGGDYPLGDLTPTTMEEATSGVTPGTLPSTPVTSFPGIPDTLPPGSAPLEAPMTPVTDDSPQKKMLGQKATPPPSPLLSELLKKGSLLPTSPRLVNESEMAVASGHLNSTGVLLEVGGVLPMIHGGEIQQTPNTVAASPAASESVSQATIVMMPALPAPSSAPAVSTTESVAPVSQPDNCVPMEAVGDPHTVTVSMDSSEISMIINSIKEECFRSGVAEAPVGSKAPSIDGKEELDLAEKMDIAVSYTGEELDFETVGDIIAIIEDKVDDHPEVLDVAAVEAALSFCEENDDPQSLPGPWEHPIQQERDKPVPLPAPEMTVKQERLDFEETENKGIHELVDIREPSAEIKVEPAEPEPVISGAEIVAGVVPATSMEPPELRSQDLDEELGSTAAGEIVEADVAIGKGDETPLTNVKTEASPESMLSPSHGSNPIEDPLEAETQHKFEMSDSLKEESGTIFGSQIKDAPGEDEEEDGVSEAASLEEPKEEDQGEGYLSEMDNEPPVSESDDGFSIHNATLQSHTLADSIPSSPASSQFSVCSEDQEAIQAQKIWKKAIMLVWRAAANHRYANVFLQPVTDDIAPGYHSIVQRPMDLSTIKKNIENGLIRSTAEFQRDIMLMFQNAVMYNSSDHDVYHMAVEMQRDVLEQIQQFLATQLIMQTSESGISAKSLRGRDSTRKQDASEKDGGTRGRRCAIEADMKMKK

SEQ ID NO: 14412 - protein, 1147 aa, Homo sapiens
MADQIPLYPVRSAAAAAANRKRAAYYSAAGPRPGADRHSRYQLEDESAHLDEMPLMMSEEGFENEESDYHTLPRARIMQRKRGLEWFVCDGWKFLCTSCCGWLINICRRKKELKARTVWLGCPEKCEEKHPRNSIKNQKYNVFTFIPGVLYEQFKFFLNLYFLVISCSQFVPALKIGYLYTYWAPLGFVLAVTMTREAIDEFRRFQRDKEVNSQLYSKLTVRGKVQVKSSDIQVGDLIIVEKNQRIPSDMVFLRTSEKAGSCFIRTDQLDGETDWKLKVAVSCTQQLPALGDLFSISAYVYAQKPQMDIHSFEGTFTREDSDPPIHESLSIENTLWASTIVASGTVIGVVIYTGKETRSVMNTSNPKNKVGLLDLELNRLTKALFLALVALSIVMVTLQGFVGPWYRNLFRFLLLFSYIIPISLRVNLDMGKAVYGWMMMKDENIPGTVVRTSTIPEELGRLVYLLTDKTGTLTQNEMIFKRLHLGTVSYGADTMDEIQSHVRDSYSQMQSQAGGNNTGSTPLRKAQSSAPKVRKSVSSRIHEAVKAIVLCHNVTPVYESRAGVTEETEFAEADQDFSDENRTYQASSPDEVALVQWTESVGLTLVSRDLTSMQLKTPSGQVLSFCILQLFPFTSESKRMGVIVRDESTAEITFYMKGADVAMSPIVQYNDWLEEECGNMAREGLRTLVVAKKALTEEQYQDFESRYTQAKLSMHDRSLKVAAVVESLEREMELLCLTGVEDQLQADVRPTLEMLRNAGIKIWMLTGDKLETATCIAKSSHLVSRTQDIHIFRQVTSRGEAHLELNAFRRKHDCALVISGDSLEVCLKYYEHEFVELACQCPAVVCCRCSPTQKARIVTLLQQHTGRRTCAIGDGGNDVSMIQAADCGIGIEGKEGKQASLAADFSITQFRHIGRLLMVHGRNSYKRSAALGQFVMHRGLIISTMQAVFSSVFYFASVPLYQGFLMVGYATIYTMFPVFSLVLDQDVKPEMAMLYPELYKDLTKGRSLSFKTFLIWVLISIYQGGILMYGALVLFESEFVHVVAISFTALILTELLMVALTVRTWHWLMVVAEFLSLGCYVSSLAFLNEYFGIGRVSFGAFLDVAFITTVTFLWKVSAITVVSCLPLYVLKYLRRKLSPPSYCKLAS

SEQ ID NO: 14413 - protein, 811 aa, Homo sapiens
MESGHLLWALLFMQSLWPQLTDGATRVYYLGIRDVQWNYAPKGRNVITNQPLDSDIVASSFLKSDKNRIGGTYKKTIYKEYKDDSYTDEVAQPAWLGFLGPVLQAEVGDVILIHLKNFATRPYTIHPHGVFYEKDSEGSLYPDGSSGPLKADDSVPPGGSHIYNWTIPEGHAPTDADPACLTWIYHSHVDAPRDIATGLIGPLITCKRGALDGNSPPQRQDVDHDFFLLFSVVDENLSWHLNENIATYCSDPASVDKEDETFQESNRMHAINGFVFGNLPELNMCAQKRVAWHLFGMGNEIDVHTAFFHGQMLTTRGHHTDVANIFPATFVTAEMVPWEPGTWLISCQVNSHFRDGMQALYKVKSCSMAPPVDLLTGKVRQYFIEAHEIQWDYGPMGHDGSTGKNLREPGSISDKFFQKSSSRIGGTYWKVRYEAFQDETFQEKMHLEEDRHLGILGPVIRAEVGDTIQVVFYNRASQPFSMQPHGVFYEKDYEGTVYNDDPIRDTNSGLVGPLLVCRAGALGADGKQKGVDKEFFLLFTVLDENKSWYSNANQAAAMLDFRLLSEDIEGFQDSNRMHAINGFLFSNLPRLDMCKGDTVAWHLLGLGTETDVHGVMFQGNTVQLQGMRKGAAMLFPHTFVMAIMQPDNLGTFEIYCQAGSHREAGMRAIYNVSQCPGHQATPRQRYQAARIYYIMAEEVEWDYCPDRSWEREWHNQSEKDSYGYIFLSNKDGLLGSRYKKAVFREYTDGTFRIPRPRTGPEEHLGILGPLIKGEVGDILTVVFKNNASRPYSVHAHGVLESTTVWPLAAEP

SEQ ID NO: 14414 - protein, 549 aa, Homo sapiens
MVCRPVFPCRRRFCPRPFLVGLVVAICLFYQTLTLRGSRKLTAAAPGAVPHTSTETQASRCKKGFSQDKQCFLLSGNAQETRKVKESMETHFGSHGRRAILYRPPFYSKTELQLHQHILTQHGYTVVIAEERLNAGLGPGLLEQGDLGSWDLLICLSSKKAEGTPCISKEVMCQLGLHQKANRLPEIQQPLCRKEGLCQIVRRFPELQLPVSPSVCLDQGMQLKPSTSSHLLKTVKPRVWKPGDWSREQLNETTVLAPHETIFRAEDLSVILKAYVLVTSLTPLRAFIHSTGTVWNPPKKKRFTVKLQTFFETFLRASSPQQAFDIMKEAIGKLLLAAEVFSETSTLGPKTFHRCRFCFQLLTFDIGYGSFMYPVVLQVHEHLNFQDYDNMDFEDQNTEEFLLNDTFNFLFPNESSLSIFSEIFQRLYRSDVFKGENYQKELNQCLSLEEINSIMTFIKELGSLGQFQLLFPSTTPGIQSLMHEFYDVANPVGNPGSVLTQYWSLLNVFEQFQFMNKKTQPHPLEWNSFTEDKNIEKPQVPFDAIENKK

SEQ ID NO: 14415 - protein, 856 aa, Homo sapiens
HKLLSTGPTEPWSIREKLCLASSVMRSGDQNWVSVSRAIKPFAEPGRPPDWFSQKHCASQYSELLETTETPKRKRGEKGEVVETVEDVIVRKLTAERVEELKKVIKETQERYRRLKRDAELIQAGHMDSRLDELCNDIATKKKLEEEEAEVKRKATDAAYQAVKTPPRRLPTVMVRSPIDSASPGGDYPLGDLTPTTMEEATSGVTPGTLPSTPVTSFPGIPDTLPPGSAPLEAPMTPVTDDSPQKKMLGQKATPPPSPLLSELLKKGSLLPTSPRLVNESEMAVASGHLNSTGVLLEVGGVLPMIHGGEIQQTPNTVAASPAASVSQPDNCVPMEAVGDPHTVTVSMDSSEISMIINSIKEECFRSGVAEAPVGSKAPSIDGKEELDLAEKMDIAVSYTGEELDFETVGDIIAIIEDKVDDHPEVLDVAAVEAALSFCEENDDPQSLPGPWEHPIQQERDKPVPLPAPEMTVKQERLDFEETENKGIHELVDIREPSAEIKVEPAEPEPVISGAEIVAGVVPATSMEPPELRSQDLDEELGSTAAGEIVEADVAIGKGDETPLTNVKTEASPESMLSPSHGSNPIEDPLEAETQHKFEMSDSLKEESGTIFGSQIKDAPGEDEEEDGVSEAASLEEPKEEDQGEGYLSEMDNEPPVSESDDGFSIHNATLQSHTLADSIPSSPASSQFSVCSEDQEAIQAQKIWKKAIMLVWRAAANHRYANVFLQPVTDDIAPGYHSIVQRPMDLSTIKKNIENGLIRSTAEFQRDIMLMFQNAVMYNSSDHDVYHMAVEMQRDVLEQIQQFLATQLIMQTSESGISAKSLRGRDSTRKQDASEKDGGTRGRRCAIEADMKMKK

SEQ ID NO: 14416 - protein, 412 aa, Homo sapiens
MSRRKQTNPNKVHWDQVFAGLEEQARQAMMKTDFPGDLGSQRQAIQQLRDQDSSSSDSEGDEEETTQDEVSSHTSEEDGGVVKVEKELENTEQPVGGNEVVEHEVTGNLNSDPLLELCQCPLCQLDCGSREQLIAHVYQHTAAVVSAKSYMCPVCGRALSSPGSLGRHLLIHSEDQRSNCAVCGARFTSHATFNSEKLPEVLNMESLPTVHNEGPSSAEGKDIAFSPPVYPAGILLVCNNCAAYRKLLEAQTPSVRKWALRRQNEPLEVRLQRLERERTAKKSRRDNETPEEREVRRMRDREAKRLQRMQETDEQRARRLQRDREAMRLKRANETPEKRQARLIREREAKRLKRRLEKMDMMLRAQFGQDPSAMAALAAEMNFFQLPVSGVELDSQLLGKMAFEEQNSSSLH

SEQ ID NO: 14417 - protein, 643 aa, Homo sapiens
MNEENMTELLSSGLKNDYNKETFTLKHKIDEQMFPCRFIKIVPLLSWGPSFNFSIWYVELSGIDDPDIVQPCLNWYSKYREQEAIRLCLKHFRQHNYTEAFESLQKKTKIALEHPMLTDIHDKLVLKGDFDACEELIEKAVNDGLFNQYISQQEYKPRWSQIIPKSTKGDGEDNRPGMRGGHQMVIDVQTETVYLFGGWDGTQDLADFWAYSVKENQWTCISRDTEKENGPSARSCHKMCIDIQRRQIYTLGRYLDSSVRNSKSLKSDFYRYDIDTNTWMLLSEDTAADGGPKLVFDHQMCMDSEKHMIYTFGGRILTCNGSVDDSRASEPQFSGLFAFNCQCQTWKLLREDSCNAGPEDIQSRIGHCMLFHSKNRCLYVFGGQRSKTYLNDFFSYDVDSDHVDIISDGTKKDSGMVPMTGFTQRATIDPELNEIHVLSGLSKDKEKREENVRNSFWIYDIVRNSWSCVYKNDQAAKDNPTKSLQEEEPCPRFAHQLVYDELHKVHYLFGGNPGKSCSPKMRLDDFWSLKLCRPSKDYLLRHCKYLIRKHRFEEKAQVDPLSALKYLQNDLYITVDHSDPEETKEFQLLASALFKSGSDFTALGFSDVDHTYAQRTQLFDTLVNFFPDSMTPPKGNLVDLITL

SEQ ID NO: 14418 - protein, 693 aa, Homo sapiens
MIAPLLCILSYNFNTFAILNVYSKLTMFCTTNSLPMDLLLKQGSLKQEVESFCYQIVSESNDQKVGILQSEDKQLQPSVSKKSEGELSRVKFISNSNKITFSKKPKRRKYDESYLSFGFTYFGNRDAPHAQCVLCKKILSNSSLAPSKLRRHLETKHAAYKDKDISFFKQHLDSPENNKPPTPKIVNTDNESATEASYNVSYHIALSGEAHTIGELLIKPCAKDVVMRMFDEQYSKKIDAVQLSNSTVARRIKDLAADIEEELVCRLKICDGFSLQLDESADVSGLAVLLVFVRYRFNKSIEEDLLLCESLQSNATGEEIFNCINSFMQKHEIEWEKCVDVCSDASRAVDGKIAEAVTLIKYVAPESTSSHCLLYRHALAVKIMPTSLKNVLDQAVQIINYIKARPHQSRLLKILCEEMGAQHTALLLNTEVRWLSRGKVLVRLFELRRELLVFMDSAFRLSDCLTNSSWLLRLAYLADIFTKLNEVNLSMQGKNVTVFTVFDKMSSLLRKLEFWASSVEEENFDCFPTLSDFLTEINSTVDKDICSAIVQHLRGLRATLLKYFPVTNDNNAWVRNPFTVTVKPASLVARDYESLIDLTSDSQVKQNFSELSLNDFWSSLIQEYPSIARRAVRVLLPFATMHLCETGFSYYAATKTKYRKRLDAAPHMRIRLSNITPNIKRICDKKTQKHCSH

SEQ ID NO: 14419 - protein, 278 aa, Homo sapiens
MQRGLFSDGDTSKKKKNVTMRSIKTTRDRVPTYQYNMNFEKLGKCIIINNKNFDKVTGMGVRNGTDKDAEALFKCFRSLGFDVIVYNDCSCAKMQDLLKKASEEDHTNAACFACILLSHGEENVIYGKDGVTPIKDLTAHFRGDRCKTLLEKPKLFFIQACRGTELDDGIQADSGPINDTDANPRYKIPVEADFLFAYSTVPGYYSWRSPGRGSWFVQALCSILEEHGKDLEIMQILTRVNDRVARHFESQSDDPHFHEKKQIPCVVSMLTKELYFSQ

SEQ ID NO: 14420 - protein, 575 aa, Homo sapiens
MPRRRVPGANCKPTGKMSEETVPEAASPPPPQGQPYFDRFSEDDPEYMRLRNRAADLRQDFNLMEQKKRVTMILQSPSFREELEGLIQEQMKKGNNSSNIWALRQIADFMASTSHAVFPTSSMNVSMMTPINDLHTADSLNLAKGERLMRCKISSVYRLLDLYGWAQLSDTYVTLRVSKEQDHFLISPKGVSCSEVTASSLIKVNILGEVVEKGSSCFPVDTTGFCLHSAIYAARPDVRCIIHLHTPATAAVSAMKWGLLPVSHNALLVGDMAYYDFNGEMEQEADRINLQKCLGPTCKILVLRNHGVVALGDTVEEAFYKIFHLQAACEIQVSALSSAGGVENLILLEQEKHRPHEVGSVQWAGSTFGPMQKSRLGEHEFEALMRMLDNLGYRTGYTYRHPFVQEKTKHKSEVEIPATVTAFVFEEDGAPVPALRQHAQKQQKEKTRWLNTPNTYLRVNVADEVQRSMGSPRPKTTWMKADEVEKSSSGMPIRIENPNQFVPLYTDPQEVLEMRNKIREQNRQDVKSAGPQSQLLASVIAEKSRSPVEQRLPLTGGETCLPSGSSVPGAGLQDP

SEQ ID NO: 14421 - protein, 295 aa, Homo sapiens
MKQYGLGPNGGIVTSLNLFATRFDQVMKFIEKAQNMSKYVLIDTPGQIEVFTWSASGTIITEALASSFPTVVIYVMDTSRSTNPVTFMSNMLYACSILYKTKLPFIVVMNKTDIIDHSFAVEWMQDFEAFQDALNQETTYVSNLTRSMSLVLDEFYSSLRVVGVSAVLGTGLDELFVQVTSAAEEYEREYRPEYERLKKSLANAESQQQREQLERLRKDMGSVALDAGTAKDSLSPVLHPSDLILTRGTLDEEDEEADSDTDDIDHRVTEESHEEPAFQNFMQESMAQYWKRNNK

SEQ ID NO: 14422 - protein, 196 aa, Homo sapiens
MIIVAHVLLILLGATEILQADLLPDEKISLLPPVNFTIKVTGLAQVLLQWKPNPDQEQRNVNLEYQVKINAPKEDDYETRITESKCVTILHKGFSASVRTILQNDHSLLASSWASAELHAPPGSPGTSIVNLTCTTNTTEDNYSRLRSYQVSLHCTWLVGTDAPEDTQYFLYYRYGSWTEECQEYSKDTLGRNIAC

SEQ ID NO: 14423 - protein, 625 aa, Homo sapiens
MSDKSDLKAELERKKQRLAQIREEKKRKEEERKKKEADMQQKKEPVQDDSDLDRKRRETEALLQSIGISPEPPLVQPLHFLTWDTCYFHYLVPTPMSPSSKSVSTPSEAGSQDSGDLGPLTRRRLHKLGVSKVTQVDFLPREVVSYSKETQTPLATHQSEEDEEDEEMVESKVGQDSELENQDKKQEVKEAPPRELTEEEKQQILHSEEFLIFFDRTIRVIERALAEDSDIFFDYSGRELEEKDGDVQAGANLSFNRQFYDEHWSKHRVVTCMDWSLQYPELMVASYNNNEDAPHEPDGVALVWNMKFKKTTPEYVFHCQSSVMSVCFARFHPNLVVGGTYSGQIVLWDNRSHRRTPVQRTPLSAAAHTHPVYCVNVVGTQNAHNLITVSTDGKMCSWSLDMLSTPQESMELVYNKSKPVAVTGMAFPTGDVNNFVVGSEEGTVYTACRHGSKAGIGEVFEGHQGPVTGINCHMAVGPIDFSHLFVTSSFDWTVKLWTTKHNKPLYSFEDNADYVYDVMWSPVHPALFACVDGMGRLDLWNLNNDTEVPTASVAIEGASALNRVRWAQAGKEVAVGDSEGRIWVYDVGELAVPHNDEWTRFARTLVEIRANRADSEEEGTVELSA

SEQ ID NO: 14424 - protein, 292 aa, Homo sapiens
MAALLQIEAGPPESAESTNILKLCPREEFLRLCKKNHDEIYPIKKREDRRRLALIICNTKFDHLPARNGAHYDIVGMKRLLQGLGYTVVDEKNLTARDMESVLRAFAARPEHKSSDSTFLVLMSHGILEGICGTAHKKKKPDVLLYDTIFQIFNNRNCLSLKDKPKVIIVQACRGEKHGELWVRDSPASLALISSQSSENLEADSVCKIHEEKDFIAFCSSTPHNVSWRDRTRGSIFITELITCFQKYSCCCHLMEIFRKVQKSFEVPQAKAQMPTIERATLTRDFYLFPGN

SEQ ID NO: 14425 - protein, 158 aa, Homo sapiens
AVKGEVLKVGNKSCENIHLHSEAVLCTVPNDLLKLNSELNIEWKQAISSTVLGKVIVQPDQNFTGLIAGVVSISTALLLLLGFFLWLKKRKQIKDQFPNSSQNGSCRQVQYPLTDMSPILTSGDSDISSPLLQNTVHIDLSALNPELVQAVQHVVIGP

SEQ ID NO: 14426 - protein, 757 aa, Homo sapiens
MNQPPQIAPKRERKTIRIRDPNQGGKDITEEIMSGARTASTPTPPQTGGGLEPQANGETPQVAVIVRPDDRSQGAIIADRPGLPGPEHSPSESQPSSPSPTPSPSPVLEPGSEPNLAVLSIPGDTMTTIQMSVEESTPISRETGEPYRLSPEPTPLAEPILEVEVTLSKPVPESEFSSSPLQAPTPLASHTVEIHEPNGMVPSEDLEPEVESSPELAPPPACPSESPVPIAPTAQPEELLNGAPSPPAVDLSPVSEPEEQAKEVTASMAPPTIPSATPATAPSATSPAQEEEMEEEEEEEEGEAGEAGEAESEKGGEELLPPESTPIPANLSQNLEAAAATQVAVSVPKRRRKIKELNKKEAVGDLLDAFKEANPAVPEVENQPPAGSNPGPESEGSGVPPRPEEADETWDSKEDKIHNAENIQPGEQKYEYKSDQWKPLNLEEKKRYDREFLLGFQFIFASMQKPEGLPHISDVVLDKANKTPLRPLDPTRLQGINCGPDFTPSFANLGRTTLSTRGPPRGGPGGELPRGPAGLGPRRSQQGPRKEPRKIIATVLMTEDIKLNKAEKAWKPSSKRTAADKDRGEEDADGSKTQDLFRRVRSILNKLTPQMFQQLMKQVTQLAIDTEERLKGVIDLIFEKAISEPNFSVAYANMCRCLMALKVPTTEKPTVTVNFRKLLLNRCQKEFEKDKDDDEVFEKKQKEMDEAATAEERGRLKEELEEARDIARRRSLGNIKFIGELFKLKMLTEAIMHDCVV

SEQ ID NO: 14427 - protein, 163 aa, Homo sapiens
MNLVDLWLTRSLSMCLLLQSFVLMILCFHSASMCPKGCLCSSSGGLNVTCSNANLKEIPRDLPPETVLLYLDSNQITSIPNEIFKDLHQLRVLNLSKNGIEFIDEHAFKGVAETLQTLDLSDNRIQSVHKNAFNNLKARARIANNPWHCDCTLQQVLRSMASN

SEQ ID NO: 14428 - protein, 228 aa, Homo sapiens
TEEEEKIKSQGQDVTSSVYFMKQTISNACGTIGLIHAIANNKDKMHFESGSTLKKFLEESVSMSPEERARYLENYDAIRVTHETSAHEGQTESSSPSSSQPHSSHCRTKASSLCHHASLPWVKRNHVGPAKATSPSLRLRRWRPFLRLPSLGLHSVAPSIDEKVDLHFIALVHVDGHLYELDGRKPFPINHGETSDETLLEDAIEVCKKFMERDPDELRFNAIALSAA

SEQ ID NO: 14429 - protein, 178 aa, Homo sapiens
MSEVSCKKRDDYLEWPEYFMAVAFLSAQRSKDPNSQVGACIVNSENKIVGIGYNGMPNGCSDDVLPWRRTAENKLDTKYPYVCHAELNAIMNKNSTDVKGCSMYVALFPCNECAKLIIQAGIKEVIFMSDKYHDSDEATAARLLFNMAGVTFRKFIPKCSKIVIDFDSINSRPSQKLQ

SEQ ID NO: 14430 - protein, 186 aa, Homo sapiens
GHHTFLTEEVAREYQVKLQAALEMLRQKQQEAEELEADIREEKASWKTQIQYDKTNVLADFEQLRDILDWEESNELQNLEKEEEDILKSLTNSETEMVQQTQSLRELISDLEHRLQGSVMELLQGVDGVIKRADRCPTLLGLECNGTISVHCNLHLSDSSNSPASASQVAGITGAHHHPWLNLYFQ

SEQ ID NO: 14431 - protein, 840 aa, Homo sapiens
MAQQGQQGQMASGDSNLNFRMVAEIQNVEGQNLQEQVCPEPIFRFFRENKVEIASAITRPFPFLMGLRDRSFISEQMYEHFQEAFRNLVPVTRVMYCVLSELEKTFGWSHLEALFSRINLMAYPDLNEIYRSFQNVCYEHSPLQMNNVNDLEDRPRLLPYGKQENSNACHEMDDIAVPQEALSSSPRCEPGFSSESCEQLALPKAGGGDAEDAPSLLPGGGVSCKLAIQIDEGESEEMPKLLPYDTEVLESNGMIDAARTYSTAPGEKQGEEEGRNSPRKRNQDKEKYQESPEGRDKETFDLKTPQVTNEGEPEKGLCLLPGEGEEGSDDCSEMCDGEEPQEASSSLARCGSVSCLSAETFDLKTPQVTNEGEPEKELSLLPGEGEVSSELENHPMNEEGESEELASSLLYDNVPGAEQSAYENEKCSCVMCFSEEVPGSPEARTESDQACGTMDTVDIANNSTLGKPKRKRRKKRGHGWSRMRMRRQENSQQNDNSKADGQVVSSEKKANVNLKDLSKIRGRKRGKPGTRFTQSDRAAQKRVRSRASRKHKDETVDFKAPLLPVTCGGVKGILHKKKLQQGILVKCIQTEDGKWFTPTEFEIKGGHARSKNWRLSVRCGGWPLRWLMENGFLPDPPRIRYRKKKRILKSQNNSSVDPCMRNLDECEVCRDGGELFCCDTCSRVFHEDCHIPPVEAERTPWNCIFCRMKESPGSQQCCQESEVLERQMCPEEQLKCEFLLLKVYCCSESSFFAKIPYYYYIREACQGLKEPMWLDKIKKRLNEHGYPQVEGFVQDMRLIFQNHRASYKYKDFGQMGFRLEAEFEKNFKEVFAIQETNGNN

SEQ ID NO: 14432 - protein, 1320 aa, Homo sapiens
MSSNDSSLMAGIIYYSQEKYFHHVQQAAAVGLEKFSNDPVLKFFKAYGVLKEEHIQDAISDLESIRHHPDVSLCSTMALIYAHKRCEIIDREAIQELEYSLKEIRKTVSGTALYYAGLFLWLIGRHDKAKEYIDRMLKISRGFREAYVLRGWVDLTSDKPHTAKKAIEYLEQGIQDTKDVLGLMGKAMYFMMQQNYSEALEVVNQITVTSGSFLPALVLKMQLFLARQDWEQTVEMGHRILEKDESNIDACQILTVHELAREGNMTTVSSLKTQKATNHVRNLIKALETREPENPSLHLKKIIVVSRLCGSHQVILGLVCSFIERTFMATPSYVHVATELGYLFILKNQVKEALLWYSEAMKLDKDGMAGLTGIILCHILEGHLEEAEYRLEFLKEVQKSLGKSEVLIFLQALLMSRKHKGEEETTALLKEAVELHFSSMQGIPLGSEYFEKLDPYFLVCIAKEYLLFCPKQPRLPGQIVSPLLKQVAVILNPVVKAAPALIDPLYLMAQVRYYSELENAQSILQRCLELDPASVDAHLLMCQIYLAQGNFGMCFHCLELGVSHNFQVRDHPLYHLIKARALNKAGDYPEAIKTLKMVIKLPALKKEEGRKFLRPSVQPSQRASILLELVEALRLNGELHEATKVMQDTINEFGGTPEENRITIANVDLVLSKGNVDVALNMLRNILPKQSCYMEAREKMANIYLQTLRDRRLYIRCYRELCEHLPGPHTSLLLGDALMSILEPEKALEVYDEAYRQNPHDASLASRIGHAYVKAHQYTEAIEYYEAAQKINGQDFLCCDLGKLLLKLKKVNKAEKVLKQALEHDIVQDIPSMMNDVKCLLLLAKVYKSHKKEAVIETLNKALDLQSRILKRVPLEQPEMIPSQKQLAASICIQFAEHYLAEKEYDKAVQSYKDVFSYLPTDNKVMLELAQLYLLQGHLDLCEQHCAILLQTEQNHETASVLMADLMFRKQKHEAAINLYHQVLEKAPDNFLVLHKLIDLLRRSGKLEDIPAFFELAKKVSSRVPLEPGFNYCRGIYCWHIGQPNEALKFLNKARKDSTWGQSAIYHMVQICLNPDNEVVGGEAFENQGAESNYMEKKELEQQGVSTAEKLLREFYPHSDSSQTQLRLLQGLCRLATREKANMEAALGSFIQIAQAEKDSVPALLALAQAYVFLKQIPKARMQLKRLAKTPWVLSEAEDLEKSWLLLADIYCQGSKFDLALELLRRCVQYNKSCYKAYEYMGFIMEKEQSYKDAVTNYKLAWKYSHHANPAIGFKLAFNYLKDKKFVEAIEICNDVLREHPDYPKIREEILEKARRSLRP

SEQ ID NO: 14433 - protein, 615 aa, Homo sapiens
RAPTLPDTLQGSLLWAAGQRQQGQCLLLWQARAQQFQGTARWYQHTRQRRIFLSWSRWATAQWAWRELASHRAWDRTCRAVLGLWRQRLLQSRLVEWWAQERGWRLARDALCHWHSCWQGQQFLHEKCQTWVQVHLQGLQKVVFRSWQQAAAHQRCTVTRPEQLLLQSYFQAWCEVVRDTGVLRAQHQAFQDGLRRRALGAVFATWREAQEVAAGAQEQRVAQASLARWRSCGQQGQEDGQQKKARAPQAFPAWPVAPGMHHEAQQQAGESAGAQAAQCWTWCWALWVHESCRGQVSRAHASWKPRAWVLEASVQSAVRGGVQRAILTQLRPAELRRFLRTVQLRVRLGLPGAGKTRSCWTQATELVPPAPSLQCSLGGRRKPRGTAWAQRCREHSLCPAFQLWPQWPGQSSWVPGLPLWTRDQGPRAHSSPEPRACKAQSKAHKRRLRARSCRILEKQAQAHGSALLLALKGHDALGHQEEVPAAPVPRGTASRAAGFPAGQVPGSGMAALGGCPRGRAAGADPAQGVAPEMGLADVVAADPATASGSAVTAAGRWAFKKWHQRLAARSPRRGAASSPRPWSKPGPKGPESGQEAARAPRGWGLGAEHGAQLQL

SEQ ID NO: 14434 - protein, 843 aa, Homo sapiens
MDKENSDVSAAPADLKISNISVQVVSAQKKLPVRRPPLPGRRLPLPGRRPPQRPIGKAKPKKQSKKKVPFWNVQNKIILFTVFLFILAVIAWTLLWLYISKTESKDAFYFAGMFRITNIEFLPEYRQKESREFLSVSRTVQQVINLVYTTSAFSKFYEQSVVADVSSNNKGGLLVHFWIVFVMPRAKGHIFCEDCVAAILKDSIQTSIINRTSVGSLQGLAVDMDSVVLNAGLRSDYSSTIGSDKGCSQYFYAEHLSLHYPLEISAASGRLMCHFKLVAIVGYLIRLSIKSIQIEADNCVTDSLTIYDSLLPIRSSILYRICEPTRTLMSFVSTNNLMLVTFKSPHIRRLSGIRAYFEVIPEQKCENTVLVKDITGFEGKISSPYYPSYYPPKCKCTWKFQTSLSTLGIALKFYNYSITKKSMKGCEHGWWEINEHMYCGSYMDHQTIFRVPSPLVHIQLQCSSRLSDKPLLAEYGSYNISQPCPVGSFRCSSGLCVPQAQRCDGVNDCFDESDELFCVSPQPACNTSSFRQHGPLICDGFRDCENGRDEQNCTQSIPCNNRTFKCGNDICFRKQNAKCDGTVDCPDGSDEEGCTCSRSSSALHRIIGGTDTLEGGWPWQVSLHFVGSAYCGASVISREWLLSAAHCFHGNRLSDPTPWTAHLGMYVQGNAKFVSPVRRIVVHEYYNSQTFDYDIALLQLSIAWPETLKQLIQPICIPPTGQRVRSGEKCWVTGWGRRHEADNKGSLVLQQAEVELIDQTLCVSTYGIITSRMLCAGIMSGKRDACKGDSGGPLSCRRKSDGKWILTGIVSWGHGSGRPNFPGVYTRVSNFVPWIHKYVPSLL

SEQ ID NO: 14435 - protein, 2015 aa, Homo sapiens [sequence omitted]

SEQ ID NO: 14436 - protein, 763 aa, Homo sapiens [sequence omitted]

SEQ ID NO: 14437 - protein, 510 aa, Homo sapiens
MRQLLRPIDRQRYDENEDLSDVEEIVSVRGFSLEEKLRSQLYQGDFVHAMEGKDFNYEYVQREALRVPLIFREKDGLGIKMPDPDFTVRDVKLLVGSRRLVDVMDVNTQKGTEMSMSQFVRYYETPEAQRDKLYNVISLEFSHTKLEHLVKRPTVVDLVDWVDNMWPQHLKEKQTEATNAIAEMKYPKVKKYCLMSVKGCFTDFHIDFGGTSVWYHVFRGGKIFWLIPPTLHNLALYEEWVLSGKQSDIFLGDRVERCQRIELKQGYTFFIPSGWIHAVYTPVDSLVFGGNILHSFNVPMQLRIYEIEDRTRVQPKFRYPFYYEMCWYVLERYVYCVTQRSHLTQEYQRESMLIDAPRKPSIDGFSSDSWLEMEEEACDQQPQEEEEKDEEGEGRDRAPKPPTDGSTSPTSTPSEDQEALGKKPKAPALRFLKRTLSNESEESVKSTTLAVDYPKTPTGSPATEVSAKWTHLTEFELKGLKALVEKLESLPENKKCVPEGIEDPQALLEG

SEQ ID NO: 14438 - protein, 163 aa, Homo sapiens
KKHQVETAFERLQQELEQQRCLLLARLRELEQQIWKERDEYITKVSEEVTRLGAQVKELEEKCQQPASELLQDVRVNQSRCEMKTFVSPEAISPDLVKKIRDFHRKILTLPEMMRMFSENLAHHLEIDSDRQPEPGSLGRQEVSEVHPAEEEPARQPPALRRP

SEQ ID NO: 14439 - protein, 265 aa, Homo sapiens
MDGPAIITQVTNPKEDEGRLPGAGEKASQCNVSLKKQRSRSILSSFFCCFRDYNVEAPPPSSPSVLPPLVEENGGLQKPPAKYLLPEVTVLDYGKKCVVIDLDETLVHSSFKPISNADFIVPVEIDGTIHQVYVLKRPHVDEFLQRMGQLFECVLFTASLAKYADPVADLLDRWGVFRARLFRESCVFHRGNYVKDLSRLGRELSKVIIVDNSPASYIFHPENAVPVQSWFDDMTDTELLDLIPFFEGLSREDDVYSMLHRLCNR

SEQ ID NO: 14440 - protein, 104 aa, Homo sapiens
NNFITDIHPLQSCIKLIKLDLHGNQGTTYEEEINNIKHITSKINAILAHNSPVLIVQRWIRGFLVRKNLRLLQSSEFKDCLKMCPRKREKKNIFFLIFKLIEKY

SEQ ID NO: 14441 - protein, 2101 aa, Homo sapiens
MLRVFILYAENVHTPDTDISDAYCSAVFAGVKKRTKVIKNSVNPVWNEGFEWDLKGIPLDQGSELHVVVKDHETMGRNRFLGEAKVPLREVLATPSLSASFNAPLLDTKKQPTGASLVLQVSYTPLPGAVPLFPPPTPLEPSPTLPDLDVVADTGGEEDTEDQGLTGDEAEPFLDQSGGPGAPTTPRKLPSRPPPHYPGIKRKRSAPTSRKLLSDKPQDFQIRVQVIEGRQLPGVNIKPVVKVTAAGQTKRTRIHKGNSPLFNETLFFNLFDSPGELFDEPIFITVVDSRSLRTDALLGEFRMDVGTIYREPRHAYLRKWLLLSDPDDFSAGARGYLKTSLCVLGPGDEAPLERKDPSEDKEDIESNLLRPTGVALRGAHFCLKVFRAEDLPQMDDAVMDNVKQIFGFESNKKNLVDPFVEVSFAGKMLCSKILEKTANPQWNQNITLPAMFPSMCEKMRIRIIDWDRLTHNDIVATTYLSMSKISAPGGEIEEEPAGAVKPSKASDLDDYLGFLPTFGPCYINLYGSPREFTGFPDPYTELNTGKGEGVAYRGRLLLSLETKLVEHSEQKVEDLPADDILRVEKYLRRRKYSLFAAFYSATMLQDVDDAIQFEVSIGNYGNKFDMTCLPLASTTQYSRAVFDGCHYYYLPWGNVKPVVVLSSYWEDISHRIETQNQLLGIADRLEAGLEQVHLALKAQCSTEDVDSLVAQLTDELIAGCSQPLGDIHETPSATHLDQYLYQLRTHHLSQITEAALALKLGHSELPAALEQAEDWLLRLRALAEEPQNSLPDIVIWMLQGDKRVAYQRVPAHQVLFSRRGANYCGKNCGKLQTIFLKYPMEKVPGARMPVQIRVKLWFGLSVDEKEFNQFAEGKLSVFAETYENETKLALVGNWGTTGLTYPKFSDVTGKIKLPKDSFRPSAGWTWAGDWFVCPEKTLLHDMDAGHLSFVEEVFENQTRLPGGQWIYMSDNYTDVNGEKVLPKDDIECPLGWKWEDEEWSTDLNRAVDEQGWEYSITIPPERKPKHWVPAEKMYYTHRRRRWVRLRRRDLSQMEALKRHRQAEAEGEGWEYASLFGWKFHLEYRKTDAFRRRRWRRRMEPLEKTGPAAVFALEGALGGVMDDKSEDSMSVSTLSFGVNRPTISCIFDYGNRYHLRCYMYQARDLAAMDKDSFSDPYAIVSFLHQSQKTVVVKNTLNPTWDQTLIFYEIEIFGEPATVAEQPPSIVVELYDHDTYGADEFMGRCICQPSLERMPRLAWFPLTRGSQPSGELLASFELIQREKPAIHHIPGFEVQETSRILDESEDTDLPYPPPQREANIYMVPQNIKPALQRTAIEILAWGLRNMKSYQLANISSPSLVVECGGQTVQSCVIRNLRKNPNFDICTLFMEVMLPREELYCPPITVKVIDNRQFGRRPVVGQCTIRSLESFLCDPYSAESPSPQGGPDDVSLLSPGEDVLIDIDDKEPLIPIQLADGLSSLAPTNTASPPSSPHEEEFIDWWSKFFASIGEREKCGSYLEKDFDTLKVYDTQLENVEAFEGLSDFCNTFKLYRGKTQEETEDPSVIGEFKGLFKIYPLPEDPAIPMPPRQFHQLAAQGPQECLVRIYIVRAFGLQPKDPNGKCDPYIKISIGKKSVSDQDNYIPCTLEPVFGKMFELTCTLPLEKDLKITLYDYDLLSKDEKIGETVVDLENRLLSKFGARCGLPQTYCVSGPNQWRDQLRPSQLLHLFCQQHRVKAPVYRTDRVMFQDKEYSIEEIEAGRIPNPHLGPVEERLALHVLQQQGLVPEHVESRPLYSPLQPDIEQGKLQMWVDLFPKALGRPGPPFNITPRRARRFFLRCIIWNTRDVILDDLSLTGEKMSDIYVKGWMIGFEEHKQKTDVHYRSLGGEGNFNWRFIFPFDYLPAEQVCTIAKKDAFWRLDKTESKIPARVVFQIWDNDKFSFDDFLGSLQLDLNRMPKPAKTAKKCSLDQLDDAFHPEWFVSLFEQKTVKGWWPCVAEEGEKKILAGKLEMTLEIVAESEHEERPAGQGRDEPNMNPKLEDPRRPDTSFLWFTSPYKTMKFILWRRFRWAIILFIILFILLLFLAIFIYAFPNYAAMKLVKPFS

SEQ ID NO: 14442 - protein, 684 aa, Homo sapiens
MQDDLLMDKSKTQPQPQQQQRQQQQPQPESSVSEAPSTPLSSETPKPEENSAVPALSPAAAPPAPNGPDKMQMESPLLPGLSFHQPPQQPPPPQEPAAPGASLSPSFGSTWSTGTTNAVEDSFFQGITPVNGTMLFQNFPHHVNPVFGGTFSPQIGLAQTQHHQQPPPPAPAPQPAQPAQPPQAQPPQQRRSPASPSQAPYAQRSAAAAYGHQPIMTSKPSSSSAVAAAAAAAAASSASSSWNTHQSVNAAWSAPSNPWGGLQAGRDPRRAVGVGVGVGVGVPSPLNPISPLKKPFSSNVIAPPKFPRAAPLTSKSWMEDNAFRTDNGNNLLPFQDRSRPYDTFNLHSLENSLMDMIRTDHEPLKGRMGINFHHPGTDNIMALNSRSSLFPFEDAFLDDSHGDQALSSGLSSPTRCQNGERVERYSRKVFVGGLPPDIDEDEITASFRRFGPLVVDWPHKAESKSYFPPKGYAFLLFQEESSVQALIDACLEEDGKLYLCVSSPTIKDKPVQIRPWNLSDSDFVMDGSQPLDPRKTIFVGGVPRPLRAVELAMIMDRLYGGVCYAGIDTDPELKYPKGAGRVAFSNQQSYIAAISARFVQLQHNDIDKRVEVKPYVLDDQMCDECQGTRCGGKFAPFFCANVTCLQYYCEYCWASIHSRAGREFHKPLVKEGGDRPRHVPFRWS

SEQ ID NO: 14443 - protein, 485 aa, Homo sapiens
MEGNQWVLGKKIGSGGFGLIYLAFPTNKPEKDARHVVKVEYQENGPLFSELKFYQRVAKKDCIKKWIERKQLDYLGIPLFYGSGLTEFKGRSYRFMVMERLGIDLQKISGQNGTFKKSTVLQLGIRMLDVLEYIHENEYVHGDIKAANLLLGYKNPDQVYLADYGLSYRYCPNGNHKQYQENPRKGHNGTIEFTSLDAHKGVALSRRSDVEILGYCMLRWLCGKLPWEQNLKDPVAVQTAKTNLLDELPQSVLKWAPSGSSCCEIAQFLVCAHSLAYDEKPNYQALKKILNPHGIPLGPLDFSTKGQSINVHTPNSQKVDSQKAATKQVNKAHNRLIEKKVHSERSAESCATWKVQKEEKLIGLMNNEAAQESTRRRQKYQESQEPLNEVNSFPQKISYTQFPNSFYEPHQDFTSPDIFKKSRSPSWYKYTSTVSTGITDLESSTGLWPTISQFTLSEETNADVYYYRIIIPVLLMLVFLALFFL

SEQ ID NO: 14444 - protein, 90 aa, Homo sapiens
DVKMAFDRDGEKADISANVYPDINIITGALKLYFRDLPIPVITYDTYSKFIDAAKISNADERLEAVHEVLMLLPPAHYETLRYLMIHLKK

SEQ ID NO: 14445 - protein, 183 aa, Homo sapiens
LASDEITTVRKNLESRGVEVDPSLIKDTWHQVYRRHFLKTALNHCNLCRRGFYYYQRHFVDSELECNDVVLFWRIQRMLAITANTLRQQLTNTEVRRLEKNVKEVLEDFAEDGEKKIKLLTGKRVQLAEDLKKLQGTGLSTVAHACNPSTLGGQDGWKTRNVLFPQLGLNTTHQATTWRRTQH

SEQ ID NO: 14446 - protein, 224 aa, Homo sapiens
MAKRSRGPGRRCLLALVLFCAWGTLAVVAQKPGAGCPSRCLCFRTTVRCMHLLLEAVPAVAPQTSILDLRFNRIREIQPGAFRRLRNLNTLLLNNNQIKRIPSGAFEDLENLKYLYLHFNQIETLDPDSFQHLPKLERLFLHNNRITHLVPGTFNHLESMKRLRLDSNTLHCDCEILWLADLLKTYAESGNAQAAAICEYPRRIQGRSVATITPEELNCERPRI

SEQ ID NO: 14447 - protein, 408 aa, Homo sapiens
MSGGSADYNSREHGGPEGMDPDGVIESNWNEIVDNFDDMNLKESLLRGIYAYGFEKPSAIQQRAIIPCIKGYDVIAQAQSGTGKTATFAISILQQLEIEFKETQALVLAPTRELAQQIQKVILALGDYMGATCHACIGGTNVRNEMQKLQAEAPHIVVGTPGRVFDMLNRRYLSPKWIKMFVLDEADEMLSRGFKDQIYEIFQKLNTSIQVVLLSATMPTDVLEVTKKFMRDPIRILVKKEELTLEGIKQFYINVEREEWKLDTLCDLYETLTITQAVIFLNTRRKVDWLTEKMHARDFTVSALHGDMDQKERDVIMREFRSGSSRVLITTDLLARGIDVQQVSLVINYDLPTNRENYIHRIGRGGRFGRKGVAINFVTEEDKRILRDIETFYNTTVEEMPMNVADLI

SEQ ID NO: 14448 - protein, 100 aa, Homo sapiens
MLPPQKKPWESMAKGLVLGALFTSFLLLVYSYAVPPLHAGLASTTPEAAASCSPPALEPEAVIRANGSAGECQPRRNIVFLKTHKTASSTLLNILFRFGQ

SEQ ID NO: 14449 - protein, 275 aa, Homo sapiens
MAKMELSKAFSGQRTLLSAILSMLSLSFSTTSLLSNYWFVGTQKVPKPLCEKGLAAKCFDMPVSLDGDTNTSTQEVVQYNWETGDDRFSFRSFRSGMWLSCEETVEEPGERCRSFIELTPPAKRGLLGMVAHMMYSQVFQATVNLGPEDWRPHVWNYGWAFYMAWLSFTCCMASAVTTFNTYTRMVLEFKCKHSKSFKENPNCLPHHHQCFPRRLSSAAPTVGPLTSYHQYHNQPIHSVSEGVDFYSELRNKGFQRGASQELKEAVRSSVEEEQC

SEQ ID NO: 14450 - protein, 1147 aa, Homo sapiens
MAVDSAMELLFLDTFKHPSAEQSSHIDVVRFPCVVYINEVRVIPPGVRAHSSLPDNRAYGETSPHTFQLDLFFNNVSKPSAPVFDRLGSLEYDENTSIIFRPNSKVNTDGLVLRGWYNCLTLAIYGSVDRVISHDRDSPPPPPPPPPPPQPQPSLKRNPKHADGEKEDQFNGSPPRPQPRGPRTPPGPPPPDDDEDDPVPLPVSGDKEEDAPHREDYFEPISPDRNSVPQEGQYSDEGEVEEEQQEEGEEDEDDVDVEEEEDEDEDDRRTVDSIPEEEEEDEEEEGEEDEEGEGDDGYEQISSDEDGIADLERETFKYPNFDVEYTAEDLASVPPMTYDPYDRELVPLLYFSCPYKTTFEIEISRMKDQGPDKENSGAIEASVKLTELLDLYREDRGAKWVTALEEIPSLIIKGLSYLQLKNTKQDSLGQLVDWTMQALNLQVALRQPIALNVRQLKAGTKLVSSLAECGAQGVTGLLQAGVISGLFELLFADHVSSSLKLNAFKALDSVISMTEGMEAFLRGRQNEKSGYQKLLELILLDQTVRVVTAGSAILQKCHFYEVLSEIKRLGDHLAEKTSSLPNHSEPDHDTDAGLERTNPEYENEVEASMDMDLLESSNISEGEIERLINLLEEVFHLMETAPHTMIQQPVKSFPTMARITGPPERDDPYPVLFRYLHSHHFLELVTLLLSIPVTSAHPGVLQATKDVLKFLAQSQKGLLFFMSEYEATNLLIRALCHFYDQDEEEGLQSDGVIDDAFALWLQDSTQTLQCITELFSHFQRCTASEETDHSDLLGTLHNLYLITFNPVGRSAVGHVFSLEKNLQSLITLMEYYSKEALGDSKSKKSVAYNYACILILVVVQSSSDVQMLEQHAASLLKLCKADENNAKLQELGKWLEPLKNLRFEINCIPNLIEYVKQNIDNLMTPEGVGLTTALRVLCNVACPPPPVEGQQKDLKWNLAVIQLFSAEGMDTFIRVLQKLNSILTQPWRLHVNMGTTLHRVTTISMARCTLTLLKTMLTELLRGGSFEFKDMRVPSALVTLHMLLCSIPLSGRLDSDEQKIQNDIIDILLTFTQGVNEKLTISEETLANNTWSLMLKEVLSSILKVPEGFFSGLILLSELLPLPLPMQTTQVSLPYNMHLINDCSNTF

SEQ ID NO: 14451 - protein, 379 aa, Homo sapiens
MLVAGLLLWASLLTGAWPSFPTQDHLPATPRVRLSFKELKATGTAHFFNFLLNTTDYRILLKDEDHDRMYVGSKDYVLSLDLHDINREPLIIHWAASPQRIEECVLSGKDVNGECGNFVRLIQPWNRTHLYVCGTGAYNPMCTYVNRGRRAQDYIFYLEPERLESGKGKCPYDPKLDTASALINEELYAGVYIDFMGTDAAIFRTLGKQTAMRTDQYNSRWLNDPSFIHAELIPDSAERNDDKLYFFFRERSAEAPQSPAVYARIGRICLNDDGGHCCLVNKWSTFLKARLVCSVPGEDGIETHFDELQDVFVQQTQDVRNPVIYAVFTSSGSVFRGSAVCVYSMADIRMVFNGPFAHKEGPNYQWMPFSGKMPYPRPG

SEQ ID NO: 14452 - protein, 252 aa, Homo sapiens
MIPPSSPREDGVDGLPKEAVGAEQPPSPASTSSQESKTKSLRSKSADNFFQRTNSEDMKLQAHMVAEISPSSSPLPAPGSLTSTPARAGLHPGGKAHAFQEYIFKKPTFCDVCNHMIVACGNKVDPVYETLRFGTSLAQRTKKGSSGSGSDSPHRTSTSDLVEVPEEANGPGGGYDLRKRSNSVFTYPENGTDDFRDPAKNINHQGSLSKDPLQMNTYVALYKFVPQENEDLEMRPGDIITLLEDSNEDWWK

SEQ ID NO: 14453 - protein, 1418 aa, Homo sapiens
MTQLTVEKVMDWYQTRAEEIEHYARQLQQKIIPDQDQLMAIALECIYTCERNDQLCLCYDLLECLPERGYGDKTEATTKLHDMVDQLEQILSVSELLEKHGLEKPISFVKNTQSSSEEARKLMVRLTRHTGRKQPPVSESHWRTLLQDMLTMQQNVYTCLDSDACYEIFTESLLCSSRLENIHLAGQMMHCSACSENPPAGIAHKGKPHYRVSYEKSIDLVLAASREYFNSSTNLTDSCMDLARCCLQLITDRPPAIQEELDLIQAVGCLEEFGVKILPLQVRLCPDRISLIKECISQSPTCYKQSTKLLGLAELLRVAGENPEERRGQVLILLVEQALRFHDYKAASMHCQELMATGYPKSWDVCSQLGQSEGYQDLATRQELMAFALTHCPPSSIELLLAASSSLQTEILYQRVNFQIHHEGGENISASPLTSKAVQEDEVGVPGSNSADLLRWTTATTMKVLSNTTTTTKAVLQAVSDGQWWKKSLTYLRPLQGQKCGGAYQIGTTANEDLEKQGCHPFYESVISNPFVAESEGTYDTYQHVPVESFAEVLLRTGKLAEAKNKGEVFPTTEVLLQLASEALPNDMTLALAYLLALPQVLDANRCFEKQSPSALSLQLAAYYYSLQIYARLAPCFRDKCHPLYRADPKELIKMVTRHVTRHEHEAWPEDLISLTKQLHCYNERLLDFTQAQILQGLRKGVDVQRFTADDQYKRETILGLAETLEESVYSIAISLAQRYSVSRWEVFMTHLEFLFTDSGLSTLEIENRAQDLHLFETLKTDPEAFHQHMVKYIYPTIGGFDHERLQYYFTLLENCGCADLGNCAIKPETHIRLLKKFKVVASGLNYKKLTDENMSPLEALEPVLSSQNILSISKLVPKIPEKDGQMLSPSSLYTIWLQKLFWTGDPHLIKQVPGSSPEWLHAYDVCMKYFDRLHPGDLITVVDAVTFSPKAVTKLSVEARKEMTRKAIKTVKHFIEKPRKRNSEDEAQEAKDSKVTYADTLNHLEKSLAHLETLSHSFILSLKNSEQETLQKYSHLYDLSRSEKEKLHDEAVAICLDGQPLAMIQQLLEVAVGPLDISPKDIVQSAIMKIISALSGGSADLGGPRDPLKVLEGVVAAVHASVDKGEELVSPEDLLEWLRPFCADDAWPVRPRIHVLQILGQSFHLTEEDSKLLVFFRTEAILKASWPQRQVDIADIENEENRYCLFMELLESSHHEAEFQHLVLLLQAWPPMKSEYVITNNPWVRLATVMLTRCTMENKEGLGNEVLKMCRSLYNTKQMLPAEGVKELCLLLLNQSLLLPSLKLLLESRDEHLHEMALEQITAVTTVNDSNCDQELLSLLLDAKLLVKCVSTPFYPRIVDHLLASLQQGRWDAEELGRHLREAGHEAEAGSLLLAVRGTHQAFRTFSTALRAAQHWV

SEQ ID NO: 14454 - protein, 772 aa, Homo sapiens
MVQTLPKLFPHDGAKRKKRTLRTSGPCFGGGGQIPQISYASTAPDLSDNSRYDFFSRVVPSDTYQAQAMVDIVRALKWNYVSTVASEGSYGESGVEAFIQKSREDGGVCIAQSVKIPREPKAGEFDKIIRRLLETSNARAVIIFANEDDIRRVLEAARRANQTGHFFWMGSDSWGSKIAPVLHLEEVAEGAVTILPKRMSVRGFDRYFSSRTLDNNRRNIWFAEFWEDNFHCKLSRHALKKGSHVKKCTNRERIGQDSAYEQEGKVQFVIDAVYAMGHALHAMHRDLCPGRVGLCPRMDPVDGTQLLKYIRNVNFSGIAGNPVTFNENGDAPGRYDIYQYQLRNDSAEYKVIGSWTDHLHLRIERMHWPGSGQQLPRSICSLPCQPGERKKTVKGMPCCWHCEPCTGYQYQVDRYTCKTCPYDMRPTENRTGCRPIPIIKLEWGSPWAVLPLFLAVVGIAATLFVVITFVRYNDTPIVKASGRELSYVLLAGIFLCYATTFLMIAEPDLGTCSLRRIFLGLGMSISYAALLTKTNRIYRIFEQGKRSVSAPRFISPASQLAITFSLISLQLLGICVWFVVDPSHSVVDFQDQRTLDPRFARGVLKCDISDLSLICLLGYSMLLMVTCTVYAIKTRGVPETFNEAKPIGFTMYTTCIVWLAFIPIFFGTSQSADKLYIQTTTLTVSVSLSASVSLGMLYMPKVYIILFHPEQNVPKRKRSLKAVVTAATMSNKFTQKGNFRPNGEAKSELCENLEAPALATKQTYVTYTNHAI

SEQ ID NO: 14455 - protein, 234 aa, Homo sapiens
MAAGTAVGAWVLVLSLWGAVVGAQNITARIGEPLVLKCKGAPKKPPQRLEWKLNTGRTEAWKVLSPQGGGPWDSVARVLPNGSLFLPAVGIQDEGIFRCQAMNRNGKETKSNYRSLRTFTITASDWIFPPSEIPGKPEIVDSASELTAGVPNKVGTCVSEGSYPAGTLSWHLDGKPLVPNEKGVSVKEQTRRHPETGLFTLQSELMVTPARGGDPRPTFSCSFSPGLPRHRALR

SEQ ID NO: 14456 - protein, 271 aa, Homo sapiens
MPESLDSPTSGRPGVTSLTAAAAFKPVGSTGVIKSPSWQRPNQGVPSTGRISNSATYSGSVAPANSALGQTQPSDQDTLVQRAEHIPAGKRTPMCAHCNQVIRGPFLVALGKSWHPEEFNCAHCKNTMAYIGFVEEKGALYCELCYEKFFAPECGRCQRKILGEVISALKQTWHVSCFVCVACGKPIRNNVFHLEDGEPYCETDYYALFGTICHGCEFPIEAGDMFLEALGYTWHDTCFVCSVCCESLEGQTFFSKKDKPLCKKHAHSVNF

SEQ ID NO: 14457 - protein, 1296 aa, Homo sapiens
MLDPSSSEEESDEGLEEESRDVLVAAGSSQRAPPAPTREGRRDAPGRAGGGGAARSVSPSPSVLSEGRDEPQRQLDDEQERRIRLQLYVFVVRCIAYPFNAKQPTDMARRQQKLNKQQLQLLKERFQAFLNGETQIVADEAFCNAVRSYYEVFLKSDRVARMVQSGGCSANDFREVFKKNIEKRVRSLPEIDGLSKETVLSSWIAKYDAIYRGEEDLCKQPNRMALSAVSELILSKEQLYEMFQQILGIKKLEHQLLYNACQLDNADEQAAQIRRELDGRLQLADKMAKERKFPKFIAKDMENMYIEELRSSVNLLMANLESLPVSKGGPEFKLQKLKRSQNSAFLDIGDENEIQLSKSDVVLSFTLEIVIMEVQGLKSVAPNRIVYCTMEVEGEKLQTDQAEASRPQWGTQGDFTTTHPRPVVKVKLFTESTGVLALEDKELGRVILYPTSNSSKSAELHRMVVPKNSQDSDLKIKLAVRMDKPAHMKHSGYLYALGQKVWKRWKKRYFVLVQVSQYTFAMCSYREKKSEPQELMQLEGYTVDYTDPHPGLQGGCMFFNAVKEGDTVIFASDDEQDRILWVQAMYRATGQSYKPVPAIQTQKLNPKGGTLHADAQLSGKDADRFQKHGMDEFISANPCKLDHAFLFRILQRQTLDHRLNDSYSCLGWFSPGQVFVLDEYCARYGVRGCHRHLCYLAELMEHSENGAVIDPTLLHYSFAFCASHVHGNRPDGIGTVSVEEKERFEEIKERLSSLLENQISHFRYCFPFGRPEGALKATLSLLERVLMKDIATPIPAEEVKKVVRKCLEKAALINYTRLTEYAKIEETMNQASPARKLEEILHLAELCIEVLQQNEEHHAEGREAFAWWPDLLAEHAEKFWALFTVDMDTALEAQPQDSWDSFPLFQLLNNFLRNDTLLCNGKFHKHLQEIFVPLVVRYVDLMESSIAQSIHRGFEQETWQPVKNIANSLPNVALPKVPSLPLNLPQIPNISTASWMPSLYESTNGSATSEDLFWKLDALQMFVFDLHWPEQEFAHHLEQRLKLMASDMLEACVKRTRTAFELKLQKASKTTDLRIPASVCTMFNVLVDAKKQSTKLCALDGGQEQQYHSKIDDLIDNSVKEIISLLVSKFVSVLEGVLSKLSRYDEGTFFSSILSFTVKAAAKYVDVPKPGMDLADTYIMFVRQNQDILREKVNEEMYIEKLFDQWYSSSMKVICVWLTDRLDLQLHIYQLKTLIKIVKKTYRDFRLQGVLEGTLNSKTYDTVHRRLTVEEATASVSEGGGLQGITMKDSDEEEEG

SEQ ID NO: 14458 - protein, 388 aa, Homo sapiens
MFEAIGFLAIKLGVIPSDFSYAGLKDKKAITYQAMVVRKVTPERLKNIEKEIEKKRMNVFNIRSVDDSLRLGQLKGNHFDIVIRNLKKQINDSANLRERIMEAIENVKKKGFVNYYGPQRFGKGRKVHTDQIGLALLKNEMMKAIKLFLTPEDLDDPVNRAKKYFLQTEDAKGTLSLMPEFKVRERALLEALHRFGMTEEGCIQAWFSLPHSMRIFYVHAYTSKIWNEAVSYRLETYGARVVQGDLVCLDEDIDDENFPNSKIHLVTEEEGSANMYAIHQVVLPVLGYNIQYPKNKVGQWYHDILSRDGLQTCRFKVPTLKLNIPGCYRQILKHPCNLSYQLMEDHDIDVKTKGSHIDETALSLLISFDLDASCYATVCLKEIMKHDV

SEQ ID NO: 14459 - protein, 41 aa, Homo sapiens
MLKTESSGERTTLRSASPHRNAYRTEFQALKSTFDKPKSDG

SEQ ID NO: 14460 - protein, 862 aa, Homo sapiens
MEGHAEMEMLRTLKGPSTGEVSMHLVAGDSPGSGPHLPATAFIIPASSATLGLPSSALDVSCFPREPIHVGAPEQVAGCEPVSATVLPQLSAGPASSSTSTVRLLEWTEAAAPPPGGGLRFRISEYKPLNMAGVEQPPSPELRQEGVTEYEDGGAPAGDGEAGPQQAEDHPQNPPEDPNQDPPEDDSTCQCQACGPHQAAGPDLGSSNDGCPQLFQERSVIVENSSGSTSASELLKPMKKRKRREYQSPSEEESEPEAMEKQEEGKDPEGQPTASTPESEEWSSSQPATGEKKECWSWESYLEEQKAITAPVSLFQDSQAVTHNKNGFKLGMKLEGIDPQHPSMYFILTVAEVCGYRLRLHFDGYSECHDFWVNANSPDIHPAGWFEKTGHKLQPPKGYKEEEFSWSQYLRSTRAQAAPKHLFVSQSHSPPPLGFQVGMKLEAVDRMNPSLVCVASVTDVVDSRFLVHFDNWDDTYDYWCDPSSPYIHPVGWCQKQGKPLTPPQDYPDPDNFCWEKYLEETGASAVPTWAFKVRPPHSFLVNMKLEAVDRRNPALIRVASVEDVEDHRIKIHFDGWSHGYDFWIDADHPDIHPAGWCSKTGHPLQPPLGPREPSSASPGGCPPLSYRSLPHTRTSKYSFHHRKCPTPGCDGSGHVTGKFTAHHCLSGCPLAERNQSRLKAELSDSEASARKKNLSGFSPRKKPRHHGRIGRPPKYRKIPQEDFQTLTPDVVHQSLFMSALSAHPDRSLSVCWEQHCKLLPGVAGISASTVAKWTIDEVFGFVQTLTGCEDQARLFKDEARIVRVTHVSGKTLVWTVAQLGDLVCSDHLQEGKGILETGVHSLLCSLPTHLLAKLSFASDSQY

SEQ ID NO: 14461 - protein, 470 aa, Homo sapiens
MEETIKDPPTSAVLLDHCHFSQVIFNSVEKFYIPGGDVTCHYTFTQHFIPRRKDWIGIFRAFKCFQDKLEQELLKWRSQGQKLQVGWKTTREYYTFMWVTLPIDLNNKSAKQQEVQFKAYYLPKDDEYYQFCYVDEDGVVRGASIPFQFRPENEEDILVVTTQGEVEEIEQHNKELCKENQELKDSCISLQKQNSDMQAELQKKQEELETLQSINKKLELKVKEQKDYWETELLQLKEQNQKMSSENEKMGIRVDQLQAQLSTQEKEMEKLVQGDQDKTEQLEQLKKENDHLFLSLTEQRKDQKKLEQTVEQMKQNETTAMKKQQELMDENFDLSKRLSENEIICNALQRQKERLEGENDLLKRENSRLLSYMGLDFNSLPYQVPTSDEGGARQNPGLAYGNPYSGIQESSSPSPLSIKKCPICKADDICDHTLEQQQMQPLCFNCPICDKIFPATEKQIFEDHVFCHSL

SEQ ID NO: 14462 - protein, 630 aa, Homo sapiens
MDPSWRRSSHSWPQPMPDSGRAPVRPHLAKLEEDVWPCPQFHQTKAASGPPFVNEANSKWLDAHYDPMANIHTFSACLALADLHGDGEYKLVVGDLGPGGQQPRLKVLKGPLVMTESPLPALPAAAATFLMEQHEPRTPALALASGPCVYVYKNLRPYFKFSLPQLPPNPLEQDLWNQAKEDRIDPLTLKEMLESIRETAEEPLSIQSLRFLQLELSEMEAFVNQHKSNSIKRQTVITTMTTLKKNLADEDAVSCLVLGTENKELLVLDPEAFTILAKMSLPSVPVFLEVSGQFDVEFRLAAACRNGNIYILRRDSKHPKYCIELSAQPVGLIRVHKVLVVGSTQDSLHGFTHKGKKLWTVQMPAAILTMNLLEQHSRGLQAVMAGLANGEVRIYRDKALLNVIHTPDAVTSLCFGRYGREDNTLIMTTRGGGLIIKILKRTAVFVEGGSEVGPPPAQAMKLNVPRKTRLYVDQTLREREAGTAMHRAFQTDLYLLRLRAARAYLQALESSLSPLSTTAREPLKLHAVVQGLGPTFKLTLHLQNTSTTRPVLGLLVCFLYNEALYSLPRAFFKVPLLVPGLNYPLETFVESLSNKGISDIIKVLVLREGQSAPLLSAHVNMPGSEGLAAA

SEQ ID NO: 14463 - protein, 172 aa, Homo sapiens
MADRMQIVVILSEFFNTTWQEANCANCLTNNSEELSNSTVYFLNLFNHTLTCFEHNLQGNAHSLLQTKNYSEVCKNCREAYKTLSSLYSEMQKMNELENKAEPGTHLCIDVEDAMNITRKLWSRTFNCSVPCSDTVPVIAVSVFILFLPVVFYLSSFLHSEQKKRKLILPKR

SEQ ID NO: 14464 - protein, 449 aa, Homo sapiens
MPGMMEKGPELLGKNRSANGSAKSPAGGGGSGASSTNGGLHYSEPESGCSSDDEHDVGMRVGAEYQARIPEFDPGATKYTDKDNGGMLVWSPYHSIPDAKLDEYIAIAKEKHGYNVEQALGMLFWHKHNIEKSLADLPNFTPFPDEWTVEDKVLFEQAFSFHGKSFHRIQQMLPDKTIASLVKYYYSWKKTRSRTSLMDRQARKLANRHNQGDSDDDVEETHPMDGNDSDYDPKKEAKKEGNTEQPVQTSKIGLGRREYQSLQHRHHSQRSKCRPPKGMYLTQEDVVAVSCSPNAANTILRQLDMELISLKRQVQNAKQVNSALKQKMEGGIEEFKPPESNQKINARWTTEEQLLAVQGVRKYGKDFQAIADVIGNKTVGQVKNFFVNYRRRFNLEEVLQEWEAEQGTQASNGDASTLGEETKSASNVPSGKSTDEEEEVCLCMEFELI

SEQ ID NO: 14465 - protein, 1216 aa, Homo sapiens
MPRRAGSGQLPLPRGWEEARDYDGKVFYIDHNTRRTSWIDPRDRLTKPLSFADCVGDELPWGWEAGFDPQIGVYYIDHINKTTQIEDPRKQWRGEQEKMLKDYLSVAQDALRTQKELYHVKEQRLALALDEYVRLNDAYKEKSSSHTSLFSGSSSSTKYDPDILKAEISTTRLRVKKLKRELSQMKQELLYKEQGFETLQQIDKKMSGGQSGYELSEAKAILTELKSIRKAISSGEKEKQDLMQSLAKLQERFHLDQNIGRSEPDLRCSPVNSHLCLSRQTLDAGSQTSISGDIGVRSRSNLAEKVRLSLQYEEAKRSMANLKIELSKLDSEAWPGALDIEKEKLMLINEKEELLKELQFVTPQKRTQDELERLEAERQRLEEELLSVRGTPSRALAERLRLEERRKELLQKLEETTKLTTYLHSQLKSLSASTLSMSSGSSLGSLASSRGSLNTSSRGSLNSLSSTELYYSSQSDQIDVDYQYKLDFLLQEKSGYIPSGPITTIHENEVVKSPSQPGQSGLCGVAAAATGHTPPLAEAPKSVASLSSRSSLSSLSPPGSPLVLEGTFPMSSSHDASLHQFTADFEDCELSSHFADISLIENQILLDSDSGGASQSLSEDKDLNECAREPLYEGTADVEKSLPKRRVIHLLGEKTTCVSAAVSDESVAGDSGVYEAFVKQPSEMEDVTYSEEDVAIVETAQVQIGLRYNAKSSSFMVIIAQLRNLHAFLIPHTSKVYFRVAVLPSSTDVSCLFRTKVHPPTESILFNDVFRVAISQTALQQKTLRVDLCSVSKHRREECLAGTQISLADLPFSSEVFTLWYNLLPSKQMPCKKNEENEDSVFQPNQPLVDSIDLDAVSALLARTSAELLAVEQELAQEEEEESGQEEPRGPDGDWLNTYFLCCWELKDDVFTRLTVKPLLTMLREASDEIVAEKEAEVKLPEDSSCTEDLSSCTSVPEMNEDGNRKESNCAKDLRSQPPTRIPTLVDKETNTDEAANDNMAVRPKERSSLSSRQHPFVRSSVIVRSQTFSPGERNQYICRLNRSDSDSSTLAKKSLFVRNSTERRSLRVKRTVCQSVLRRTTQECPVRTSLDLELDLQASLTRQSRLNDELQALRDLRQKLEELKAQGETDLPPGVLEDERFQRLLKQAEKQAEQSKEEQKQGLNAEKLMRQVSKDVCRLREQSQKVPRQVQSFREKIAYFTRAKISIPSLPADDV

SEQ ID NO: 14466 - protein, 533 aa, Homo sapiens
MLAKGKKAVMKFRNSIGNSQRMNSYQLPNINSYMMPIPPPLPPTGKITRENRSETWRRRRFRPTTAPNGLEPLLTKDSRRIHKTSLHSNAAITMIYLGKNVHLSSDNPDFRDEIKVYQQHCGGENLCVYKGKLLEKETFQFISKRHHGFPFSLTFFLNGMQVNRLSSCCEYKHRKGSRLGGKRGYFGFVCVERSSPCYKCIIAMGLDKKPSLPKSRKEKSTEKGEELKKAEGKVRKEREYVIPKRNEIKENKTSVSAKFSAQEIKTGLKEVVTAVEEMTSKGKPGQEVLEDDQENTLKYEYEEDFEVDEEKQGEKSNEEGQADVQMNGIPQSPLDDKKDNLDPEKESETSSQKAPDARDNVKDENDGCSESELEEDKQDMKTASSTSSRSHPYSSDSEDESAVGDREAHTDSSTDESARRSSSQELSENDKPRKSHLPIEESLEIEIEDQEITKADVETKPMPIDESFENVLKEGTEKGTQEIAEGLSEKSGKHVSAEEKEKDKSKLWEESTAQVKDKKAGLPGLEEGGKYGR

SEQ ID NO: 14467 - protein, 111 aa, Homo sapiens
MKKKLVVLGLLAVVLVLVIVGLCLWLPSASKEPDNHVYTRAAVAADAKQCSKIGRDALRDGGSAVDAAIAALLCVGLMNAHSMGIGGGLFLTIYNSTTRKAEVINAREVAP

SEQ ID NO: 14468 - protein, 527 aa, Homo sapiens
RGLQPECCAVFRLLHEHKGKKARLDWNTDAASLIGEELQVDFLDHVPLTTHNFARKTFLKLAFCDICQKFLLNGFRCQTCGYKFHEHCSTKVPTMCVDWSNIRQLFSQHRYSTPHAFTFNTSSPSSEGSLSQRQRSTSTPNVHMVSTTLPVDSRMIEDAIRSHSESASPSALSSSPNNLSPTGWSQPKTPVPAQRERAPVSGTQEKNKIRPRGQRDSSYYWEIEASEVMLSTRIGSGSFGTVYKGKWHGDVAVKILKVVDPTPEQFQAFRNEVAVLRKTRHVNILLFMGYMTKDNLAIVTQWCEGSSLYKHLHVQETKFQMFQLIDIARQTAQGMDYLHAKNIIHRDMKSNNIFLHEGLTVKIGDFGLATVKSRWSGSQQVEQPTGSVLWMAPEVIRMQDNNPFSFQSDVYSYGIVLYELMTGELPYSHINNRDQIIFMVGRGYASPDLSKLYKNCPKAMKRLVADCVKKVKEERPLFPQILSSIELLQHSLPKINRSASEPSLHRAAHTEDINACTLTTSPRLPVF

SEQ ID NO: 14469 - protein, 922 aa, Homo sapiens
MIWLRNRRCLEPLQGTPKWVPVLGELQKTLQKGEYLPLRPLPMFESNFVQVTHQGGPVFVNHRTNRLAMGVAASLPGLVLPDILLIGQPAEDRDCSGLVLTRMIPLDLVHLCVHDLSAWRLKLRLVSGRQYYLALDAPDNEVGFLFHCWVRLINLLQEPAPTWTPRTTRTAPLDMPLAEAPASTWHLQDQPISRHAVRVAERNFPHKTVAAQRQRKAKALKRSFKSQAVGDSVPLIWSQLEHADVRKKPAEKKSHSDPRPDRTHTQIRLPEKTSITTWTIFSIISSTANQTQSSPKACTSASDEATGQGHVVESPSHCVSADSPDGFFLGSCSSLDPCLWHQDTEDLMDSGGSTLSSAASGLAPYPPAACLSTPYSSIPRGREKAGPMGSHQGPGPPPCQKAPSGLVTSCKAPFLVDQSQKLPAVPASSWKPPPGLAPPQKAPAASAPPRKAPAVPAPSQKAPAVPAPSQKAPAIPAPSRKASAASASPRKASAVPAPPQKTPPPSQKAPSVPTIPQKAVSPTAPKKKSLLLPAPSQKALPTSPTEYQMALSPPASRGKLPGDFDVLPTGIPGRAVLERSQSGGKPEPVVTVRTQETDVVEMTTQAKSPESPFTVTKKESKDILISQTKEVTLEAFRGQGKLEDWAHWAKLEERSPDLPGVRSKELEQRKRWVKAKELAVEGPSQEHSRPFSVEALTLTKLMITANSKEQPSKSALVSLPSWLLATPQASATSMMASVPSRPGQLSLLEGKPVVVREQPESHTWVKEGKRPWGEMKEQPWGEMKEPPWDPKGPPKVPFRSKPTSASLKREGISQAPIPLTASPWEDLRPSPLSETLISKMEATARASQQPKRVSQEPMRMPAQHPLATVGSSSEILLPMLLELETVRNTATKAEEIQEESGVLNLLPSLQHSQHSEWPDAGA

SEQ ID NO: 14470 - protein, 330 aa, Homo sapiens
GRNRTGLEAIMETYAFWRPPVRTLTFEDFTTMQKQQASKKTSQGYTVNQHSSETDAIELYERRVWLMERRGSTGTSPTTSSTGTPSPSASSHLLSPSCSPPTFHLAPNTFNVGCRESQLCNLNLSDYPPCARSNMAALQSYPGLSDSGYNRLQSGTTSATQPSETFMPQRTPSLISGIPTPPSLPGNSKMEAYGGQLGSFPTSQFQYVMQAGNAASSSSSPHMFGGSHMQQSSYNAFSLHNPYNLYGYNFPTSPRLAASPEKLSASQSTLLCSSPSNGAFGERQYLPSGMEHSMHMISPSPNNQQATNTCDGRQYGAVPGSSSQMSVHMV

SEQ ID NO: 14471 - protein, 361 aa, Homo sapiens
MEALRVQMFMPCSFESLYLSSAEHPGASKPPISSSSMTSRILLRQQLMREQMQEQERREQQQKLQAAQFMQQRVPVSQTPAINVSVPTTLPSATQVPMEVLKVQTHLENPTKYHIQQAQRQQVKQYLSTTLANKHANQVLSLPCPNQPGDHVMPPVPGSSAPNSPMAMLTLNSNCEKEGFYKFEEQNRAESECPGMNTHSRASCMQMDDVIDDIISLESSYNEEILGLMDPALQMANTLPVSGNLIDLYGNQGLPPPGLTISNSCPANLPNIKRELTACIFPTESEARALAKERQKKDNHNLIERRRRFNINDRIKELGTLIPKSNDPDMRWNKGTILKASVDYIRKLQREQQRAKELENR

SEQ ID NO: 14472 - protein, 396 aa, Homo sapiens
MLSLEEVAPVLQQTLLQDNLLGRVHFDQFKEALILILSRTLSNEEHFQEPDCSLEAQPKYVRGGKRYGRRSLPEFQESVEEFPEVTVIEPLDEEARPSHIPAGDCSEHWKTQRSEEYEAEGQLRFWNPDDLNASQSGSSPPQDWIEEKLQEVCEDLGITRDGHLNRKKLVSICEQYGLQNVDGEMLEEVFHNLDPDGTMSVEDFFYGLFKNGKSLTPSASTPYRQLKRHLSMQSFDESGRRTTTSSAMTSTIGFRVFSCLDDGMGHASVERILDTWQEEGIENSQEILKALDFSLDGNINLTELTLALENELLVTKNSIHQAALASFKAEIRHLLERVDQVVREKEKLRSDLDKAEKLKSLMASEVDDHHAAIERRNEYNLRKLDEEYKERIAALK

SEQ ID NO: 14473 - protein, 625 aa, Homo sapiens
MKTNGGRCRIRALCWSRREWRGAGMAQKKYLQAKLTQFLREDRIQLWKPPYTDENKKVGLALKDLAKQYSDRLECCENEVEKVIEEIRCKAIERGTGNDNYRTTGIATIEVFLPPRLKKDRKNLLETRLHITGRELRSKIAETFGLQENYIKIVINKKQLQLGKTLEEQGVAHNVKAMVLELKQSEEDARKNFQLEEEEQNEAKLKEKQIQRTKRGLEILAKRAAETVVDPEMTPYLDIANQTGRSIRIPPSERKALMLAMGYHEKGRAFLKRKEYGIALPCLLDADKYFCECCRELLDTVDNYAVLQLDIVWCYFRLEQLECLDDAEKKLNLAQKCFKNCYGENHQRLVHIKGNCGKEKVLFLRLYLLQGIRNYHSGNDVEAYEYLNKARQLFKELYIDPSKVDNLLQLGFTAQEARLGLRACDGNVDHAATHITNRREELAQIRKEEKEKKRRRLENIRFLKGMGYSTHAAQQILLSNPQMWWLNDSNPETDNRQESPSQENIDRLVYMGFDALVAEAALRVFRGNVQLAAQTLAHNGGSLPPELPLSPEDSLSPPATSPSDSAGTSSASTDEDMETEAVNEILEDIPEHEEDYLDSTLEDEEIIIAEYLSYVENRKSATKKN

SEQ ID NO: 14474 - protein, 370 aa, Homo sapiens
TMNSLSEANTKFMFDLFQQFRKSKENNIFYSPISITSALGMVLLGAKDNTAQQISKVLHFDQVTENTTEKAATYHVDRSGNVHHQFQKLLTEFNKSTDAYELKIANKLFGEKTYQFLQEYLDAIKKFYQTSVESTDFANAPEESRKKINSWVESQTNEKIKNLFPDGTIGNDTTLVLVNAIYFKGQWENKFKKENTKEEKFWPNKDVQAKVLEIPYKGKDLSMIVLLPNEIDGLQKLEEKLTAEKLMEWTSLQNMRETCVDLHLPRFKMEESYDLKDTLRTMGMVNIFNGDADLSGMTWSHGLSVSKVLHKAFVEVTEEGVEAAAATAVVVVELSSPSTNEEFCCNHPFLFFIRQNKTNSILFYGRFSSP

SEQ ID NO: 14475 - protein, 340 aa, Homo sapiens
DTLLTTMLRNGAPLTRLPSDKLKAVIPPFLPPSSFELWSSDRSRTRHNGKADPMKTALPQRASRGHPVGGGGTDTTPVRPVKFPSLPRSPASSANSGNFNHSPHSSGGSSGVGVSRHGGELLNRSGGSIDNVLSQIAAQRKKAAGLLEQKPSHRSSPVGPAPGSSPSELPASPAGGSAPVGKQKLETSKRPPSGTSTTSKSTSPTLTPSPSPKGHTAESSVSSSSSHRQSKSSGGSSSGTITDEDELTGILKKLSLEKYQPIFEEQEVDMEAFLTLTDGDLKELGIKTDGSRQQILAAISELNAGKGRERQILQETIHNFHSSFESSASNTRAPGNSPCA

SEQ ID NO: 14476 - protein, 620 aa, Homo sapiens
MNNFILLEEQLIKKSQQKRRTSPSNFKVRFFVLTKASLAYFEDRHGKKRTLKGSIELSRIKCVEIVKSDISIPCHYKYPFQVVHDNYLLYVFAPDRESRQRWVLALKEETRNNNSLVPKYHPNFWMDGKWRCCSQLEKLATGCAQYDPTKNASKKPLPPTPEDNRRPLWEPEETVVIALYDYQTNDPQELALRRNEEYCLLDSSEIHWWRVQDRNGHEGYVPSSYLVEKSPNNLETYEWYNKSISRDKAEKLLLDTGKEGAFMVRDSRTAGTYTVSVFTKAVVSENNPCIKHYHIKETNDNPKRYYVAEKYVFDSIPLLINYHQHNGGGLVTRLRYPVCFGRQKAPVTAGLRYGKWVIDPSELTFVQEIGSGQFGLVHLGYWLNKDKVAIKTIREGAMSEEDFIEEAEVMMKLSHPKLVQLYGVCLEQAPICLVFEFMEHGCLSDYLRTQRGLFAAETLLGMCLDVCEGMAYLEEACVIHRDLAARNCLVGENQVIKVSDFGMTRFVLDDQYTSSTGTKFPVKWASPEVFSFSRYSSKSDVWSFGVLMWEVFSEGKIPYENRSNSEVVEDISTGFRLYKPRLASTHVYQIMNHCWKERPEDRPAFSRLLRQLAEIAESGL

SEQ ID NO: 14477 - protein, 746 aa, Homo sapiens
MPSALAIFTCRPNSHPFQERHVYLDEPIKIGRSVARCRPAQNNATFDCKVLSRNHALVWFDHKTGKFYLQDTKSSNGTFINSQRLSRGSEESPPCEILSGDIIQFGVDVTENTRKVTHGCIVSTIKLFLPDGMEARLRSDVIHAPLPSPVDKVAANTPSMYSQELFQLSQYLQEALHREQMLEQKLATLQRLLAITQEASDTSWQALIDEDRLLSRLEVMGNQLQACSKNQTEDSLRKELIALQEDKHNYETTAKESLRRVLQEKIEVVRKLSEVERSLSNTEDECTHLKEMNERTQEELRELANKYNGAVNEIKDLSDKLKVAEGKQEEIQQKGQAEKKELQHKIDEMEEKEQELQAKIEALQADNDFTNERLTALQEKLIVEGHLTKAVEETKLSKENQTRAKESDFSDTLSPSKEKSSDDTTDAQMDEQDLNEPLAKVSLLKALLEEERKAYRNQVEESTKQIQVLQAQLQRLHIDTENLREEKDSEITSTRDELLSARDEILLLHQAAAKVASERDTDIASLQEELKKVRAELERWRKAASEYEKEITSLQNSFQLRCQQCEDQQREEATRLQGELEKLRKEWNALETECHSLKRENVLLSSELQRQEKELHNSQKQSLELTSDLSILQMSRKELENQVGSLKEQHLRDSADLKTLLSKAENQAKDVQKEYEKTQTVLSELKLKFEMTEQEKQSITDELKQCKNNLKLLREKGNNPSILQPVPAVFIGLFLAFLFWCFGPLW

SEQ ID NO: 14478 - protein, 1758 aa, Homo sapiens
RQVTVHRDPIYGFGFVAGSERPVVVRSVRPGGPSENKLLAGDQIVAINEEDVSEAPRERLIELIRSAKEFIVLTVLHTHQSPKSAFISAAKKAKLRSNPVKVRFSEQVAVGETDAKMMKKEALLLIPNVLKVFLENGQIKSFTFDGRTTVKDVMLTLQDRLSLRFIEHFALVLEYAGPEQNHKFLLLQDKQPLAYVVQRTHYHGMKCLFRISFFPKDPVELLRRDPAAFEYLYIQSRNDVIRERFGMDPKPEMLLGLAALHIYITVSATRPSQKISLKNVEKEWGLEPFLPPSLLQVIKEKNLRKSLSQQLKAHQTHPSCGTKGSAIQAKLQYLRILNELPTFTGVLFNTVGLDEKQSATTLLVGPRHGISHVIDLKTNLTTVLSEFSKISKIQLFRENQGVARVETSIMDAKPLVLLMEWPEATNFACLIAGYCRLLLDSRKMVFSRPASQPLPPPMIKADYMHSAHRPVTGGHLGKKESSYVGSVGTSPRKSSRCTPPPADSELVSFCYLHMREQRKEQESRTDVNENLIFFEETRPRTKSDPTSKSSGQGYEVVPDDFDAASLDHEPCASRARSYTLDNSLGAEALNFYCDSCKAKLQEQLGPRKGGKPGSSRDNIVDLMSLPPPGSEEEEEEEDETTSLLPAIAAPPPGFRDNSSDEDDPKRRAVQSQEQGRHLRGLLYDEIPVTLIDSVQTRTVRDHAQELDDALVSTLQALEALAASEDGPHPPPPQTAGLIVLATITPESSLDSGHETNSSELTDMSEMMSAMKQHQNTTYFLAQHLNKDSLLARKDLPFRIQSCAAQAVLTAPYSLGRPDPNPSLQPIATGQSPGPPGARRKLPQSEGQVQGERTYSLAVHPALSPQLSEQKNLSLLSPVPEDKGPGHTRAGLEMSLRAATSSLSEEQVSELRDNLPKEVRLSPKLILDPKSSVTPAIISAALQQVVHNKSLVTAGGALGNPPSRGERRLEASMGRPEVSMMSSSASKNLKFKISPSAPETSWNSQHQLGAEVSSSPRAPTGSRADSLHLSQQEDSLPVQNFPPKSYLLRTSRESVGKQATGEVAGKGGPVGGKPTLQKQGTISSQGEKAQLESTPKRSKLEETSLVPRATYPMALQSPSCQSRSHSPSCQPHGHSPSSQSRGQSPSCQPRGQSPLRSQAASRQVSTMPSRKLETTLNGAHSTSEGPAKPKSSRGPFRLRNLFSATFPTRQKKETDERQAQLQKVKQYELEFLEELLKPPSQGELPGTEYLQPPAPGRCSCQLRSSPVQQGPGMSREQRRSCDCKRICRGGRPQATQTPVPSLRGRERDRVLPSQRQPEAGPGVSLSSPINVQRIRSTSLESRECRSDPESGVSCLTTCASGGECLGAPNYRKLMRRYSISELDQGDRASLTSDVYPHPPLGMLPREAKEVEASLPIALGPKSRSLESPTLGDPSYVQVAPETKGPRQMAVFSLPEEVYRKPAELDEDSESSKCCSIRYCFYYRKCDMADDASDGKDELSYSIPMKILPGMKLDEQVVPVVSRTLQVLDAATCSSSSPEASRTQEIDLRVSTFEGSLAKINALRAHAYGLPDGFLAARLDTNELLTVLRQCVASPEARAPKPYVSQISEYKLELALKFKELRASCRRVANVDKSPTHMLAAITGSFQVLSSLIETFVRLVFIVRSEAQRQELLAKVEEVVRNYTFLLRAAEESTARNLNQQQQQQQQQQQQQQQQQQQQQQQQQQQVAAAAGAATEHPPGSPTSATVMSTFTHSLKTLIK

SEQ ID NO: 14479 - protein, 412 aa, Homo sapiens
MHVRSLRAAAPHSFVALWAPLFLLRSALADFSLDNEVHSSFIHRRLRSQERREMQREILSILGLPHRPRPHLQGKHNSAPMFMLDLYNAMAVEEGGGPGGQGFSYPYKAVFSTQGPPLASLQDSHFLTDADMVMSFVNLVEHDKEFFHPRYHHREFRFDLSKIPEGEAVTAAEFRIYKDYIRERFDNETFRISVYQVLQEHLGRESDLFLLDSRTLWASEEGWLVFDITATSNHWVVNPRHNLGLQLSVETLDGQSINPKLAGLIGRHGPQNKQPFMVAFFKATEVHFRSIRSTGSKQRSQNRSKTPKNQEALRMANVAENSSSDQRQACKKHELYVSFRDLGWQDWIIAPEGYAAYYCEGECAFPLNSYMNATNHAIVQTLVGVTPSWGVVTWAGQAAGPPDPAASKLGPE

SEQ ID NO: 14480 - protein, 1242 aa, Homo sapiens
MPGLYCPSSWTPLPLTDSWVRACANGPCLSVRARLTYRNPQPQPVDGVFVYPLAEAEVVSGFEAEAAGRRVSFQLQSRRRSQAACCRALGPGLGTPTPRRCAQGHLVLDLAQARSTLVLPTGIIAAAGTMTVTLHSSRELPSRPDGVLHVALPTVLTPLAPPGPPGPPRPPGLCDDSPTSCFGVGSLQEEGLAWEELAAPRDVFSGPARCPAPYTFSFEMLVTGPCLLAGLESPSHALRADAPPHASSAATICVTLAEGHHCDRALEILLHPSEPHQPHLMLEGGSLSSAEYEARVRARRDFQRLQRRDSDGDRQVWFLQRRFHKDILLNPVLALSFCPDLSSKPGHLGTATRELLFLLDSSSVAHKDAIVLAVKSLPPQTLINLAVFGTLVQPLFPESRPCSDDAVQLICESIETLQVPSGPPDVLAALDWAVGQPQHRAYPRQLFLLTAASPMAATTHRTLELMRWHRGTARCFSFGLGPTCHQLLQGLSALSRGQAYFLRPGQRLQPMLVQALRKALEPALSDISVDWFVPDTVEALLTPREIPALYPGDQLLGYCSLFRVDGFRSRPPGGQEPGWQSSGGSVFPSPEEAPSAASPGTEPTGTSEPLGTGTVSAELSSPWAARDSEQSTDALTDPVTDPGPNPSDTAIWRRIFQSSYIREQYVLTHCSASPEPGPGSTGSSESPGSQGPGSPEGSAPLEPPSQQGCRSLAWGEPAGSRSCPLPAPTPAPFKVGALSTEVLGRQHRAALAGRSLSSPPGRANQVPGRPRKPSLGAILDGPSPEPGQQLGQGLDDSGNLLSPAPMDWDMLMEPPFLFTAVPPSGELAPPAVPPQAPRCHVVIRGLCGEQPMCWEVGVGLETLWGPGDGSQPPSPPVREAAWDQALHRLTAASVVRDNEQLALRGGAETTADRGHARRCWLRALQTSKVSSAPSCFTCPVAVDATTREVLPGALQVCSSEPAEPPGTPPASHSHLDAAPLPTVVYSKGLQRGSPAGAWDSDQNGNSKRALGDPATPTEGPRRPPPRPPCRLSMGRRHKLCSPDPGQANNSEGSDHDYLPLVRLQEAPGSFRLDAPFCAAVRISQERLCRASPFAVHRASLSPTSASLPWALLGPGVGQGDSATASCSPSPSSGSEGPGQVDSGRGSDTEASEGAEGLGGTDLRGRTWATAVALAWLEHRCAAAFDEWELTAAKADCWLRAQHLPDGLDLAALKAAARGLFLLLRHWDQNLQLHLLCYSPANV

SEQ ID NO: 14481 - protein, 314 aa, Homo sapiens
GWEMTFLILSIAPVLAVTGMIETAAMTGFANKDKQELKHAGKIATEALENIRTIVSLTREKAFEQMYEEMLQTQHRNTSKKAQIIGSCYAFSHAFIYFAYAAGFRFGAYLIQAGRMTPEGMFIVFTAIAYGAMAIGETLVLAPEYSKAKSGAAHLFALLEKKPNIDSRSQEGKKPDTCEGNLEFREVSFFYPCRPDVFILRGLSLSIERGKTVAFVGSSGCGKSTSVQLLQRLYDPVQGQVLFDGVDAKELNVQWLRSQIAIVPQEPVLFNCSIAENIAYGDNSRVVPLDEIKEAANAANIHSFIEGLPESLEC

SEQ ID NO: 14482 - protein, 152 aa, Homo sapiens
MFPPSGSTGLIPPSHFQARPLSTLPRMAPTWLSDIPLVQPPGHQDVSERRLDTQRPQVTMWERDVSSDRQEPGRRGRSWGLEGSQALSQQAEVIVRQLQELRRLEEEVRLLRETSLQQKMRLEAQAMELEALARAEKAGRAEAEGLRAALAG

SEQ ID NO: 14483 - protein, 521 aa, Homo sapiens
MRVASVQQVGWSLLCKLIEVCPGTMQSLMGPQDVGNDWEVLGVHQLILKMLTVHNASVNLSVIGLKTLDLLLTSGKITLLILDEESDIFMLIFDAMHSFPANDEVQKLGCKALHVLFERGNNVEVLMSGNVRCYNIVVEAMKAFPMSERIQEVSCCLLHRLTLGNFFNILVLNEVHEFVVKAVQQYPENAALQISALSCLALLRSFPGICECIVNSLRTKCNTSLDIMAAVVPKILTVMKRHETSLPVQLEALRAILHFIVPGMPEESREDTEFHHKLNMVKKQCFKNDIHKLVLAALNRFIGNPGIQKCGLKVISSIVHFPDALEMLSLEGAMDSVLHTLQMYPDDQEIQCLGLSLIGYLITKKNVFIGTGHLLAKILVSSLYRFKDVAEIQTKGFQTILAILKLSASFSKLLVHHSFDLVIFHQMSSNIMEQKDQQFLNLCCKCFAKVAMDDYLKNVMLERACDQNNSIMVECLLLLGADANQAKEGSSLICQVCEKESSPKLVELLLNSGSREQDVRK

SEQ ID NO: 14484 - protein, 652 aa, Homo sapiens
MERPEEGKQSPPPQPWGRLLRLGAEEGEPHVLLRKREWTIGRRRGCDLSFPSNKLVSGDHCRIVVDEKSGQVTLEDTSTSGTVINKLKVVKKQTCPLQTGDVIYLVYRKNEPEHNVAYLYESLSEKQGMTQESFDTSGAGAGRGADPRVPPSSPATQVCFEEPQPSTSTSDLFPTASASSTEPSPAGRERSSSCGSGGGGISPKGSGPSVASDEVSSFASALPDRKTASFSSLEPQDQEDLEPVKKKMRGDGDLDLNGQLLVAQPRRNAQTVHEDVRAAAGKPDKMEETLTCIICQDLLHDCVSLQPCMHTFCAACYSGWMERSSLCPTCRCPVERICKNHILNNLVEAYLIQHPDKSRSEEDVQSMDARNKITQDMLQPKVRRSFSDEEGSSEDLLELSDVDSESSDISQPYVVCRQCPEYRRQAAQPPHCPAPEGEPGAPQALGDAPSTSVSLTTAVQDYVCPLQGSHALCTCCFQPMPDRRAEREQDPRVAPQQCAVCLQPFCHLYWGCTRTGCYGCLAPFCELNLGDKCLDGVLNNNSYESDILKNYLATRGLTWKNMLTESLVALQRGVFLLSDYRVTGDTVLCYCCGLRSFRELTYQYRQNIPASELPVAVTSRPDCYWGRNCRTQVKAHHAMKFNHICEQTRFKN

SEQ ID NO: 14485 - protein, 250 aa, Homo sapiens
MSDKSELKAELERKKQRLAQIREEKKRKEEERKKKETDQKKEAVAPVQEESDLEKKRREAEALLQSMGLTPESPIVPPPMSPSSKSVSTPSEAGSQDSGDGAVGSRTLHWDTDPSVLQLHSDSDLGRGPIKLGMAKITQVDFPPREIVTYTKETQTPVMAQPKEDEEEDDDVVAPKPPIEPEEEKTLKKDEENDSKAPPHELTEEEKQQILHSEEFLSFFDHSTRIVERALSEQINIFFDYSGRDLEDKE

SEQ ID NO: 14486 - protein, 537 aa, Homo sapiens
MKMLTRLQVLTLALFSKGFLLSLGDHNFLRREIKIEGDLVLGGLFPINEKGTGTEECGRINEDRGIQRLEAMLFAIDEINKDDYLLPGVKLGVHILDTCSRDTYALEQSLEFVRASLTKVDEAEYMCPDGSYAIQENIPLLIAGVIGGSYSSVSIQVANLLRLFQIPQISYASTSAKLSDKSRYDYFARTVPPDFYQAKAMAEILRFFNWTYVSTVASEGDYGETGIEAFEQEARLRNICIATAEKVGRSNIRKSYDSVIRELLQKPNARVVVLFMRSDDSRELIAAASRANASFTWVASDGWGAQESIIKGSEHVAYGAITLELASQPVRQFDRYFQSLNPYNNHRNPWFRDFWEQKFQCSLQNKRNHRRVCDKHLAIDSSNYEQESKIMFVVNAVYAMAHALHKMQRTLCPNTTKLCDAMKILDGKKLYKDYLLKINFTGADDNHVHLCQPEWLCGLGLFVCTQGSHHPVSTPEECCHTQTAPQQVQCQWNWDHILSVLCKHVCANGVQWAGSPRLHHLISVIVNCSSVLVFLDC

SEQ ID NO: 14487 - protein, 164 aa, Homo sapiens
MSSGLRAADFPRWKRHISEQLRRRDRLQRQAFEEIILQYNKLLEKSDLHSVLAQKLQAEKHDVPNRHEIRRRQARLQKELAEAAKEPLPVEQDDDIEVIVDETSDHTEETSPVRAISRAATRRSVSSFPVPQDNVDTHPGSGKEVRVPATALCVFDAHDGEVNA

SEQ ID NO: 14488 - protein, 432 aa, Homo sapiens
MNYPDENTYGNKADIISTVEFNHTGELLATGDKGGRVVIFQREQESKNQVHRRGEYNVYSTFQSHEPEFDYLKSLEIEEKINKIRWLPQQNAAYFLLSTNDKTVKLWKVSERDKRPEGYNLKDEEGRLRDPATITTLRVPVLRPMDLMVEATPRRVFANAHTYHINSISVNSDYETYMSADDLRINLWNFEITNQSFNIVDIKPANMEELTEVITAAEFHPHHCNTFVYSSSKGTIRLCDMRASALCDRHTKFFEEPEDPSNRSFFSEIISSISDVKFSHSGRYIMTRDYLTVKVWDLNMENRPIETYQVHDYLRSKLCSLYENDCIFDKFECVWNGSDSVIMTGSYNNFFRMFDRNTKRDVTLEASRENSKPRAILKPRKVCVGGKRRKDEISVDSLDFSKKILHTAWHPSENIIAVAATNNLYIFQDKVN

SEQ ID NO: 14489 - protein, 1243 aa, Homo sapiens
MLIKEYHILLPMSLDEYQVAQLYMIQKKSREESSGEGSGVEILANRPYTDGPGGSGQYTHKVYHVGSHIPGWFRALLPKAALQVEEESWNAYPYTRTRYTCPFVEKFSIEIETYYLPDGGQQPNVFNLSGAERRQRILDTIDIVRDAVAPGEYKAEEDPRLYHSVKTGRGPLSDDWARTAAQTGPLMCAYKLCKVEFRYWGMQAKIEQFIHDVGLRRVMLRAHRQAWCWQDEWTELSMADIRALEEETARMLAQRMAKCNTGSEGSEAQPPGKPSTEARSAASNTGTPDGPEAPPGPDASPDASFGKQWSSSSRSSYSSQHGGAVSPQSLSEWRMQNIARDSENSSEEEFFDAHEGFSDSEEVFPKEMTKWNSNDFIDAFASPVEAEGTPEPGAEAAKGIEDGAQAPRDSEGLDGAGELGAEACAVHALFLILHSGNILDSGPGDANSKQADVQTLSSAFEAVTRIHFPEALGHVALRLVPCPPICAAAYALVSNLSPYSHDGDSLSRSQDHIPLAALPLLATSSSRYQGAVATVIARTNQAYSAFLRSPEGAGFCGQVALIGDGVGGILGFDALCHSANAGTGSRGSSRRGSMNNELLSPEFGPVRDPLADGVEGLGRGSPEPSALPPQRIPSDMASPEPEGSQNSLQAAPATTSSWEPRRASTAFCPPAASSEAPDGPSSTARLDFKVSGFFLFGSPLGLVLALRKTVMPALEAQMRPACEQIYNLFHAADPCASRLEPLLAPKFQAIAPLTVPRYQKFPLGDGSSLLLADTLQTHSSLFLEELEMLVPSTPTSTSGAFWKGSELATDPPAQPAAPSTTSEVVKILERWWGTKRIDYSLYCPEALTAFPTVTLPHLFHASYWESADVVAFILRQVIEKERPQLAECEEPSIYSPAFPREKWQRKRTQVKIRNVTSNHRASDTVVCEGRPQVLSGRFMYGPLDVVTLTGEKVDVYIMTQPLSGKWIHFGTEVTNSSGRLTFPVPPERALGIGVYPVRMVVRGDHTYAECCLTVVARGTEAVVFSIDGSFTASVSIMGSDPKVRAGAVDVVRHWQDSGYLIVYVTGRPDMQKHRVVAWLSQHNFPHGVVSFCDGLTHDPLRQKAMFLQSLVQEVELNIVAGYGSPKDVAVYAALGLSPSQTYIVGRAVRKLQAQCQFLSDGYVAHLGQLEAGSHSHASSGPPRAALGKSSYGVAAPVDFLRKQSQLLRSRGPSQAEREGPGTPPTTLARGKARSISLKLDSEE

SEQ ID NO: 14490 - protein, 957 aa, Homo sapiens
MLTEASLSIWGWGSLGIVLFLITFGPFVIFYLTFYILCFVGGGLVVTLLFGKTNSEKYLEQCEHSFLPPTSPGVPKCLEEMKREARTIKIDRRLTGANIIDEPLQQVIQFSLRDYVQYWYYTLSDDESFLLEIRQTLQNALIQFATRSKEIDWQPYFTTRIVDDFGTHLRVFRKAQQKITEKDDQVKGTAEDLVDTFFEVEVEMEKEVCRDLVCTSPKDEEGFLRDLCEVLLYLLLPPGDFQNKIMRYFVREILARGILLPLINQLSDPDYINQYVIWMIRDSNCNYEAFMNIIKLSDNIGELEAVRDKAAEELQYLRSLDTAGDDINTIKNQINSLLFVKKVCDSRIQRLQSGKEINTVKLAANFGKLCTVPLDSILVDNVALQFFMDYMQQTGGQAHLFFWMTVEGYRVTAQQQLEVLLSRQRDGKHQTNQTKGLLRAAAVGIYEQYLSEKASPRVTVDDYLVAKLADTLNHEDPTPEIFDDIQRKVYELMLRDERFYPSFRQNALYVRMLAELDMLKDPSFRGSDDGDGESFNGSPTGSINLSLDDLSNVSSDDSVQLHAYISDTGVCNDHGKTYALYAITVHRRNLNSEEMWKTYRRYSDFHDFHMRITEQFESLSSILKLPGKKTFNNMDRDFLEKRKKDLNAYLQLLLAPEMMKASPALAHYVYDFLENKAYSKGKGDFARKMDTFVNPLRNSMRNVSNAVKSLPDSLAEGMTKMSDNMGKMSERLGQDIKQSFFKVPPLIPKTDSDPEHRRVSAQLDDNVDDNIPLRVMLLLMDEVFDLKERNQWLRRNIKNLLQQLIRATYGDTINRKIVDHVDWMTSPEQVADSVKRFRDAFWPNGILAEAVPCRDKSIRMRTRVAGKTKLLAIMPDELKHIIGAETTRKGILRVFEMFQHNQLNRRMVYVFLEGFLETLFPQYKFRELFNKLHSRSKQMQKYKQKLQTTQAPSLQKR

SEQ ID NO: 14491 - protein, 1271 aa, Homo sapiens
MAKQPGRSVQLLKSTDVGRHSLLYLKEIGRGWFGKVFLGEVNSGISSAQVVVKELQASASVQEQMQFLEEVQPYRALKHSNLLQCLAQCAEVTPYLLVMEFCPLGDLKGYLRSCRVAESMAPDPRTLQRMACEVACGVLHLHRNNFVHSDLALRNCLLTADLTVKIGDYGLAHCKYREDYFVTADQLWVPLRWIAPELVDEVHSNLLVVDQTKSGNVWSLGVTIWELFELGTQPYPQHSDQQVLAYTVREQQLKLPKPQLQLTLSDRWYEVMQFCWLQPEQRPTAEEVHLLLSYLCAKGATEAEEEFERRWRSLRPGGGGVGPGPGAAGPMLGGVVELAAASSFPLLEQFAGDGFHADGDDVLTVTETSRGLNFEYKWEAGRGAEAFPATLSPGRTARLQELCAPDGAPPGVVPVLSAHSPSLGSEYFIRLEEAAPAAGHDPDCAGCAPSPPATADQDDDSDGSTAASLAMEPLLGHGPPVDVPWGRGDHYPRRSLARDPLCPSRSPSPSAGPLSLAEGGAEDADWGVAAFCPAFFEDPLGTSPLGSSGAPPLPLTGEDELEEVGARRAAQRGHWRSNVSANNNSGSRCPESWDPVSAGGHAEGCPSPKQTPRASPEPGYPGEPLLGLQAASAQEPGCCPGLPHLCSAQGLAPAPCLVTPSWTETASSGGDHPQAEPKLATEAEGTTGPRLPLPSVPSPSQEGAPLPSEEASAPDAPDALPDSPTPATGGEVSAIKLASALNGSSSSPEVEAPSSEDEDTAEATSGIFTDTSSDGLQARRPDVVPAFRSLQKQVGTPDSLDSLDIPSSASDGGYEVFSPSATGPSGGQPRALDSGYDTENYESPEFVLKEAQEGCEPQAFAELASEGEGPGPETRLSTSLSGLNEKNPYRDSAYFSDLEAEAEATSGPEKKCGGDRAPGPELGLPSTGQPSEQVCLRPGVSGEAQGSGPGEVLPPLLQLEGSSPEPSTCPSGLVPEPPEPQGPAKVRPGPSPSCSQFFLLTPVPLRSEGNSSEFQGPPGLLSGPAPQKRMGGPGTPRAPLRLALPGLPAALEGRPEEEEEDSEDSDESDEELRCYSVQEPSEDSEEEAPAVPVVVAESQSARNLRSLLKMPSLLSETFCEDLERKKKAVSFFDDVTVYLFDQESPTRELGEPFPGAKESPPTFLRGSPGSPSAPNRPQQADGSPNGSTAEEGGGFAWDDDFPLMTAKAAFAMALDPAAPAPAAPTPTPAPFSRFTVSPAPTSRFSITHVSDSDAESKRGPEAGAGGESKEA

SEQ ID NO: 14492 - protein, 1687 aa, Homo sapiens
MTDPLLDSQPASSTGEMDGLCPELLLIPPPLSNRGILGPVQSPCPSRDPAPIPTEPGCLLVEATATEEGPGNMEIIVETVAGTLTPGAPGETPAPKLPPGEREPSQEAGTPLPGQETAEEENVEKEEKSDTQKDSQKAVDKGQGAQRLEGDVVSGTESLFKTHMCPECKRCFKKRTHLVEHLHLHFPDPSLQCPNCQKFFTSKSKLKTHLLRELGEKAHHCPLCHYSAVERNALNRHMASMHEDISNFYSDTYACPVCREEFRLSQALKEHLKSHTAAAAAEPLPLRCFQEGCSYAAPDRKAFIKHLKETHGVRAVECRHHSCPMLFATAEAMEAHHKSHYAFHCPHCDFACSNKHLFRKHKKQGHPGSEELRCTFCPFATFNPVAYQDHVGKMHAHEKIHQCPECNFATAHKRVLIRHMLLHTGEKPHKCELCDFTCRDVSYLSKHMLTHSNTKDYMCTECGYVTKWKHYLRVHMRKHAGDLRYQCNQCSYRCHRADQLSSHKLRHQGKSLMCEVCAFACKRKYELQKHMASQHHPGTPAPLYPCHYCSYQSRHKQAVLSHENCKHTRLREFHCALCDYRTFSNTTLLFHKRKAHGYVPGDQAWQLRYASQEPEGAMQGPTPPPDSEPSNQLSARPEGPGHEPGTVVDPSLDQALPEMSEEVNTGRQEGSEAPHGGDLGGSPSPAEVEEGSCTLHLEALGVELESVTEPPLEEVTETAPMEFRPLGLEGPDGLEGPELSSFEGIGTSDLSAEENPLLEKPVSEPSTNPPSLEEAPNNWVGTFKTTPPAETAPLPPLPESESLLKALRRQDKEQAEALVLEGRVQMVVIQGEGRAFRCPHCPFITRREKALNLHSRTGCQGRREPLLCPECGASFKQQRGLSTHLLKKCPVLLRKNKGLPRPDSPIPLQPVLPGTQASEDTESGKPPPASQEAELLLPKDAPLELPREPEETEEPLATVSGSPVPPAGNSLPTEAPKKHCFDPVPPAGNSSPTEAPKKHHLDPVPPAGNSSPTEALKKHRFEQGKFHCNSCPFLCSRLSSITSHVAEGCRGGRGGGGKRGTPQTQPDVSPLSNGDSAPPKNGSTESSSGDGDTVLVQKQKGARFSCPTCPFSCQQERALRTHQIRGCPLEESGELHCSLCPFTAPAATALRLHQKRRHPTAAPARGPRPHLQCGDCGFTCKQSRCMQQHRRLKHEGVKPHQCPFCDFSTTRRYRLEAHQSRHTGIGRIPCSSCPQTFGTNSKLRLHRLRVHDKTPTHFCPLCDYSGYLRHDITRHVNSCHQGTPAFACSQCEAQFSSETALKQHALRRHPEPAQPAPGSPAETTEGPLHCSRCGLLCPSPASLRGHTRKQHPRLECGACQEAFPSRLALDEHRRQQHFSHRCQLCDFAARERVGLVKHYLEQHEETSAAVAASDGDGDAGQPPLHCPFCDFTCRHQLVLDHHVKGHGGTRLYKCTDCAYSTKNRQKITWHSRIHTGEKPYHCHLCPYACADPSRLKYHMRIHKEERKYLCPECGYKCKWVNQLKYHMTKHTGLKPYQCPECEYCTNRADALRVHQETRHREARAFMCEQCGKAFKTRFLLRTHLRKHSEAKPYVCNVCHRAFRWAAGLRHHALTHTDRHPFFCRLCNYKAKQKFQVVKHVRRHHPDQADPNQGVGKDPTTPTVHLHDVQLEDPSPPAPAAPHTGPEG

SEQ ID NO: 14493 - protein, 705 aa, Homo sapiens
TVLPVATIQNASTAMLMAASVARKAVVLPGGTATSPKMIAKNVLGLVPQALPKADGRAGLGTGGQKVNGASVVMVQPSKTATGPSTGGGTVISRTQSSLVEAFNKILNSKNLLPAYRPNLSPPAEAGLALPPTGYRCLECGDAFSLEKSLARHYDRRSMRIEVTCNHCARRLVFFNKCSLLLHAREHKDKGLVMQCSHLVMRPVALDQMVGQPDITPLLPVAVPPVSGPLALPALGKGEGAITSSAITTVAAEAPVLPLSTEPPAAPATSAYTCFRCLECKEQCRDKAGMAAHFQQLGPPAPGATSNVCPTCPMMLPNRCSFSAHQRMHKNRPPHVCPECGGNFLQANFQTHLREACLHVSRRVGYRCPSCSVVFGGVNSIKSHIQTSHCEVFHKCPICPMAFKSGPSAHAHLYSQHPSFQTQQAKLIYKCAMCDTVFTHKPLLSSHFDQHLLPQRVSVFKCPSCPLLFAQKRTMLEHLKNTHQSGRLEETAGKGAGGALLTPKTEPEELAVSQGGAAPATEESSSSSEEEEVPSSPEPPRPAKRPRRELGSKGLKGGGGGPGGWTCGLCHSWFPERDEYVAHMKKEHGKSVKKFPCRLCERSFCSAPSLRRHVRVNHEGIKRVYPCRSKGPGLRAVPLLPSCPLPFQVLHRGKTHLQQPPDPRETCPGPARLAAWGPVPWPGDHLGSGFQCQSPGARSETPPVF

SEQ ID NO: 14494 - protein, 1898 aa, Homo sapiens
MAPEPAPGRTMVPLVPALVMLGLVAGAHGDSKPVFIKVPEDQTGLSGGVASFVCQATGEPKPRITWMKKGKKVSSQRFEVIEFDDGAGSVLRIQPLRVQRDEAIYECTATNSLGEINTSAKLSVLEEEQLPPGFPSIDMGPQLKVVEKARTATMLCAAGGNPDPEISWFKDFLPVDPATSNGRIKQLRSGALQIESSEESDQGKYECVATNSAGTRYSAPANLYVRVRRVAPRFSIPPSSQEVMPGGSVNLTCVAVGAPMPYVKWMMGAEELTKEDEMPVGRNVLELSNVVRSANYTCVAISSLGMIEATAQVTVKALPKPPIDLVVTETTATSVTLTWDSGNSEPVTYYGIQYRAAGTEGPFQEVDGVATTRYSIGGLSPFSEYAFRVLAVNSIGRGPPSEAVRARTGEQAPSSPPRRVQARMLSASTMLVQWEPPEEPNGLVRGYRVYYTPDSRRPPNAWHKHNTDAGLLTTVGSLLPGITYSLRVLAFTAVGDGPPSPTIQVKTQQGVPAQPADFQAEVESDTRIQLSWLLPPQERIIMYELVYWAAEDEDQQHKVTFDPTSSYTLEDLKPDTLYRFQLAARSDMGVGVFTPTIEARTAQSTPSAPPQKVMCVSMGSTTVRVSWVPPPADSRNGVITQYSVAYEAVDGEDRGRHVVDGISREHSSWDLVGLEKWTEYRVWVRAHTDVGPGPESSPVLVRTDEDVPSGPPRKVEVEPLNSTAVHVYWKLPVPSKQHGQIRGYQVTYVRLENGEPRGLPIIQDVMLAEAQETTISGLTPETTYSVTVAAYTTKGDGARSKPKIVTTTGAVPGRPTMMISTTAMNTALLQWHPPKELPGELLGYRLQYCRADEARPNTIDFGKDDQHFTVTGLHKGTTYIFRLAAKNRAGLGEEFEKEIRTPEDLPSGFPQNLHVTGLTTSTTELAWDPPVLAERNGRIISYTVVFRDINSQQELQNITTDTRFTLTGLKPDTTYDIKVRAWTSKGSGPLSPSIQSRTMPVEQVFAKNFRVAAAMKTSVLLSWEVPDSYKSAVPFKILYNGQSVEVDGHSMRKLIADLQPNTEYSFVLMNRGSSAGGLQHLVSIRTAPDLLPHKPLPASAYIEDGRFDLSMPHVQDPSLVRWFYIVVVPIDRVGGSMLTPRWSTPEELELDELLEAIEQGGEEQRRRRRQAERLKPYVAAQLDVLPETFTLGDKKNYRGFYNRPLSPDLSYQCFVLASLKEPMDQKRYASSPYSDEIVVQVTPAQQQEEPEMLWVTGPVLAVILIILIVIAILLFKRKRTHSPSSKDEQSIGLKDSLLAHSSDPVEMRRLNYQTPGMRDHPPIPITDLADNIERLKANDGLKFSQEYESIDPGQQFTWENSNLEVNKPKNRYANVIAYDHSRVILTSIDGVPGSDYINANYIDGYRKQNAYIATQGPLPETMGDFWRMVWEQRTATVVMMTRLEEKSRVKCDQYWPARGTETCGLIQVTLLDTVELATYTVRTFALHKSGSSEKRELRQFQFMAWPDHGVPEYPTPILAFLRRVKACNPLDAGPMVVHCSAGVGRTGCFIVIDAMLERMKHEKTVDIYGHVTCMRSQRNYMVQTEDQYVFIHEALLEAATCGHTEVPARNLYAHIQKLGQVPPGESVTAMELEFKLLASSKAHTSRFISANLPCNKFKNRLVNIMPYELTRVCLQPIRGVEGSDYINASFLDGYRQQKAYIATQGPLAESTEDFWRMLWEHNSTIIVMLTKLREMGREKCHQYWPAERSARYQYFVVDPMAEYNMPQYILREFKVTDARDGQSRTIRQFQFTDWPEQGVPKTGEGFIDFIGQVHKTKEQFGQDGPITVHCSAGVGRTGVFITLSIVLERMRYEGVVDMFQTVKTLRTQRPAMVQTEDQYQLCYRAALEYLGSFDHYAT

SEQ ID NO: 14495 - protein, 394 aa, Homo sapiens
MKKMNHKSTDSPKAPQLRGGVFDIVFATNSTQVIKMILNSSTEDGIKRIQDDCPKAGRHNYIFVMIPTLYSIIFVVGIFGNSLVVIVIYFYMKLKTVASVFLLNLALADLCFLLTLPLWAVYTAMEYRWPFGNYLCKIASASVSFNLYASVFLLTCLSIDRYLAIVHPMKSRLRRTMLVAKVTCIIIWLLAGLASLPAIIHRNVFFIENTNITVCAFHYESQNSTLPIGLGLTKNILGFLFPFLIILTSYTLIWKALKKAYEIQKNKPRNDDIFKIIMAIVLFFFFSWIPHQIFTFLDVLIQLGIIRDCRIADIVDTAMPITICIAYFNNCLNPLFYGFLGKKFKRYFLQLLKYIPPKAKSHSNLSTKMSTLSYRPSDNVSSSTKKPAPCFEVE

SEQ ID NO: 14496 - protein, 2715 aa, Homo sapiens
MAAAAGGGSCPGPGSARGRFPGRPRGAGGGGGRGGRGNGAERVRVALRRGGGATGPGGAEPGEDTALLRLLGLRRGLRRLRRLWAGPRVQRGRGRGRGRGWGPSRGCVPEEESSDGESDEEEFQGFHSDEDVAPSSLRSALRSQRGRAPRGRGRKHKTTPLPPPRLADVAPTPPKTPARKRGEEGTERMVQALTELLRRAQAPQAPRSRACEPSTPRRSRGRPPGRPAGPCRRKQQAVVVAEAAVTIPKPEPPPPVVPVKHQTGSWKCKEGPGPGPGTPRRGGQSSRGGRGGRGRGRGGGLPFVIKFVSRAKKVKMGQLSLGLESGQGQGQHEESWQDVPQRRVGSGQGGSPCWKKQEQKLDDEEEEKKEEEEKDKEGEEKEERAVAEEMMPAAEKEEAKLPPPPLTPPAPSPPPPLPPPSTSPPPPLCPPPPPPVSPPPLPSPPPPPAQEEQEESPPPVVPATCSRKRGRPPLTPSQRAEREAARAGPEGTSPPTPTPSTATGGPPEDSPTVAPKSTTFLKNIRQFIMPVVSARSSRVIKTPRRFMDEDPPKPPKVEVSPVLRPPITTSPPVPQEPAPVPSPPRAPTPPSTPVPLPEKRRSILREPTFRWTSLTRELPPPPPAPPPPPAPSPPPAPATSSRRPLLLRAPQFTPSEAHLKIYESVLTPPPLGAPEAPEPEPPPADDSPAEPEPRAVGRTNHLSLPRFAPVVTTPVKAEVSPHGAPALSNGPQTQAQLLQPLQALQTQLLPQALPPPQPQLQPPPSPQQMPPLEKARIAGVGSLPLSGVEEKMFSLLKRAKVQLFKIDQQQQQKVAASMPLSPGGQMEEVAGAVKQISDRGPVRSEDESVEAKRERPSGPESPVQGPRIKHVCRHAAVALGQARAMVPEDVPRLSALPLRDRQDLATEDTSSASETESVPSRSRRGKVEAAGPGGESEPTGSGGTLAHTPRRSLPSHHGKKMRMARCGHCRGCLRVQDCGSCVNCLDKPKFGGPNTKKQCCVYRKCDKIEARKMERLAKKGRTIVKTLLPWDSDESPEASPGPPGPRRGAGAGGPREEVVAHPGPEEQDSLLQRKSARRCVKQRPSYDIFEDSDDSEPGGPPAPRRRTPRENELPLPEPEEQSRPRKPTLQPVLQLKARRRLDKDALAPGPFASFPNGWTGKQKSPDGVHRVRVDFKEDCDLENVWLMGGLSVLTSVPGGPPMVCLLCASKGLHELVFCQVCCDPFHPFCLEEAERPLPQHHDTWCCRRCKFCHVCGRKGRGSKHLLECERCRHAYHPACLGPSYPTRATRKRRHWICSACVRCKSCGATPGKNWDVEWSGDYSLCPRCTQLYEKGNYCPICTRCYEDNDYESKMMQCAQCDHWVHAKCEGLSDEDYEILSGLPDSVLYTCGPCAGAAQPRWREALSGALQGGLRQVLQGLLSSKVVGPLLLCTQCGPDGKQLHPGPCGLQAVSQRFEDGHYKSVHSFMEDMVGILMRHSEEGETPDRRAGGQMKGLLLKLLESAFGWFDAHDPKYWRRSTRLPNGVLPNAVLPPSLDHVYAQWRQQEPETPESGQPPGDPSAAFQGKDPAAFSHLEDPRQCALCLKYGDADSKEAGRLLYIGQNEWTHVNCAIWSAEVFEENDGSLKNVHAAVARGRQMRCELCLKPGATVGCCLSSCLSNFHFMCARASYCIFQDDKKVFCQKHTDLLDGKEIVNPDGFDVLRRVYVDFEGINFKRKFLTGLEPDAINVLIGSIRIDSLGTLSDLSDCEGRLFPIGYQCSRLYWSTVDARRRCWYRCRILEYRPWGPREEPAHLEAAEENQTIVHSPAPSSEPPGGEDPPLDTDVLVPGAPERHSPIQNLDPPLRPDSGSAPPPAPRSFSGARIKVPNYSPSRRPLGGVSFGPLPSPGSPSSLTHHIPTVGDPDFPAPPRRSRRPSPLAPRPPPSRWASPPLKTSPQLRVPPPTSVVTALTPTSGELAPPGPAPSPPPPEDLGPDFEDMEVVSGLSAADLDFAASLLGTEPFQEEIVAAGAMGSSHGGPGDSSEEESSPTSRYIHFPVTVVSAPGLAPSATPGAPRIEQLDGVDDGTDSEAEAVQQPRGQGTPPSGPGVVRAGVLGAAGDRARPPEDLPSEIVDFVLKNLGGPGDGGAGPREESLPPAPPLANGSQPSQGLTASPADPTRTFAWLPGAPGVRVLSLGPAPEPPKPATSKIILVNKLGQVFVKMAGEGEPVPPPVKQPPLPPTISPTAPTSWTLPPGPLLGVLPVVGVVRPAPPPPPPPLTLVLSSGPASPPRQAIRVKRVSTFSGRSPPAPPPYKAPRLDEDGEASEDTPQVPGLGSGGFSRVRMKTPTVRGVLDLDRPGEPAGEESPGPLQERSPLLPLPEDGPPQVPDGPPDLLLESQWHHYSGEASSSEEEPPSPDDKENQAPKRTGPHLRFEISSEDGFSVEAESLEGAWRTLIEKVQEARGHARLRHLSFSGMSGARLLGIHHDAVIFLAEQLPGAQRCQHYKFRYHQQGEGQEEPPLNPHGAARAEVYLRKCTFDMFNFLASQHRVLPEGATCDEEEDEVQLRSTRRATSLELPMAMRFRHLKKTSKEAVGVYRSAIHGRGLFCKRNIDAGEMVIEYSGIVIRSVLTDKREKFYDGKGIGCYMFRMDDFDVVDATMHGNAARFINHSCEPNCFSRVIHVEGQKHIVIFALRRILRGEELTYDYKFPIEDASNKLPCNCGAKRCRRFLN

SEQ ID NO: 14497 - protein, 188 aa, Homo sapiens
MKKGIRYETSRKTSYIFQPQHGPWQTRMRKISNHGSLRVAKVAYPLGLCVGVFIYVAYIKWHRATATQAFFSITRAAPGARWGQQAHSPLGTAADGHEVFYGIMFDAGSTGTRVHVFQFTRPPRETPTLTHETFKALKPGLSAYADDVEKSAQGIRELLDVAKQDIPFDFWKATPLVLKATAGLRLLP

SEQ ID NO: 14498 - protein, 346 aa, Homo sapiens
MEEPQSDPSVEPPLSQETFSDLWKLLPENNVLSPLPSQAMDDLMLSPDDIEQWFTEDPGPDEAPRMPEAAPPVAPAPAAPTPAAPAPAPSWPLSSSVPSQKTYQGSYGFRLGFLHSGTAKSVTCTYSPALNKMFCQLAKTCPVQLWVDSTPPPGTRVRAMAIYKQSQHMTEVVRRCPHHERCSDSDGLAPPQHLIRVEGNLRVEYLDDRNTFRHSVVVPYEPPEVGSDCTTIHYNYMCNSSCMGGMNRRPILTIITLEDSSGNLLGRNSFEVRVCACPGRDRRTEEENLRKKGEPHHELPPGSTKRALPNNTSSSPQPKKKPLDGEYFTLQMLLDLRWCYFLINSS

SEQ ID NO: 14499 - protein, 1213 aa, Homo sapiens
MGVDFDVKTFCHNLRATKPPYECPVETCRKVYKSYSGIEYHLYHYDHDNPPPPQQTPLRKHKKKGRQSRPANKQSPSPSEVSQSPGREVMSYAQAQRMVEVDLHGRVHRISIFDNLDVVSEDEEAPEEAPENGSNKENTETPAATPKSGKHKNKEKRKDSNHHHHHNVSASTTPKLPEVVYRELEQDTPDAPPRPTSYYRYIEKSAEELDEEVEYDMDEEDYIWLDIMNERRKTEGVSPIPQEIFEYLMDRLEKESYFESHNKGDPNALVDEDAVCCICNDGECQNSNVILFCDMCNLAVHQECYGVPYIPEGQWLCRRCLQSPSRAVDCALCPNKGGAFKQTDDGRWAHVVCALWIPEVCFANTVFLEPIDSIEHIPPARWKLTCYICKQRGSGACIQCHKANCYTAFHVTCAQQAGLYMKMEPVRETGANGTSFSVRKTAYCDIHTPPGSARRLPALSHSEGEEDEDEEEDEGKGWSSEKVKKAKAKSRIKMKKARKILAEKRAAAPVVSVPCIPPHRLSKITNRLTIQRKSQFMQRLHSYWTLKRQSRNGVPLLRRLQTHLQSQRNCDQVGRDSEDKNWALKEQLKSWQRLRHDLERARLLVELIRKREKLKRETIKVQQIAMEMQLTPFLILLRKTLEQLQEKDTGNIFSEPVPLSEVPDYLDHIKKPMDFFTMKQNLEAYRYLNFDDFEEDFNLIVSNCLKYNAKDTIFYRAAVRLREQGGAVLRQARRQAEKMGIDFETGMHIPHSLAGDEATHHTEDAEEERLVLLENQKHLPVEEQLKLLLERLDEVNASKQSVGRSRRAKMIKKEMTALRRKLAHQRETGRDGPERHGPSSRGSLTPHPAACDKDGQTDSAAEESSSQETSKGLGPNMSSTPAHEVGRRTSVLFSKKNPKTAGPPKRPGRPPKNRESQMTPSHGGSPVGPPQLPIMSSLRQRKRGRSPRPSSSSDSDSDKSTEDPPMDLPANGFSGGNQPVKKSFLVYRNDCSLPRSSSDSESSSSSSSSAASDRTSTTPSKQGRGKPSFSRGTFPEDSSEDTSGTENEAYSVGTGRGVGHSMVRKSLGRGAGWLSEDEDSPLDALDLVWAKCRGYPSYPALIIDPKMPREGMFHHGVPIPVPPLEVLKLGEQMTQEAREHLYLVLFFDNKRTWQWLPRTKLVPLGVNQDLDKEKMLEGRKSNIRKSVQIAYHRALQHRSKVQGEQSSETSDSD

SEQ ID NO: 14500 - protein, 605 aa, Homo sapiens
YFCFRALKDNVTHAHLQQIRRNLAHQQHGVTLLHRFWNLWRSQIEQKKERELLPLLHAAWDHYRIALLCKCIELWLQYTQKRRYKQLLQARADGHFQQRALPAAFHTWNRLWRWRHQENVLSARATRFHRETLEKQVFSLWRQKMFQHRENRLAERMAILHAERQLLYRSWFMWHQQAAARHQEQEWQTVACAHHRHGRLKKAFCLWRESAQGLRTERTGRVRAAEFHMAQLLRWAWSQWRETYQGRVRSILREVAARESQHNRQLLRGALRRWKENTMARVDEAKKTFQASTHYRRTICSKVLVQWREAVSVQMYYRQQEDCAIWEAQKVLDRGCLRTWFQRWWDCSRRSAQQRLQLERAVQHHHRQLLLEGLARWKTHHLQCVRKRLLHRQSTQLLAQRLSRTCFRQWRQQLAARRQEQRATVRALWFWAFSLQAKVWATWLAFVLERRRKKARLQWALQAYQGQLLQEGATRLLRFAASMKASRQQLQAQQQVQAAHSLHRAVRRCATLWKQKVLGRGGKPQPLAAIAPSRKVTFEGPLLNRIAAGAGDGTLETKRPQASRPLGALGRLAAEEPHALELNTAHSARKQPRRPHFLLEPAQSQ

SEQ ID NO: 14501 - protein, 99 aa, Homo sapiens
MEEIPAQEAAGSPRVQFQSLETQSECLSPEPQFVQDTDMEQGLTGGILLRLPTTRIHSVNSCPALSHTQASAFSGETLAVLTAGISKRWPKYRLPIDIA

SEQ ID NO: 14502 - protein, 861 aa, Homo sapiens
GKHKLLSTGPTEPWSIREKLCLASSVMRSGDQNWVSVSRAIKPFAEPGRPPDWFSQKHCASQYSELLETTETPKRKRGEKGEVVETVEDVIVRKLTAERVEELKKVIKETQERYRRLKRDAELIQAGHMDSRLDELCNDIATKKKLEEEEAEVKRKATDAAYQARQAVKTPPRRLPTVMVRSPIDSASPGGDYPLGDLTPTTMEEATSGVTPGTLPSTPVTSFPGIPDTLPPGSAPLEAPMTPVTDDSPQKKMLGQKATPPPSPLLSELLKKGSLLPTSPRLVNESEMAVASGHLNSTGVLLEVGGVLPMIHGGEIQQTPNTVAASPAASVSQPDNCVPMEAVGDPHTVTVSMDSSEISMIINSIKEECFRSGVAEAPVGSKAPSIDGKEELDLAEKMDIAVSYTGEELDFETVGDIIAIIEDKVDDHPEVLDVAAVEAALSFCEENDDPQSLPGPWEHPIQQERDKPVPLPAPEMTVKQERLDFEETENKGIHELVDIREPSAEIKVEPAEPEPVISGAEIVAGVVPATSMEPPELRSQDLDEELGSTAAGEIVEADVAIGKGDETPLTNVKTEASPESMLSPSHGSNPIEDPLEAETQHKFEMSDSLKEESGTIFGSQIKDAPGEDEEEDGVSEAASLEEPKEEDQGEGYLSEMDNEPPVSESDDGFSIHNATLQSHTLADSIPSSPASSQFSVCSEDQEAIQAQKIWKKAIMLVWRAAANHRYANVFLQPVTDDIAPGYHSIVQRPMDLSTIKKNIENGLIRSTAEFQRDIMLMFQNAVMYNSSDHDVYHMAVEMQRDVLEQIQQFLATQLIMQTSESGISAKSLRGRDSTRKQDASEKDGGTRGRRCAIEADMKMKK

SEQ ID NO: 14503 - protein, 460 aa, Homo sapiens
MEICDIINETEEGPKDALRAVKKRIVGNKNFHEVMLALTVLETCVKNCGHRFHVLVASQDFVESVLVRTILPKNNPPTIVHDKVLNLIQSWADAFRSSPDLTGVVTIYEDLRRKGLEFPMTDLDMLSPIHTPQRTVFNSETQSGQDSVGTDSSQQEDSGQHAAPLPAPPILSGDTPIAPTPEQIGKLRSELEMVSGNVRVMSEMLTELVPTQAEPADLELLQELNRTCRAMQQRVLELIPQIANEQLTEELLIVNDNLNNVFLRHERFERFRTGQTTKAPSEAEPAADLIDMGPDPAATGNLSSQLAGMNLGSSSVRAGLQSLEASGRLEDEFDMFALTRGSSLADQRKEVKYEAPQATDGLAGALDARQQSTGAIPVTQACLMEDIEQWLSTDVGNDAEEPKGVTSEGKFDKFLEERAKAADRLPNLSSPSAEGPPGPPSGPAPRKKTQEKDDDMLFAL

SEQ ID NO: 14504 - protein, 714 aa, Homo sapiens
MLPGLALLLLAAWTARALEVYPELQITNVVEANQPVTIQNWCKRGRKQCKTHPHFVIPYRCLVGEFVSDALLVPDKCKFLHQERMDVCETHLHWHTVAKETCSEKSTNLHDYGMLLPCGIDKFRGVEFVCCPLAEESDNVDSADAEEDDSDVWWGGADTDYADGSEDKVVEVAEEEEVAEVEEEEADDDEDDEDGDEVEEEAEEPYEEATERTTSIATTTTTTTESVEEVVREVCSEQAETGPCRAMISRWYFDVTEGKCAPFFYGGCGGNRNNFDTEEYCMAVCGSAMSQSLLKTTQEPLARDPVKLPTTAASTPDAVDKYLETPGDENEHAHFQKAKERLEAKHRERMSQVMREWEEAERQAKNLPKADKKAVIQHFQEKVESLEQEAANERQQLVETHMARVEAMLNDRRRLALENYITALQAVPPRPRHVFNMLKKYVRAEQKDRQHTLKHFEHVRMVDPKKAAQIRSQVMTHLRVIYERMNQSLSLLYNVPAVAEEIQDEVDELLQKEQNYSDDVLANMISEPRISYGNDALMPSLTETKTTVELLPVNGEFSLDDLQPWHSFGADSVPANTENEVEPVDARPAADRGLTTRPGSGLTNIKTEEISEVKMDAEFRHDSGYEVHHQKLVFFAEDVGSNKGAIIGLMVGGVVIATVIVITLVMLKKKQYTSIHHGVVEVDAAVTPEERHLSKMQQNGYENPTYKFFEQMQN

SEQ ID NO: 14505 - protein, 1490 aa, Homo sapiens
MPNSERHGGKKDGSGGASGTLQPSSGGGSSNSRERHRLVSKHKRHKSKHSKDMGLVTPEAASLGTVIKPLVEYDDISSDSDTFSDDMAFKLDRRENDERRGSDRSDRLHKHRHHQHRRSRDLLKAKQTEKEKSQEVSSKSGSMKDRISGSSKRSNEETDDYGKAQVAKSSSKESRSSKLHKEKTRKERELKSGHKDRSKSHRKRETPKSYKTVDSPKRRSRSPHRKWSDSSKQDDSPSGASYGQDYDLSPSRSHTSSNYDSYKKSPGSTSRRQSVSPPYKEPSAYQSSTRSPSPYSRRQRSVSPYSRRRSSSYERSGSYSGRSPSPYGRRRSSSPFLSKRSLSRSPLPSRKSMKSRSRSPAYSRHSSSHSKKKRSSSRSRHSSISPVRLPLNSSLGAELSRKKKERAAAAAAAKMDGKESKGSPVFLPRKENSSVEAKDSGLESKKLPRSVKLEKSAPDTELVNVTHLNTEVKNSSDTGKVKLDENSEKHLVKDLKAQGTRDSKPIALKEEIVTPKETETSEKETPPPLPTIASPPPPLPTTTPPPQTPPLPPLPPIPALPQQPPLPPSQPAFSQVPASSTSTLPPSTHSKTSAVSSQANSQPPVQVSVKTQVSVTAAIPHLKTSTLPPLPLPPLLPGDDDMDSPKETLPSKPVKKEKEQRTRHLLTDLPLPPELPGGDLSPPDSPEPKAITPPQQPYKKRPKICCPRYGERRQTESDWGKRCVDKFDIIGIIGEGTYGQVYKAKDKDTGELVALKKVRLDNEKEGFPITAIREIKILRQLIHRSVVNMKEIVTDKQDALDFKKDKGAFYLVFEYMDHDLMGLLESGLVHFSEDHIKSFMKQLMEGLEYCHKKNFLHRDIKCSNILLNNSGQIKLADFGLARLYNSEESRPYTNKVITLWYRPPELLLGEERYTPAIDVWSCGCILGELFTKKPIFQANLELAQLELISRLCGSPCPAVWPDVIKLPYFNTMKPKKQYRRRLREEFSFIPSAALDLLDHMLTLDPSKRCTAEQTLQSDFLKDVELSKMAPPDLPHWQDCHELWSKKRRRQRQSGVVVEEPPPSKTSRKETTSGTSTEPVKNSSPAPPQPAPGKVESGAGDAIGLADITQQLNQSELAVLLNLLQSQTDLSIPQMAQLLNIHSNPEMQQQLEALNQSISALTEATSQQQDSETMAPEESLKEAPSAPVILPSAEQTTLEASSTPADMQNILAVLLSQLMKTQEPAGSLEENNSDKNSGPQGPRRTPTMPQEEAAACPPHILPPEKRPPEPPGPPPPPPPPPLVEGDLSSAPQELNPAVTAALLQLLSQPEAEPPGHLPHEHQALRPMEYSTRPRPNRTYGNTDGPETGFSAIDTDERNSGPALTESLVQTLVKNRTFSGSLSHLGESSSYQGTGSVQFPGDQDLRFARVPLALHPVVGQPFLKAEGSSNSVVHAETKLQNYGELGPGTTGASSSGAGLHWGGPTQSSAYGKLYRGPTRVPPRGGRGRGVPY

SEQ ID NO: 14506 - protein, 602 aa, Homo sapiens
MVPGQAQPQSPEMLLLPLLLPVLGAGSLNKDPSYSLQVQRQVPVPEGLCVIVSCNLSYPRDGWDESTAAYGYWFKGRTSPKTGAPVATNNQSREVEMSTRDRFQLTGDPGKGSCSLVIRDAQREDEAWYFFRVERGSRVRHSFLSNAFFLKVTALTKKPDVYIPETLEPGQPVTVICVFNWAFKKCPAPSFSWTGAALSPRRTRPSTSHFSVLSFTPSPQDHDTDLTCHVDFSRKGVSAQRTVRLRVAYAPKDLIISISHDNTSALELQGNVIYLEVQKGQFLRLLCAADSQPPATLSWVLQDRVLSSSHPWGPRTLGLELRGVRAGDSGRYTCRAENRLGSQQQALDLSVQYPPENLRVMVSQANRTVLENLGNGTSLPVLEGQSLRLVCVTHSSPPARLSWTRWGQTVGPSQPSDPGVLELPPIQMEHEGEFTCHAQHPLGSQHVSLSLSVHWKLEHGGGLGLGAALGAGVAALLAFCSCLVVFRVKICRKEARKRAAAEQDVPSTLGPISQGHQHECSAGSSQDHPPPGAATYTPGKGEEQELHYASLSFQGLRLWEPADQEAPSTTEYSEIKIHTGQPLRGPGFGLQLEREMSGMVPK

SEQ ID NO: 14507 - protein, 410 aa, Homo sapiens
RDEDDEAYGKPVKYDPSFRGPIKNRSCTDVICCVLFLLFILGYIVVGIVAWLYGDPRQVLYPRNSTGAYCGMGENKDKPYLLYFNIFSCILSSNIISVAENGLQCPTPQVCVSSCPEDPWTVGKNEFSQTVGEVFYTKNRNFCLPGVPWNMTVITSLQQELCPSFLLPSAPALGRCFPWTNVTPPALPGITNDTTIQQGISGLIDSLNARDISVKIFEDFAQSWYWILVAVGQMMSTMFYPLVTFVLLLICIAYWAMTALYLATSGQPQYVLWASNISSPGCEKVPINTSCNPTAHLVNSSCPGLMCVFQGYSSKGLIQRSVFNLQIYGVLGLFWTLNWVLALGQCVLAGAFASFYWAFHKPQDIPTFPLISAFIRTLRYHTGSLAFGALILTLVQIARVILEYIDHKLR

SEQ ID NO: 14508 - protein, 657 aa, Homo sapiens
MLRGPGPGLLLLAVQCLGTAVPSTGASKSKRQAQQMVQPQSPVAVSQSKPGCYDNGKHYQINQQWERTYLGNALVCTCYGGSRGFNCESKPEAEETCFDKYTGNTYRVGDTYERPKDSMIWDCTCIGAGRGRISCTIANRCHEGGQSYKIGDTWRRPHETGGYMLECVCLGNGKGEWTCKPIAEKCFDHAAGTSYVVGETWEKPYQGWMMVDCTCLGEGSGRITCTSRNRCNDQDTRTSYRIGDTWSKKDNRGNLLQCICTGNGRGEWKCERHTSVQTTSSGSGPFTDVRAAVYQPQPHPQPPPYGHCVTDSGVVYSVGMQWLKTQGNKQMLCTCLGNGVSCQETAVTQTYGGNSNGEPCVLPFTYNGRTFYSCTTEGRQDGHLWCSTTSNYEQDQKYSFCTDHTVLVQTRGGNSNGALCHFPFLYNNHNYTDCTSEGRRDNMKWCGTTQNYDADQKFGFCPMAAHEEICTTNEGVMYRIGDQWDKQHDMGHMMRCTCVGNGRGEWTCIAYSQLRDQCIVDDITYNVNDTFHKRHEEGHMLNCTCFGQGRGRWKCDPVDQCQDSETGTFYQIGDSWEKYVHGVRYQCYCYGRGIGEWHCQPLQTYPSSSGPVEVFITETPSQPNSHPIQWNAPQPSHISKYILRWRPVSIPPRNLGY

SEQ ID NO: 14509 - protein, 696 aa, Homo sapiens
MDHRKARVLPAGHYCPSLGIWASQVGSVRSSVPPSIRNPAMVNEARGNSSLNPCLEGSASSGSESSKDSSRCSTPGLDPERHERLREKMRRRLESGDKWFSLEFFPPRTAEGAVNLISRFDRMAAGGPLYIDVTWHPAGDPGSDKETSSMMIASTAVNYCGLETILHMTCCRQRLEEITGHLHKAKQLGLKNIMALRGDPIGDQWEEEEGGFNYAVDLVKHIRSEFGDYFDICVAGYPKGHPEAGSFEADLKHLKEKVSAGADFIITQLFFEADTFFRFVKACTDMGITCPIVPGIFPIQGYHSLRQLVKLSKLEVPQEIKDVIEPIKDNDAAIRNYGIELAVSLCQELLASGLVPGLHFYTLNREMATTEVLKRLGMWTEDPRRPLPWALSAHPKRREEDVRPIFWASRPKSYIYRTQEWDEFPNGRWGNSSSPAFGELKDYYLFYLKSKSPKEELLKMWGEELTSEESVFEVFVLYLSGEPNRNGHKVTCLPWNDEPLAAETSLLKEELLRVNRQGILTINSQPNINGKPSSDPIVGWGPSGGYVFQKAYLEFFTSRETAEALLQVLKKYELRVNYHLVNVKGENITNAPELQPNAVTWGIFPGREIIQPTVVDPVSFMFWKDEAFALWIERWGKLYEEESPSRTIIQYIHDNYFLVNLVDNDFPLDNCLWQVVEDTLELLNRPTQNARETEAP

SEQ ID NO: 14510 - protein, 191 aa, Homo sapiens
MVMACRVVNKRRHMGLQQLSSFAETGRTFLGPLKSSKFIIDEECHESVLISSTVRLLESLDLTSAVGQLLNEAVQAQNNTYRTGISTLLFLVGAWSSAVEECLHLGVPISIIVSVMSEGLNFCSEEVVSLHVPVHNIFDCMDSTKTFSQLETFSVSLCPFLQVPSDTDLIEELHGLKDVASQTLTISNLSG

SEQ ID NO: 14511 - protein, 439 aa, Homo sapiens
MDSFGQPRPEDNQSVVRRMQKKYWKTKQVFIKATGKKEDEHLVASDAELDAKLEVFHSVQETCTELLKIIEKYQLRLNVISEEENELGLFLKFQAERDATQAGKMMDATGKALCSSAKQRLALCTPLSRLKQEVATFSQRAVSDTLMTINRMEQARTEYRGALLWMKDVSQELDPDTLKQMEKFRKVQMQVRNSKASFDKLKMDVCQKVDLLGASRCNMLSHSLTTYQRTLLGFWKKTARMMSQIHEACIGFHPYDFVALKQLQDTPSKISEDNKDEQIGGFLTEQLNKLVLSDEEASFESEQANKDHNEKHSQMREFGAPQFSNSENVAKDLPVDSLEGEDFEKEFSFLNNLLSSGSSSTSEFTQECQTAFGSPSASLTSQEPSMGSEPLAHSSRFLPSQLFDLGFHVAGAFNNNAAKKKKSCMYFFLQLNYFLKKNC

SEQ ID NO: 14512 - protein, 148 aa, Homo sapiens
MILLQHAVLPPPKQPSPSPPMSVATRSTGTLQLPPQKPFGQEASLPLAGEEELSKGGEQDCALEELCKPLYCKLCNVTLNSAQQAQAHYQGKNHGKKLRNYYAANSCPPPARMSNVVEPAATPVVPVPPQMGSFKPGGRVILATENDY

SEQ ID NO: 14513 - protein, 442 aa, Homo sapiens
MSNDGRSRNRDRRYDEVPSDLPYQDTTIRTHPTLHDSERAVSADPLPPPPLPLQPPFGPDFYSSDTEEPAIAPDLKPVRRFVPDSWKNFFRGKKKDPEWDKPVSDIRYISDGVECSPPASPARPNHRSPLNSCKDPYGGSEGTFSSRKEADAVFPRDPYGSLDRHTQTVRTYSEKVEEYNLRYSYMKSWAGLLRILGVVELLLGAGVFACVTAYIHKDSEWYNLFGYSQPYGMGGVGGLGSIALVCLKLWRHEAARRHREYMEQQEINEPSLSSKRKMCEMATSGDRQRDSEVNFKELRTAKMKPELLSGHIPPGHIPKPIVMPDYVAKYPVIQTDDERERYKAVFQDQFSEYKELSAEVQAVLRKFDELDAVMSRLPHHSESRQEHERISRIHEEFKKKKNDPTFLEKKERCDYLKNKLSHIKQRIQEYDKVMNWDVQGYS

SEQ ID NO: 14514 - protein, 462 aa, Homo sapiens
MQLPRWWELGDPCAWTGQGRGTRRMSPATTGTFLLTVYSIFSKVHSDRNVYPSAGVLFVHVLEREYFKGEFPPYPKPGEISNDPITFNTNLMGYPDRPGWLRYIQRTPYSDGVLYGSPTAENVGKPTIIEITAYNRRTFETARHNLIINIMSAEDFPLPYQAEFFIKNMNVEEMLASEVLGDFLGAVKNVWQPERLNAINITSALDRGGRVPLPINDLKEGVYVMVGADVPFSSCLREVENPQNQLRCSQEMEPVITCDKKFRTQFYIDWCKISLVDKTKQVSTYQEVIRGEGILPDGGEYKPPSDSLKSRDYYTDFLITLAVPSAVALVLFLILAYIMCCRREGVEKRNMQTPDIQLVHHSAIQKSTKELRDMSKNREIAWPLSTLPVFHPVTGEIIPPLHTDNYDSTNMPLMQTQQWSFAPVAQAGVQWSDLGSLQPPPPRNLPHQTQIPQQQTTGKWYP

SEQ ID NO: 14515 - protein, 340 aa, Homo sapiens
MLALTLRPPPLAKSHLKLGGTPAPARVNGKLVALKVIRLQEEEGTPFTAIREASLLKGLKHANIVLLHDIIHTKETLTLVFEYVHTDLCQYMDKHPGGLHPDNVKLFLFQLLRGLSYIHQRYILHRDLKPQNLLISDTGELKLADFGLARAKSVPSHTYSNEVVTLWYRPPDVLLGSTEYSTCLDMWGVGCIFVEMIQGVAAFPGMKDIQDQLERIFLVLGTPNEDTWPGVHSLPHFKPERFTLYSSKNLRQAWNKLSYVNHAEDLASKLLQCSPKNRLSAQAALSHEYFSDLPPRLWELTDMSSIFTVPNVRLQPEAGESMRAFGKNNSYGKSLSNSKH

SEQ ID NO: 14516 - protein, 788 aa, Homo sapiens
MNYIFGNNTLLYSRGSRGGNTSSSHGSAGPKQKHWAKKGSSDELQAEPEPSRWQQIVAFFTRRHSFIDCISVATSSTQANPPPVLVNTDSLETPTYVNGTDADYEYEEITLERGNSGLGFSIAGGTDNPHIGDDSSIFITKIITGGAAAQDGRLRVNDCILRVNEVDVRDVTHSKAVEALKEAGSIVRLYVKRRKPVSEKIMEIKLIKGPKGLGFSIAGGVGNQHIPGDNSIYVTKIIEGGAAHKDGKLQIGDKLLAVNNVCLEEVTHEEAVTALKNTSDFVYLKVAKPTSMYMNDGYAPPDITNSSSQPVDNHVSPSSFLGQTPASPARYSPVSKAVLGDDEITREPRKVVLHRGSTGLGFNIVGGEDGEGIFISFILAGGPADLSGELRKGDRIISVNSVDLRAASHEQAAAALKNAGQAVTIVAQYRPEEYSRFEAKIHDLREQMMNSSISSGSGSLRTSQKRSLYVRALFDYDKTKDSGLPSQGLNFKFGDILHVINASDDEWWQARQVTPDGESDEVGVIPSKRRVEKKERARLKTVKFNSKTRDKGEIPDDMGSKGLKHVTSNASDSESSYRGQEEYVLSYEPVNQQEVNYTRPVIILGPMKDRINDDLISEFPDKFGSCVPHTTRPKRDYEVDGRDYHFVTSREQMEKDIQEHKFIEAGQYNNHLYGTSVQSVREVAEKGKHCILDVSGNAIKRLQIAQLYPISIFIKPKSMENIMEMNKRLTEEQARKTFERAMKLEQEFTEHFTAIVQGDTLEDIYNQVKQIIEEQSGSYIWVPAKEKL

SEQ ID NO: 14517 - protein, 181 aa, Homo sapiens
MQVNFVSYVQLTSRALPSLTDSKGSLVVVSSLLGRVPTSFSTPYSAAKFALDGFFGSLRRELDVQDVNVAITMCVLGLRDRASAAEAVRSSTSRPRQPEHRGVPLQSQTAMFLPPTVPGARTLTETPLRGWPQPKMKSSRQKSKTEKNDGHLEPVTAWEVQVPRVRRLCRGLARPHLFGHD

SEQ ID NO: 14518 - protein, 1222 aa, Homo sapiens
EEENGREYKFDVSSELLEWIWHDNMQFLQDKNIFEHTYFGFMWQLCSCIPSTLPDPKAVSLMTAKLSTSFVLETFIHSKEKPTMLQWIELLTKQFNNSQAACEWFLDRMADDDWWPMQILIKCPNQIVRQMFQRLCIHVIQRLRPVHAHLYLQPGMEDGSDDMDTSVEDIGGRSCVTRFVRTLLLIMEHGVKPHSKHLTEYFAFLYEFAKMGEEESQFLLSLQAISTMVHFYMGTKGPENPQVEVLSEEEGEEEEEEEDILSLAEEKYRPAALEKMIALVALLVEQSRSERHLTLSQTDMAALTGGKGFPFLFQHIRDGINIRQTCNLIFSLCRYNNRLAEHIVSMLFTSIAKLTPEAANPFFKLLTMLMEFAGGPPGMPPFASYILQRIWEVIEYNPSQCLDWLAVQTPRNKLAHSWVLQNMENWVERFLLAHNYPRVRTSAAYLLVSLIPSNSFRQMFRSTRSLHIPTRDLPLSPDTTVVLHQVYNVLLGLLSRAKLYVDAAVHGTTKLVPYFSFMTYCLISKTEKLMFSTYFMDLWNLFQPKLSEPAIATNHNKQALLSFWYNVCADCPENIRLIVQNPVVTKNIAFNYILADHDDQDVVLFNRGMLPAYYGILRLCCEQSPAFTRQLASHQNIQWAFKNLTPHASQYPGAVEELFNLMQLFIAQRPDMREEELEDIKQFKKTTISCYLRCLDGRSCWTTLISAFRILLESDEDRLLVVFNRGLILMTESFNTLHMMYHEATACHVTGDLVELLSIFLSVLKSTRPYLQRKDVKQALIQWQERIEFAHKLLTLLNSYSPPELRNACIDVLKELVLLSPHDFLHTLVPFLQHNHCTYHHSNIPSVLVAYEGLPLHLALFPKLWTELCQTQSAMSKNCIKLLCEDPVFAEYIKCILMDERTFLNNNIVYTFMTHFLLKVQSQVFSEANCANLISTLITNLISQYQNLQSDFSNRVEISKASASLNGDLRALALLLSVHTPKQLNPALIPTLQELLSKCRTCLQQRNSLQEQEAKERKTKDDEGATPIKRRRVSSDEEHTVDSCISDMKTETREVLTPTSTSDNETRDSSIIDPGTEQDLPSPENSSVKEYRMEVPSSFSEDMSNIRSQHAEEQSNNGRYDDCKEFKDLHCSKDSTLAEEESEFPSTSISAVLSDLADLRSCDGQALPSQDPEVALSLSCGHSRGLFSHMQQHDILDTLCRTIESTIHVVTRISGKGNQAAS

SEQ ID NO: 14519 - protein, 581 aa, Homo sapiens
MPRRKRNAGSSSDGTEDSDFSTDLEHTDSSESDGTSRRSARVTRSSARLSQSSQDSSPVRNLQSFGTEEPAYSTRRVTRSQQQPTPVTPKKYPLRQTRSSGSETEQVVDFSDRETKNTADHDESPPRTPTGNAPSSESDIDISSPNVSHDESIAKDMSLKDSGSDLSHRPKRRRFHESYNFNMKCPTPGCNSLGHLTGKHERHFSISGCPLYHNLSADECKAPTERQLRYKEKVAELRKKRNSGLSKEQKEKYMEHRQTYGNTREPLLENLTSEYDLDLFRRAQARASEDLEKLRLQGQITEGSNMIKTIAFGRYELDTWYHSPYPEEYARLGRLYMCEFCLKYMKSQTILRRHMAKCVWKHPPGDEIYRKGSISVFEVDGKKNKIYCQNLCLLAKLFLDHKTLYYDVEPFLFYVMTEADNTGCHLIGYFSKEKNSFLNYNVSCILTMPQYMRQGYGKMLIDFSYLLSKVEEKVGSPERPLSDLGLISYRSYWKEVLLRYLHNFQGKEISIKEISQETAVNPVDIVSTLQALQMLKYWKGKHLVLKRQDLIDEWIAKEAKRSNSNKTMDPSCLKWTPPKGT

SEQ ID NO: 14520 - protein, 1998 aa, Homo sapiens
MANFLLPRGTSSFRRFTRESLAAIEKRMAEKQARGSTTLQESREGLPEEEAPRPQLDLQASKKLPDLYGNPPQELIGEPLEDLDPFYSTQKTFIVLNKGKTIFRFSATNALYVLSPFHPIRRAAVKILVHSLFNMLIMCTILTNCVFMAQHDPPPWTKYVEYTFTAIYTFESLVKILARGFCLHAFTFLRDPWNWLDFSVIIMAYVSENIKLGNLSALRTFRVLRALKTISVIPGLKTIVGALIQSVKKLADVMVLTVFCLSVFALIGLQLFMGNLRHKCVRNFTALNGTNGSVEADGLVWESLDLYLSDPENYLLKNGTSDVLLCGNSSDAGTCPEGYRCLKAGENPDHGYTSFDSFAWAFLALFRLMTQDCWERLYQQTLRSAGKIYMIFFMLVIFLGSFYLVNLILAVVAMAYEEQNQATIAETEEKEKRFQEAMEMLKKEHEALTIRGVDTVSRSSLEMSPLAPVNSHERRSKRRKRMSSGTEECGEDRLPKSDSEDGPRAMNHLSLTRGLSRTSMKPRSSRGSIFTFRRRDLGSEADFADDENSTAGESESHHTSLLVPWPLRRTSAQGQPSPGTSAPGHALHGKKNSTVDCNGVVSLLGAGDPEATSPGSHLLRPVMLEHPPDTTTPSEEPGGPQMLTSQAPCVDGFEEPGARQRALSAVSVLTSALEELEESRHKCPPCWNRLAQRYLIWECCPLWMSIKQGVKLVVMDPFTDLTITMCIVLNTLFMALEHYNMTSEFEEMLQVGNLVFTGIFTAEMTFKIIALDPYYYFQQGWNIFDSIIVILSLMELGLSRMSNLSVLRSFRLLRVFKLAKSWPTLNTLIKIIGNSVGALGNLTLVLAIIVFIFAVVGMQLFGKNYSELRDSDSGLLPRWHMMDFFHAFLIIFRILCGEWIETMWDCMEVSGQSLCLLVFLLVMVIGNLVVLNLFLALLLSSFSADNLTAPDEDREMNNLQLALARIQRGLRFVKRTTWDFCCGLLRQRPQKPAALAAQGQLPSCIATPYSPPPPETEKVPPTRKETRFEEGEQPGQGTPGDPEPVCVPIAVAESDTDDQEEDEENSLGTEEESSKQQESQPVSGGPEAPPDSRTWSQVSATASSEAEASASQADWRQQWKAEPQAPGCGETPEDSCSEGSTADMTNTAELLEQIPDLGQDVKDPEDCFTEGCVRRCPCCAVDTTQAPGKVWWRLRKTCYHIVEHSWFETFIIFMILLSSGALAFEDIYLEERKTIKVLLEYADKMFTYVFVLEMLLKWVAYGFKKYFTNAWCWLDFLIVDVSLVSLVANTLGFAEMGPIKSLRTLRALRPLRALSRFEGMRVVVNALVGAIPSIMNVLLVCLIFWLIFSIMGVNLFAGKFGRCINQTEGDLPLNYTIVNNKSQCESLNLTGELYWTKVKVNFDNVGAGYLALLQVYEEQPQWEYNLYMYIYFVIFIIFGSFFTLNLFIGVIIDNFNQQKKKLGGQDIFMTEEQKKYYNAMKKLGSKKPQKPIPRPLNKYQGFIFDIVTKQAFDVTIMFLICLNMVTMMVETDDQSPEKINILAKINLLFVAIFTGECIVKLAALRHYYFTNSWNIFDFVVVILSIVGTVLSDIIQKYFFSPTLFRVIRLARIGRILRLIRGAKGIRTLLFALMMSLPALFNIGLLLFLVMFIYSIFGMANFAYVKWEAGIDDMFNFQTFANSMLCLFQITTSAGWDGLLSPILNTGPPYCDPTLPNSNGSRGDCGSPAVGILFFTTYIIISFLIVVNMYIAIILENFSVATEESTEPLSEDDFDMFYEIWEKFDPEATQFIEYSVLSDFADALSEPLRIAKPNQISLINMDLPMVSGDRIHCMDILFAFTKRVLGESGEMDALKIQMEEKFMAANPSKISYEPITTTLRRKHEEVSAMVIQRAFRRHLLQRSLKHASFLFRQQAGSGLSEEDAPEREGLIAYVMSENFSRPLGPPSSSSISSTSFPPSYDSVTRATSDNLQVRGSDYSHSEDLADFPPSPDRDRESIV

SEQ ID NO: 14521 - protein, 438 aa, Homo sapiens
MGTIHLFRKPQRSFFGKLLREFRLVAADRRSWKILLFGVINLICTGFLLMWCSSTNSIALTAYTYLTIFDLFSLMTCLISYWVTLRKPSPVYSFGFERLEVLAVFASTVLAQLGALFILKESAERFLEQPEIHTGRLLVGTFVALCFNLFTMLSIRNKPFAYVSEAASTSWLQEHVADLSRSLCGIIPGLSSIFLPRMNPFVLIDLAGAFALCITYMLIEINNYFAVDTASAIAIALMTFGTMYPMSVYSGKVLLQTTPPHVIGQLDKLIREAGSVHVRIRRDANEQMVLAHVTNRLYTLVSTLTVQIFKDDWIRPALLSGPVAANVLNFSDHHVIPMPLLKGTDDLNPVTSTPAKPSSPPPEFSFNTPGKNVNPVILLNTQTRPYGFGLNHGHTPYSSMLNQGLGVPGIGATQGLRTGFTNIPSRYGTNNRIGQPRP

SEQ ID NO: 14522 - protein, 310 aa, Homo sapiens
GKEGPEARRRAAERGGGGGGGGVPAPRSPAREPRPRSCLLLPPPWGAAMTPDLLNFKKGWMSILDEPGEADELDGEIDLRSCTDVTEYAVQRNYGFQIHTKDAVYTLSAMTSGIRRNWIEALRKTVRPTSAPDVTKLSDSNKENALHSYSTQKGPLKAGEQRAGSEVISRGGPRKADGQRQALDYVELSPLTQASPQRARTPARTPDRLAKQEELERDLAQRSEERRKWFEATDSRTPEVPAGEGPRRGLGAPLTEDQQNRLSEEIEKKWQELEKLPLRENKRVPLTALLNQSRGERRGPPSDGHEALEK

SEQ ID NO: 14523 - protein, 1306 aa, Homo sapiens
MDSLPRLTSVLTLLFSGLWHLGLTATNYNCDDPLASLLSPMAFSSSSDLTGTHSPAQLNWRVGTGGWSPADSNAQQWLQMDLGNRVEITAVATQGRYGSSDWVTSYSLMFSDTGRNWKQYKQEDSIWTFAGNMNADSVVHHKLLHSVRARFVRFVPLEWNPSGKIGMRVEVYGCSYKSDVADFDGRSSLLYRFNQKLMSTLKDVISLKFKSMQGDGVLFHGEGQRGDHITLELQKGRLALHLNLGDSKARLSSSLPSATLGSLLDDQHWHSVLIERVGKQVNFTVDKHTQHFRTKGETDALDIDYELSFGGIPVPGKPGTFLKKNFHGCIENLYYNGVNIIDLAKRRKHQIYTGNVTFSCSEPQIVPITFVNSSGSYLLLPGTPQIDGLSVSFQFRTWNKDGLLLSTELSEGSGTLLLSLEGGILRLVIQKMTERVAEILTGSNLNDGLWHSVSINARRNRITLTLDDEAAPPAPDSTWVQIYSGNSYYFGGCPDNLTDSQCLNPIKAFQGCMRLIFIDNQPKDLISVQQGSLGNFSDLHIDLCSIKDRCLPNYCEHGGSCSQSWTTFYCNCSDTSYTGATCHNSIYEQSCEVYRHQGNTAGFFYIDSDGSGPLGPLQVYCNITEDKIWTSVQHNNTELTRVRGANPEKPYAMALDYGGSMEQLEAVIDGSEHCEQEVAYHCRRSRLLNTPDGTPFTWWIGRSNERHPYWGGSPPGVQQCECGLDESCLDIQHFCNCDADKDEWTNDTGFLSFKDHLPVTQIVITDTDRSNSEAAWRIGPLRCYGDRRFWNAVSFYTEASYLHFPTFHAEFSADISFFFKTTALSGVFLENLGIKDFIRLEISSPSEITFAIDVGNGPVELVVQSPSLLNDNQWHYVRAERNLKETSLQVDNLPRSTRETSEEGHFRLQLNSQLFVGGTSSRQKGFLGCIRSLHLNGQKMDLEERAKVTSGVRPGCPGHCSSYGSICHNGGKCVEKHNGYLCDCTNSPYEGPFCKKEVSAVFEAGTSVTYMFQEPYPVTKNISLSSSAIYTDSAPSKENIALSFVTTQAPSLLLFINSSSQDFVVVLLCKNGSLQVRYHLNKEETHVFTIDADNFANRRMHHLKINREGRELTIQMDQQLRLSYNFSPEVEFRVIRSLTLGKVTENLGLDSEVAKANAMGFAGCMSSVQYNHIAPLKAALRHATVAPVTVHGTLTESSCGFMVDSDVNAVTTVHSSSDPFGKTDEREPLTNAVRSDSAVIGGVIAVVIFIIFCIIGIMTRFLYQHKQSHRTSQMKEKEYPENLDSSFRNEIDLQNTVSECKREYFI

SEQ ID NO: 14524 - protein, 570 aa, Homo sapiens
MAGKLRKSHIPGVSIWQLVEEIPEGCSTPDFEQKPVTSALPEGKNAVFRAVVCGEPRPEVRWQNSKGDLSDSSKYKISSSPGSKEHVLQINKLTGEDTDLYRCTAVNAYGEAACSVRLTVIEVGFRKNRKRHREPQEDLRKELMDFRKLLKKRAPPAPKKKMDLEQIWQLLMTADRKDYEKICLKYGIVDYRGMLRRLQEMKKEQEDKMAQYINTISSLRHIRVTKDGNAKFDLELDLKDSQSKIYLYKDGEMIPYGFNNQTKHCLRRLGKRYEFQIQDLRPEDSGIYQVKVEDAVVFSTELEASAIPPRVVVPLAETHCEEQGDAVFECTLSSPCPSAAWHFRHRLLHPSDKYEVYVSPDGLTHRLVVRGARFSDMGPYSLGTGLYTSSAWLVVEAGKDKDLQSTSADHKLQSRRSGKDGRLDIYGERRDATRSSTSRYKPGTGSFSKDAQGPMGHFSQGLADMEVQPGEAATLSCTLTSDLGPGTWFKDGVKLTTQDGVIFKQDGLVHSLFITHVQGTQAGRYTFVAGDQQSEATLTVQDSPTIAPDVTEKLREPLVVKAGKPIQTYH

SEQ ID NO: 14525 - protein, 527 aa, Homo sapiens
MGSLKEELLKAIWHAFTALDQDHSGKVSKSQLKVLSHNLCTVLKVPHDPVALEEHFRDDDEGPVSNQGYMPYLNRFILEKIEYLLKKLTEAMGGGWQQEQFEHYKINFDDSKNGLSAWELIELIGNGQFSKGMDRQTVSMAINEVFNELILDVLKQGYMMKKGHRRKNWTERWFVLKPNIISYYVSEDLKDKKGDILLDENCCVESLPDKDGKKCLFLVKCFDKTFEISASDKKKKQEWIQAIHSTIHLLKLGSPPPHKEARQRRKELRKKQLAEQEELERQMKELQAANESKQQELEAVRKKLEEAASRAAEEEKKRLQTQVELQARFSTELEREKLIRQQMEEQVAQKSSELEQYLQRVRELEDMYLKLQEALEDERQARQDEETVRKLQARLLEEESSKRAELEKWHLEQQQAIQTTEAEKQELENQRVLKEQALQEAMEQLEQLELERKQALEQYEEVKKKLEMATNKTKSWKDKVAHHEGLIRLIEPGSKNPHLITNWGPAAFTEAELEEREKNWKEKKTTE

SEQ ID NO: 14526 - protein, 94 aa, Homo sapiens
AMGDKATVVGGQAEAPDSVAMSSWERRLHRAKCAPSYLFSCFNGGECVHPAFCDCRRFNATGPRCQMVYNAGPERDSICRAWGQHHVETFDGLY

SEQ ID NO: 14527 - protein, 573 aa, Homo sapiens
MAATEISVLSEQFTKIKELELMPEKGLKEEEKDGVCREKDHRSPSELEAERTSGAFQDSVLEEEVELVLAPSEESEKYILTLQTVHFTSEAVELQDMSLLSIQQQEGVQVVVQQPGPGLLWLEEGPRQSLQQCVAISIQQELYSPQEMEVLQFHALEENVMVASEDSKLAVSLAETTGLIKLEEEQEKNQLLAERTKEQLFFVETMSGDERSDEIVLTVSNSNVEEQEDQPTAGQADAEKAKSTKNQRKTKGAKGTFHCDVCMFTSSRMSSFNRHMKTHTSEKPHLCHLCLKTFRTVTLLRNHVNTHTGTRPYKCNDCNMAFVTSGELVRHRRYKHTHEKPFKCSMCKYASVEASKLKRHVRSHTGERPFQCCQCSYASRDTYKLKRHMRTHSGEKPYECHICHTRFTQSGTMKIHILQKHGENVPKYQCPHCATIIARKSDLRVHMRNLHAYSAAELKCRYCSAVFHERYALIQHQKTHKNEKRFKCKHCSYACKQERHMTAHIRTHTGEKPFTCLSCNKCFRQKQLLNAHFRKYHDANFIPTVYKCSKCGKGFSRWITSKWSGLKPQTFIT

SEQ ID NO: 14528 - protein, 309 aa, Homo sapiens
MKRENFTLITDFVFQGFSSFHEQQITLFGVFLALYILTLAGNIIIVTIIRMDLHLHTPMYFFLSMLSTSETVYTLVILPRMLSSLVGMSQPISLAGCATQMFFFVTFGITNCFLLTAMGYDRYVAICNPLRYMVIMNKRLRIQLVLGACSIGLIVAITQVTSVFRLPFCARKVPHFFCDIRPVMKLSCIDTTVNEILTLIISVLVLVVPMGLVFISYVLIISTILKIASVEGRKKAFATCASHLTVVIVHYSCASIAYLKPKSENTREHDQLISVTYTVITPLLNPVVYTLRNKEVKDALCRAVGGKFS

SEQ ID NO: 14529 - protein, 296 aa, Homo sapiens
MPPAVGGPVGYTPPDGGWGWAVVIGAFISIGFSYAFPKSITVFFKEIEGIFHATTSEVSWISSIMLAVMYGGGPISSILVNKYGSRIVMIVGGCLSGCGLIAASFCNTVQQLYVCIGVIGGLGLAFNLNPALTMIGKYFYKRRPLANGLAMAGSPVFLCTLAPLNQVFFGIFGWRGSFLILGGLLLNCCVAGALMRPIGPKPTKAGKDKSKASLEKAGKSGVKKDLHDANTDLIGRHPKQEKRSVFQTINQFLDLTLFTHRGFLLYLSGNVIMFFGLFAPLVFLSSYGKSQHYSSE

SEQ ID NO: 14530 - protein, 152 aa, Homo sapiens
SEEDRSAGSVESPSVSSTHRVSDPKFHPLHSKIIIIKKGHAKDSQRYKVDYESQSTDTQNFSSESKRETEYGPCRREMEDTLNHLKFLNVLSPRGVHIPNCDKKGFYKKKQCRPSKGRKRGFCWCVDKYGQPLPGYTTKGKEDVHCYSMQSK

SEQ ID NO: 14531 - protein, 254 aa, Homo sapiens
MEFLRNNRTTEVPRLDSMKPLEKHYSVVLPTVSHSGFLYKTASAGKLLQDRRAREEFSRRWCVLGDGVLSYFENERAVTPNGEIRASEIVCLAVPPPDTHGFEHTFEVYTEGERLYLFGLESAEQAHEWVKCIAKAFVPPLAEDLLARDFERLGRLPYKAGLSLQRAQEGWFSLSGSELRAVFPEGPCEEPLQLRKLQELSIQGDSENQVLVLVERRRTLYIQGERRLDFMGWLGAIQKAAASMGDTLSEQQLG

SEQ ID NO: 14532 - protein, 289 aa, Homo sapiens
GDPDIDWEESVCLNLILQKKKSQQVFASPSKHPMDSKGEESKISYPNIFFMIDSFEEVFSDMTVGEGEMVCVELVASDKTNTFQGVIFQGSIRYEALKKVYDNRVSVAARMAQKMSFGFYKYSNMEFVRMKGPQGKGHAEMAVSRVSTGDTSPCGTEEDSSPASPMHERVTSFSTPPTPERNNRPAFFSPSLKRKVPRNRIAEMKKSHSANDSEEFFREDDGGADLHNATNLRSRSLSGTGRSLVGSWLKLNRADGNFLLYAHLTYVTLPLHRILTDILEVRQKPILMT

SEQ ID NO: 14533 - protein, 1047 aa, Homo sapiens
MDAAGRGCHLLPLPAARGPARAPAAAAAAAASPPGPCSGAACAPSAAAGAGAMNPSSSAGEEKGATGGSSSSGSGAGSCCLGAEGGADPRGAGSAAAAGAAALDEPAAAGQKEKDEALEEKLRNLTFRKQVSYRKAISRAGLQHLAPAHPLSLPVANGPAKEPRATLDWSENAVNGEHLWLETNVSGDLCYLGEENCQVRFAKSALRRKCAVCKIVVHTACIEQLEKINFRCKPTFREGGSRSPRENFVRHHWVHRRRQEGKCKQCGKGFQQKFSFHSKEIVAISCSWCKQAFHNKVTCFMLHHIEEPCSLGAHAAVIVPPTWIIKVKKPQNSLKASNRKKKRTSFKRKASKRGMEQENKGRPFVIKPISSPLMKPLLVFVNPKSGGNQGTKVLQMFMWYLNPRQVFDLSQEGPKDALELYRKVPNLRILACGGDGTVGWILSILDELQLSPQPPVGVLPLGTGNDLARTLNWGGGYTDEPVSKILCQVEDGTVVQLDRWNLHVERNPDLPPEELEDGVCKLPLNVFNNYFSLGFDAHVTLEFHESREANPEKFNSRFRNKMFYAGAAFSDFLQRSSRDLSKHVKVVCDGTDLTPKIQELKFQCIVFLNIPRYCAGTMPWGNPGDHHDFEPQRHDDGYIEVIGFTMASLAALQVGGHGERLHQCREVMLLTYKSIPMQVDGEPCRLAPAMIRISLRNQANMVQKSKRRTSMPLLNDPQSVPDRLRIRVNKISLQDYEGFHYDKEKLREASIPLGILVVRGDCDLETCRMYIDRLQEDLQSVSSGSQRVHYQDHETSFPRALSAQRLSPRWCFLDDRSQEHLHFVMEISQDEIFILDPDMVVSQPAGTPPGMPDLVVEQASGISDWWNPALRKRMLSDSGLGMIAPYYEDSDLKDLSHSRVLQSPVSSEDHAILQAVIAGDLMKLIESYKNGGSLLIQGPDHCSLLHYAAKTGNGEIVKYILDHGPSELLDMADSETGETALHKAACQRNRAVCQLLVDAGASLRKTDSKGKTPQERAQQAGDPDLAAYLESRQNYKVIGHEDLETAV

SEQ ID NO: 14534 - protein, 1235 aa, Homo sapiens
MHLAERDRWLFVATVMMHFVSIKSGFPGLCVGVRSTMSSVAVLTQESFAEHRSGLVPQQIKVATLNSEEESDPPTYKDAFPPLPEKAACLESAQEPAGAWGNKIRPIKASVITQVFHVPLEERKYKDMNQFGEGEQAKICLEIMQRTGAHLELSLAKDQGLSIMVSGKLDAVMKARKDIVARLQTQASATVAIPKEHHRFVIGKNGEKLQDLELKTATKIQIPRPDDPSNQIKITGTKEGIEKARHEVLLISAEQDKRAVERLEVEKAFHPFIAGPYNRLVGEIMQETGTRINIPPPSVNRTEIVFTGEKEQLAQAVARIKKIYEEKANSFTVSSVAAPSWLHRFIIGKKGQNLAKITQQMPKVHIEFTEGEDKITLEGPTEDVNVAQEQIEGMVKDLINRMDYVEINIDHKFHRHLIGKSGANINRIKDQYKVSVRIPPDSEKSNLIRIEGDPQGVQQAKRELLELASRMENERTKDLIIEQRFHRTIIGQKGERIREIRDKFPEVIINFPDPAQKSDIVQLRGPKNEVEKCTKYMQKMVADLVENSYSISVPIFKQFHKNIIGKGGANIKKIREESNTKIDLPAENSNSETIIITGKRANCEAARSRILSIQKDLANIAEVEVSIPAKLHNSLIGTKGRLIRSIMEECGGVHIHFPVEGSGSDTVVIRGPSSDVEKAKKQLLHLAEEKQTKSFTVDIRAKPEYHKFLIGKGGGKIRKVRDSTGARVIFPAAEDKDQDLITIIGKEDAVREAQKELEALIQNLDNVVEDSMLVDPKHHRHFVIRRGQVLREIAEEYGGVMVSFPRSGTQSDKVTLKGAKDCVEAAKKRIQEIIEDLEAQVTLECAIPQKFHRSVMGPKGSRIQQITRDFSVQIKFPDREENAVHSTEPVVQENGDEAGEGREAKDCDPGSPRRCDIIIISGRKEKCEAAKEALEALVPVTIEVEVPFDLHRYVIGQKGSGIRKMMDEFEVNIHVPAPELQSDIIAITGLAANLDRAKAGLLERVKELQAEQEDRALRSFKLSVTVDPKYHPKIIGRKGAVITQIRLEHDVNIQFPDKDDGNQPQDQITITGYEKNTEAARDAILRIVGELEQMVSEDVPLDHRVHARIIGARGKAIRKIMDEFKVDIRFPQSGAPDPNCVTVTGLPENVEEAIDHILNLEEEYLADVVDSEALQVYMKPPAHEEAKAPSRGFVVRDAPWTASSSEKAPDMSSSEEFPSFGAQVAPKTLPWGPKR

SEQ ID NO: 14535 - protein, 840 aa, Homo sapiens
MACRWSTKESPRWRSALLLLFLAGVYACGETPEQIRAPSGIITSPGWPSEYPAKINCSWFIRANPGEIITISFQDFDIQGSRRCNLDWLTIETYKNIESYRACGSTIPPPYISSQDHIWIRFHSDDNISRKGFRLAYFSGKSEEPNCACDQFRCGNGKCIPEAWKCNNMDECGDSSDEEICAKEANPPTAAAFQPCAYNQFQCLSRFTKVYTCLPESLKCDGNIDCLDLGDEIDCDVPTCGQWLKYFYGTFNSPNYPDFYPPGSNCTWLIDTGDHRKVILRFTDFKLDGTGYGDYVKIYDGLEENPHKLLRVLTAFDSHAPLTVVSSSGQIRVHFCADKVNAARGFNATYQVDGFCLPWEIPCGGNWGCYTEQQRCDGYWHCPNGRDETNCTMCQKEEFPCSRNGVCYPRSDRCNYQNHCPNGSDEKNCFFCQPGNFHCKNNRCVFESWVCDSQDDCGDGSDEENCPVIVPTRVITAAVIGSLICGLLLVIALGCTCKLYSLRMFERRSFETQLSRVEAELLRREAPPSYGQLIAQGLIPPVEDFPVCSPNQASVLENLRLAVRSQLGFTSVRLPMAGRSSNIWNRIFNFARSRHSGSLALVSADGDEVVPSQSTSREPERNHTHRSLFSVESDDTDTENERRDMAGASGGVAAPLPQKVPPTTAVEATVGACASSSTQSTRGGHADNGRDVTSVEPPSVSPARHQLTSALSRMTQGLRWVRFTLGRSSSLSQNQSPLRQLDNGVSGREDDDDVEMLIPISDGSSDFDVNDCSRPLLDLASDQGQGLRQPYNATNPGVRPSNRDGPCERCGIVHTAQIPDTCLEVTLKNETSDDEALLLC

SEQ ID NO: 14536 - protein, 729 aa, Homo sapiens
MNINDGGRRRFEDNEHTLRIYPGAISEGTIYCPIPARKNSTAAEVIESLINKLHLDKTKCYVLAEVKEFGGEEWILNPTDCPVQRMMLWPRMALENRLSGEDYRFLLREKNLDGSIHYGSLQSWLRVTEERRRMMERGFLPQPQQKDFDDLCSLPDLNEKTLLENLRNRFKHEKIYTYVGSILIVINPFKFLPIYNPKYVKMYDNHQLGKLEPHIYAVADVAYHAMLQRKKNQCIVISGESGSGKTQSTNFLIHHLTALSQKGFASGVEQIILGAGPVLEAFGNAKTAHNNNSSRFGKFIQVNYQETGTVLGAYVEKYLLEKSRLVYQEHNERNYHVFYYLLAGASEDERSAFHLKQPEEYHYLNQITKKPLRQSWDDYCYDSEPDCFTVEGEDLRHDFERLQLAMEMVGFLPKTRRQIFSLLSAILHLGNICYKKKTYRDDSIDICNPEVLPIVSELLEVKEEMLFEALVTRKTVTVGEKLILPYKLAEAVTVRNSMAKSLYSALFDWIVFRINHALLNSKDLEHNTKTLSIGVLDIFGFEDYENNSFEQFCINFANERLQHYFNQHIFKLEQEEYRTEGISWHNIDYIDNTCCINLISKKPTGLLHLLDEESNFPQATNQTLLDKFKHQHEDNSYIEFPAVMEPAFIIKHYAGKVKYGVKDFREKNTDHMRPDIVALLRSSKNAFISGMIGIDPVAVFRWAILRAFFRAMVAFREAGKRNIHRKTGK

SEQ ID NO: 14537 - protein, 423 aa, Homo sapiens
LRAWRALGGIRWGRRPRLTPDLRALLTSGTSDPRARVTYGTPSLWARLSVGVTEPRACLTSGTPGPRAQLTAVTPDTRTREASENSGTRSRAWLAVALGAGGAVLLLLWGGGRGPPAVLAAVPSPPPASPRSQYNFIADVVEKTAPAVVYIEILDRHPFLGREVPISNGSGFVVAADGLIVTNAHVVADRRRVRVRLLSGDTYEAVVTAVDPVADIATLRIQTKEPLPTLPLGRSADVRQGEFVVAMGSPFALQNTITSGIVSSAQRPARDLGLPQTNVEYIQTDAAIDFGNSGGPLVNLARELGAVSLQDGEVIGVNTMKVTAGISFAIPSDRLREFLHRGEKKNSSSGISGSQRRYIGVMMLTLSPRAGLRPGDVILAIGEQMVQNAEDVYEAVRTQSQLAVQIRRGRETLTLYVTPEVTE

SEQ ID NO: 14538 - protein, 362 aa, Homo sapiens
MLVMAPRTVLLLLSAALALTETWAGSHSMRYFYTSVSRPGRGEPRFISVGYVDDTQFVRFDSDAASPREEPRAPWIEQEGPEYWDRNTQIYKAQAQTDRESLRNLRGYYNQSEAGSHTLQSMYGCDVGPDGRLLRGHDQYAYDGKDYIALNEDLRSWTAADTAAQITQRKWEAAREAEQRRAYLEGECVEWLRRYLENGKDKLERADPPKTHVTHHPISDHEATLRCWALGFYPAEITLTWQRDGEDQTQDTELVETRPAGDRTFQKWAAVVVPSGEEQRYTCHVQHEGLPKPLTLRWEPSSQSTVPIVGIVAGLAVLAVVVIGAVVAAVMCRRKSSGGKGGSYSQAACSDSAQGSDVSLTA

SEQ ID NO: 14539 - protein, 198 aa, Homo sapiens
MSWIKEGELSLWERFCANIIKAGPMPKHIAFIMDGNRRYAKKCQVERQEGHSQGFNKLAETLRWCLNLGILEVTVYAFSIENFKRSKSEVDGLMDLARQKFSRLMEEKEKLQKHGVCIRVLGDLHLLPLDLQELIAQAVQATKNYNKCFLNVCFAYTSRHEISNAVREMAWGVEQGLLDPSRDRFHHIGQASLELLTS

SEQ ID NO: 14540 - protein, 387 aa, Homo sapiens
MNASEFRRRGKEMVDYMANYMEGIEGRQVYPDVEPGYLRPLIPAAAPQEPDTFEDIINDVEKIIMPGVTHWHSPYFFAYFPTASSYPAMLADMLCGAIGCIGFSWAASPACTELETVMMDWLGKMLELPKAFLNEKAGEGGGVIQMVATLGTTTCCSFDNLLEVGPICNKEDIWLHVDAAYAGSAFICPEFRHLLNGVEFADSFNFNPHKWLLVNFDCSAMWVKKRTDLTGAFRLDPTYLKHSHQDSGLITDYRHWQIPLGRRFRSLKMWFVFRMYGVKGLQAYIRKHVQLSHEFESLVRQDPRFEICVEVILGLVCFRLKGSNKVNEALLQRINSAKKIHLVPCHLRDKFVLRFAICSRTVESAHVQRAWEHIKELAADVLRAERE

SEQ ID NO: 14541 - protein, 959 aa, Homo sapiens
METESEQNSNSTNGSSSSGGSSRPQIAQMSLYERQAVQATIAASRQASSPNTSTTQQQTTTTQASINLATTSAAQLISRSQSVSSPSATTLTQSVLLGNTTSPPLNQSQAQMYLRVNRTLGRNVPLASQLILMPNGAVAAVQQEVPSAQSPGVHADADQVQNLAVRNQQASAQGPQMQGSTQKAIPPGASPVSSLSQASSQALAVAQASSGATNQSLNLSQAGGGSGNSIPGSMGPGGGGQAHGGLGQLPSSGMGGGSCPRKGTGVVQPLPAAQTVTVSQGSQTEAESAAAKKAEADGSGQQNVGMNLTRTATPAPSQTLISSATYTQIQPHSLIQQQQQIHLQQKQVVIQQQIAIHHQQQFQHRQSQLLHTATHLQLAQQQQQQQQQQQQQQQPQATTLTAPQPPQVPPTQQVPPSQSQQQAQTLVVQPMLQSSPLSLPPDAAPKPPIPIQSKPPVAPIKPPQLGAAKMSAAQQPPPHIPVQVVGTRQPGTAQAQALGLAQLAAAVPTSRGMPGTVQSGQAHLASSPPSSQAPGALQECPPTLAPGMTLAPVQGTAHVVKGGATTSSPVVAQVPAAFYMQSVHLPGKPQTLAVKRKADSEEERDDVSTLGSMLPAKASPVAESPKVMDEKSSLGEKAESVANVNANTPSSELVALTPAPSVPPPTLAMVSRQMGDSKPPQAIVKPQILTHIIEGFVIQEGAEPFPVGCSQLLKESEKPLQTGLPTGLTENQSGGPLGVDSPSAELDKKANLLKCEYCGKYAPAEQFRGSKRFCSMTCAKRYNVSCSHQFRLKRKKMKEFQEANYARVRRRGPRRSSSDIARAKIQGKCHRGQEDSSRGSDNSSYDEALSPTSPGPLSVRAGHGERDLGNPNTAPPTPELHGINPVFLSSNPSRWSVEEVYEFIASLQGCQEIAEEFRSQEIDGQALLLLKEEHLMSAMNIKLGPALKICAKINVLKET

SEQ ID NO: 14542 - protein, 203 aa, Homo sapiens
GKITDTETMVGIRFENESRRGYQLEPDLSEEVSARLRLGSGSNGLLRRKVSIIETKEKNCSGKERDRRTDDLLELTEVINFYMNLLVERNKKQGYPALHVFSTFFYPKLKSGGYQAVKRWTKGVNLFEQEIILVPIHRKVHWSLVVIDLRKKCLKYLDSMGQKGHRICEILLQYLQDESKTKRNSDLNLLEWTHHSMKPHEIP

SEQ ID NO: 14543 - protein, 584 aa, Homo sapiens
MRIGTPTAGPGPSAVMEGCLGVAELRKLSTFSAYLEDHSYNVEQIWRDIEDVIIKTLISAHPIIRHNYHTCFPNHTLNSACFEILGFDILLDHKLKPWLLEVNHSPSFSTDSRLDKEVKDGLLYDTLVLINLESCDKKKVLEEERQRGQFLQQCCSREMRIEEAKGFRAVQLKKTETYEKENCGGFRLIYPSLNSEKYEKFFQDNNSLFQNTVASRAREEYARQLIQELRLKREKKPFQMKKKVEMQGESAGEQVRKKGMRGWQQKQQQKDKAATQASKQYIQPLTLVSYTPDLLLSVRGERKNETDSSLNQEAPTEEASSVFPKLTSAKPFSSLPDLRNINLSSSKLEPSKPNFSIKEAKSASAVNVFTGTVHLTSVETTPESTTQLSISPKSPPTLAVTASSEYSGPETDRVVSFKCKKQQTPPHLTQKKMLKSFLPTKSKSFWESPNTNWTLLKSDMNKPHLISELLTKLQLSGKLSFFPAHYNPKLGMNNLSQNPSLPGECHSRSDSSGEKRQLDVSSLLLQSPQSYNVTLRDLLVIATPAQLDPRPCRSHASAMRDPCMQDQEAYSHCLISGQKGCERS

SEQ ID NO: 14544 - protein, 313 aa, Homo sapiens
MEPERCRIQTEFNQLRNILDRVEQRELKKLEQEEKKGLRIIEEAENDLVHQTQSLRELISDLERRCQGSTMELLQDVSDVTERSEFWTLRKPEALPTKLRSMFRAPDLKRMLRVCRELTDVQSYWVDVTLNPHTANLNLVLAKNRRQVRFVGAKVSGPSCLEKHYDCSVLGSQHFSSGKHYWEVDVAKKTAWILGVCSNSLGPTFSFNHFAQNHSAYSRYQPQSGYWVIGLQHNHEYRAYEDSSPSLLLSMTVPPRRVGVFLDYEAGTVSFYNVTNHGFPIYTFSKYYFPTTLCPYFNPCNCVIPMTLRRPSS

SEQ ID NO: 14545 - protein, 450 aa, Homo sapiens
MALPSRILLWKLVLLQSSAVLLHSGSSVPAAAGSSVVSESAVSWEAGARAVLRCQSPRMVWTQDRLHDRQRVLHWDLRGPGGGPARRLLDLYSAGEQRVYEARDRGRLELSASAFDDGNFSLLIRAVEETDAGLYTCNLHHHYCHLYESLAVRLEVTDGPPATPAYWDGEKEVLAVARGAPALLTCVNRGHVWTDRHVEEAQQVVHWDRQPPGVPHDRADRLLDLYASGERRAYGPLFLRDRVAVGADAFERGDFSLRIEPLEVADEGTYSCHLHHHYCGLHERRVFHLTVAEPHAEPPPRGSPGNGSSHSGAPGPDPTLARGHNVINVIVPESRAHFFQQLGYVLATLLLFILLLVTVLLAARRRRGGYEYSDQKSGKSKGKDVNLAEFAVAAGDQMLYRSEDIQLASSPPTDYKNNILKERAELAHSPLPAKYIDLDKDPSGLCPLGA

SEQ ID NO: 14546 - protein, 1704 aa, Homo sapiens
MAKPTSKDSGLKEKFKILLGLGTPRPNPRSAEGKQTEFIITAEILRELSMECGLNNRIRMIGQICEVAKTKKFEEGERLGVLRALFFKVIKDYPSNEDLHERLEVFKALTDNGRHITYLEEELADFVLQWMDVGLSSEFLLVLVNLVKFNSCYLDEYIARMVQMICLLCVRTASSVDIEVSLQVLDAVVCYNCLPAESLPLFIVTLCRTINVKELCEPCWKLMRNLLGTHLGHSAIYNMCHLMEDRAYMEDAPLLRGAVFFVGMALWGAHRLYSLRNSPTSVLPSFYQAMACPNEVVSYEIVLSITRLIKKYRKELQVVAWDILLNIIERLLQQLQTLDSPELRTIVHDLLTTVEELCDQNEFHGSQERYFELVERCADQRPESSLLNLISYRAQSIHPAKDGWIQNLQALMERFFRSESRGAVRIKVLDVLSFVLLINRQFYEEELINSVVISQLSHIPEDKDHQVRKLATQLLVDLAEGCHTHHFNSLLDIIEKVMARSLSPPPELEERDVAAYSASLEDVKTAVLGLLVILQTKLYTLPASHATRVYEMLVSHIQLHYKHSYTLPIASSIRLQAFDFLLLLRADSLHRLGLPNKDGVVRFSPYCVCDYMEPERGSEKKTSGPLSPPTGPPGPAPAGPAVRLGSVPYSLLFRVLLQCLKQESDWKVLKLVLGRLPESLRYKVLIFTSPCSVDQLCSALCSMLSGPKTLERLRGAPEGFSRTDLHLAVVPVLTALISYHNYLDKTKQREMVYCLEQGLIHRCASQCVVALSICSVEMPDIIIKALPVLVVKLTHISATASMAVPLLEFLSTLARLPHLYRNFAAEQYASVFAISLPYTNPSKFNQYIVCLAHHVIAMWFIRCRLPFRKDFVPFITKGLRSNVLLSFDDTPEKDSFRARSTSLNERPKSRIQTSLTSASLGSADENSVAQADDSLKNLHLELTETCLDMMARYVFSNFTAVPKRSPVGEFLLAGGRTKTWLVGNKLVTVTTSVGTGTRSLLGLDSGELQSGPESSSSPGVHVRQTKEAPAKLESQAGQQVSRGARDRVRSMSGGHGLRVGALDVPASQFLGSATSPGPRTAPAAKPEKASAGTRVPVQEKTNLAAYVPLLTQGWAEILVRRPTGNTSWLMSLENPLSPFSSDINNMPLQELSNALMAAERFKEHRDTALYKSLSVPAASTAKPPPLPRSNTDSAVVMEEGSPGEVPVLVEPPGLEDVEAALGMDRRTDAYSRSSSVSSQEEKSLHAEELVGRGIPIERVVSSEGGRPSVDLSFQPSQPLSKSSSSPELQTLQDILGDPGDKADVGRLSPEVKARSQSGTLDGESAAWSASGEDSRGQPEGPLPSSSPRSPSGLRPRGYTISDSAPSRRGKRVERDALKSRATASNAEKVPGINPSFVFLQLYHSPFFGDESNKPILLPNESQSFERSVQLLDQIPSYDTHKIAVLYVGEGQSNSELAILSNEHGSYRYTEFLTGLGRLIELKDCQPDKVYLGGLDVCGEDGQFTYCWHDDIMQAVFHIATLMPTKDVDKHRCDKKRHLGNDFVSIVYNDSGEDFKLGTIKGQFNFVHVIVTPLDYECNLVSLQCRKDMEGLVDTSVAKIVSDRNLPFVARQMALHANMASQVHHSRSNPTDIYPSKWIARLRHIKRLRQRICEEAAYSNPSLPLVHPPSHSKAPAQTPAEPTPGYEVGQRKRLISSVEDFTEFV

SEQ ID NO: 14547 - protein, 116 aa, Homo sapiens
MQWLRVRESPGEATGHRVTMGTAALGPVWAALLLFLLMCEIPMVELTFDRAVASGCQRCCDSEDPLDPAHVSSASSSGRPHALPEIRPYINITILKGRGRTRFPSRLWWLTAVTRP

SEQ ID NO: 14548 - protein, 165 aa, Homo sapiens
MLPKRRRARVGSPSGDAASSTPPSTRFPGVAIYLVEPRMGRSRRAFLTGLARSKGFRVLDACSSEATHVVMEETSAEEAVSWQERRMAAAPPGCTPPALLDISWLTESLGAGQPVPVECRHRLEVAGPRKGPLSPAWMPAYACQRPTPLTHHNTGLSGPSLQEAL

SEQ ID NO: 14549 - protein, 629 aa, Homo sapiens
MEFSIKQSPLSVQSVVKCIKMKQAPEILGSANGKTPSCEVNRECSVFLSKAQLSSSLQEGVMQKFNGHDALPFIPADKLKDLTSRVFNGEPGAHDAKLRFESQEMKGIGTPPNTTPIKNGSPEIKLKITKTYMNGKPLFESSICGDSAADVSQSEENGQKPENKARRNRKRSIKYDSLLEQGLVEAALVSKISSPSDKKIPAKKESCPNTGRDKDHLLKYNVGDLVWSKVSGYPWWPCMVSADPLLHSYTKLKGQKKSARQYHVQFFGDAPERAWIFEKSLVAFEGEGQFEKLCQESAKQAPTKAEKIKLLKPISGKLRAQWEMGIVQAEEAASMSVEERKAKFTFLYVGDQLHLNPQVAKEAGIAAESLGEMAESSGVSEEAAENPKSVREECIPMKRRRRAKLCSSAETLESHPDIGKSTPQKTAEADPRRGVGSPPGRKKTTVSMPRSRKGDAASQFLVFCQKHRDEVVAEHPDASGEEIEELLRSQWSLLSEKQRARYNTKFALVAPVQAEEDSGNVNGKKRNHTKRIQDPTEDAEAEDTPRKRLRTDKHSLRKRDTITDKTARTSSYKAMEAASSLKSQAATKNLSDACKPLKKRNRASTAASSALGFSKSSSPSASLTENEVK

SEQ ID NO: 14550 - protein, 672 aa, Homo sapiens
MANEEDDPVVQEIKPKQQKVELEMAIDTLNPNYCRSKGEQIALNVDGACADETSTYSSKLMDKQTFCSSQTTSNTSRYAAALYRQGELHLTPLHGILQLRPSFSYLDKADAKHREREAANEAGDSSQDEAEDDVKQITVRFSRPESEQARQRRVQSYEFLQKKHAEEPWVHLHYYGLRDSRSEHERQYLLCPGSSGVENTELVKSPSEYLMMLMPPSQEEEKDKPVAPSNVLSMAQLRTLPLADQIKILMKNVKVMPFANLMSLLGPSIDSVAVLRGIQKVAMLVQGNWVVKSDILYPKDSSSPHSGVPAEVLCRGRDFVMWKFTQSRWVVRKEVATVTKLCAEDVKDFLEHMAVVRINKGWEFILPYDGEFIKKHPDVVQRQHMLWTGIQAKLEKVYNLVKETMPKKPDAQSGPAGLVCGDQRIQVAKTKAQQNHALLERELQRRKEQLRVPAVPPGVRIKEEPVSEEGEEDEEQEAEEEPMDTSPSGLHSKLANGLPLGRAAGTDSFNGHPPQGCASTPVARELKAFVEATFQRQFVLTLSELKRLFNLHLASLPPGHTLFSGISDRMLQDTVLAAGCKQILVPFPPQTAASPDEQKVFALWESGDMSDQHRQVLLEIFSKNYRVRRNMIQSRLTQECGEDLSKQEVDKVLKDCCVSYGGMWYLKGTVQS

SEQ ID NO: 14551 - protein, 284 aa, Homo sapiens
MFRAAAPGQLRRAVAQDLCKVAGIAKVLVAQHDVYKGLLPEELTPLILATQKQFNYTHICAGASAFGKNLLPRVAAKLEVAPISDIIAIKSPDTFVRTIYAGNALCTVKCDEKVKVFSVRGTSFDAAATSGGSASSEKASSTSPVEISEWLDQKLTKSDRPELTGAKVVVSGGRGLKSGENFKLLYDLADQLHAAVGASRAAVDAGFVPNDMQVGQTGKIVAPELYIAVGISGAIQHLAGMKDSKTIVAINKDPEAPIFQVADYGIVADLFKVVPEMTEILKKK

SEQ ID NO: 14552 - protein, 360 aa, Homo sapiens
MLSTSRSRFIRNTNESGEEVTTFFDYDYGAPCHKFDVKQIGAQLLPPLYSLVFIFGFVGNMLVVLILINCKKLKCLTDIYLLNLAISDLLFLITLPLWAHSAANEWVFGNAMCKLFTGLYHIGYFGGIFFIILLTIDRYLAIVHAVFALKARTVTFGVVTSVITWLVAVFASVPGIIFTKCQKEDSVYVCGPYFPRGWNNFHTIMRNILGLVLPLLIMVICYSGILKTLLRCRNEKKRHRAVRVIFTIMIVYFLFWTPYNIVILLNTFQEFFGLSNCESTSQLDQATQVTETLGMTHCCINPIIYAFVGEKFRRYLSVFFRKHITKRFCKQCPVFYRETVDGVTSTNTPSTGEQEVSAGL

SEQ ID NO: 14553 - protein, 706 aa, Homo sapiens
MIDSVKLRRDSAADFFSHYEYLCALQNSVPLPAVRACLREGVLDFNADRLRGVDWAPLLSTLKINKDLPLVSIKSFFQPWLGDTGSDMNKFCRSRVPAIRYKDVTFQLCKALKGCLSISSVLKNLELNGLILRERDLTILAKGLNKSASLVHLSLANCPIGDGGLEIICQGIKSSITLKTVNFTGCNLTWQGADHMAKILKYQTMRRHEETWAESLRYRRPDLDCMAGLRRITLNCNTLIGDLGACAFADSLSEDLWLRALDLQQCGLTNEGAKALLEALETNTTLVVLDIRKNPLIDHSMMKAVIKKVLQNGRSAKSEYQWITSPSVKEPSKTAKQKRRTIILGSGHKGKATIRIVGLATKKPVSSGRKHSLGKEYYAPAPLPPGVSGFLPWRTAERAKRHRGFPLIKTRDICNQLQQPGFPVTVTVESPSSSEVEEVDDSSESVHEVPEKTSIEQEALQEKLEECLKQLKEERVIRLKVDKRVSELEHENAQLRNINFSLSEALHAQSLTNMILDDEGVLGSIENSFQKFHAFLDLLKDAGLGQLATMAGIDQSDFQLLGHPQMTSTVSNPPKEEKKALEDEKPEPKQNALGQMQNIQFQKITGDARIPLPLDSFPVPVSTPEGLGTSSNNLGVPATEQRQESFEGFIARMCSPSPDATSGTGSQRKEEELSRNSRSSSEKKTKTGEYTKKHSDKQHPGKDLHS

SEQ ID NO: 14554 - protein, 231 aa, Homo sapiens
MEPPGDWGPPPWRSTPKTDVLRLVLYLTFLGAPCYAPALPSCKEDEYPVGSECCPKCSPGYRVKEACGELTGTVCEPCPPGTYIAHLNGLSKCLQCQMCDPAMGLRASRNCSRTENAVCGCSPGHFCIVQDGDHCAACRAYATSSPGQRVQKGGTESQDTLCQNCPPGTFSPNGTLEECQHQTKCSWLVTKAGAGTSSSHWVWWFLSGSLVIVIVCSTVGLIICVKRRKPR

SEQ ID NO: 14555 - protein, 481 aa, Homo sapiens
MSLVEAISLWNEGVLAADKKDWKGALDAFSAVQDPHSRICFNIGCMYTILKNMTEAEKAFTRSINRDKHLAVAYFQRGMLYYQTEKYDLAIKDLKEALIQLRGNQLIDYKILGLQFKLFACEKQKLYEPVVIPVGKLFRPNERQVAQLAKKDYLGKATVVASVVDQDSFSGFAPLQPQAAEPPPRPKTPEIFRALEGEAHRVLFGFVPETKEELQVMPGNIVFVLKKGNDNWATVMFNGQKGLVPCNYLEPVELRIHPQQQPQEESSPQSDIPAPPSSKAPGRPQLSPGQKQKEEPKEVKLSVPMPYTLKVHYKYTVVMKTQPGLPYSQVRDMVSKKLELRLEHTKLSYRPRDSNELVPLSEDSMKDAWGQVKNYCLTLWCENTVGDQGFPDEPKESEKADANNQTTEPQLKKGSQVEALFSYEATQPEDLEFQEGDIILVLSKVNEEWLEGECKGKVGIFPKVFVEDCATTDLESTRREV

SEQ ID NO: 14556 - protein, 167 aa, Homo sapiens
MSNPSAPPPYEDRNPLYPGPPPPGGYGQPSVLPGGYPAYPGYPQPGYGHPAGYPQPMPPTHPMPMNYGPGHGYDGEERAVSDSFGPGEWDDRKVRHTFIRKVYSIISVQLLITVAIIAIFTFVEPVSAFVRRNVAVYYVSYAVFVVTYLILACCQGPRRRFPWNIIL

SEQ ID NO: 14557 - protein, 182 aa, Homo sapiens
MSSDSELAVFGEAAPFLRKSERERIEAQNRPFDAKTSVFVAEPKESFVKGTIQSREGGKVTVKTEGGATLTVKDDQVFPMNPPKYDKIEDMAMMTHLHEPAVLYNLKERYAAWMIYTYSGLFCVTVNPYKWLPVYKPEVVTAYRGKKRQEAPPHIFSISDNAYQFMLTDRENQSILITGESG

SEQ ID NO: 14558 - protein, 1006 aa, Homo sapiens
MDSSQQKTFRGHDAPVLSLSFDPKDIFLASASCDGSVRVWQISDQTCAISWPLLQKCNDVINAKSICRLAWQPKSGKLLAIPVEKSVKLYRRESWSHQFDLSDNFISQTLNIVTWSPCGQYLAAGSINGLIIVWNVETKDCMERVKHEKGYAICGLAWHPTCGRISYTDAEGNLGLLENVCDPSGKTSSSKVSSRVEKDYNDLFDGDDMSNAGDFLNDNAVEIPSFSKGIINDDEDDEDLMMASGRPRQRSHILEDDENSVDISMLKTGSSLLKEEEEDGQEGSIHNLPLVTSQRPFYDGPMPTPRQKPFQSGSTPLHLTHRFMVWNSIGIIRCYNDEQDNAIDVEFHDTSIHHATHLSNTLNYTIADLSHEAILLACESTDELASKLHCLHFSSWDSSKEWIIDLPQNEDIEAICLGQGWAAAATSALLLRLFTIGGVQKEVFSLAGPVVSMAGHGEQLFIVYHRGTGFDGDQCLGVQLLELGKKKKQILHGDPLPLTRKSYLAWIGFSAEGTPCYVDSEGIVRMLNRGLGNTWTPICNTREHCKGKSDHYWVVGIHENPQQLRCIPCKGSRFPPTLPRPAVAILSFKLPYCQIATEKGQMEEQFWRSVIFHNHLDYLAKNGYEYEESTKNQATKEQQELLMKMLALSCKLEREFRCVELADLMTQNAVNLAIKYASRSRKLILAQKLSELAVEKAAELTATQVEEEEEEEDFRKKLNAGYSNTATEWSQPRFRNQVEEDAEDSGEADDEEKPEIHKPGQNSFSKSTNSSDVSAKSGAVTFSSQGRVNPFKVSASSKEPAMSMNSARSTNILDNMGKSSKKSTALSRTTNNEKSPIIKPLIPKPKPKQASAASYFQKRNSQTNKTEEVKEENLKNVLSETPAICPPQNTENQRPKTGFQMWLEENRSNILSDNPDFSDEADIIKEGMIRFRVLSTEERKVWANKAKGETASEGTEAKKRKRVVDESDETENQEEKAKENLNLSKKQKPLDFSTNQKLSAFAFKQE

SEQ ID NO: 14559 - protein, 403 aa, Homo sapiens
MDSSAAPTNASNCTDALAYSSCSPAPSPGSWVNLSHLDGNLSDPCGPNRTDLGGRDSLCPPTGSPSMITAITIMALYSIVCVVGLFGNFLVMYVIVRYTKMKTATNIYIFNLALADALATSTLPFQSVNYLMGTWPFGTILCKIVISIDYYNMFTSIFTLCTMSVDRYIAVCHPVKALDFRTPRNAKIINVCNWILSSAIGLPVMFMATTKYRQGSIDCTLTFSHPTWYWENLLKICVFIFAFIMPVLIITVCYGLMILRLKSVRMLSGSKEKDRNLRRITRMVLVVVAVFIVCWTPIHIYVIIKALVTIPETTFQTVSWHFCIALGYTNSCLNPVLYAFLDENFKRCFREFCIPTSSNIEQQNSTRIRQNTRDHPSTANTVDRTNHQGPPAKFVADQLAGSS

SEQ ID NO: 14560 - protein, 646 aa, Homo sapiens
MANCQIAILYQRFQRVVFGISQLLCFSALISELTNQKEVAAWTYHYSTKAYSWNISRKYCQNRYTDLVAIQNKNEIDYLNKVLPYYSSYYWIGIRKNNKTWTWVGTKKALTNEAENWADNEPNNKRNNEDCVEIYIKSPSAPGKWNDEHCLKKKHALCYTASCQDMSCSKQGECLETIGNYTCSCYPGFYGPECEYVRECGELELPQHVLMNCSHPLGNFSFNSQCSFHCTDGYQVNGPSKLECLASGIWTNKPPQCLAAQCPPLKIPERGNMTCLHSAKAFQHQSSCSFSCEEGFALVGPEVVQCTASGVWTAPAPVCKAISCEPLESPVHGSMDCSPSLRAFQYDTNCSFRCAEGFMLRGADIVRCDNLGQWTAPAPVCQALQCQDLPVPNEARVNCSHPFGAFRYQSVCSFTCNEGLLLVGASVLQCLATGNWNSVPPECQGKSIASLPTPGVQCPALTTPGQGTMYCRHHPGTFGFNTTCYFGCNAGFTLIGDSTLSCRPSGQWTAVTPACRAVKCSELHVNKPIAMNCSNLWGNFSYGSICSFHCLEGQLLNGSAQTACQENGHWSTTVPTCQAGPLTIQEALTYFGGAVASTIGLIMGGTLLALLRKRFRQKDDGKCPLNPHSHLGTYGVFTNAAFDPSP

SEQ ID NO: 14561 - protein, 452 aa, Homo sapiens
MAGGGGDLSTRMFTEDQGVDDRLLYDIVFKHFKRNKVEISNAIKKTFPFLEGLRDRDLITNKMFEDSQDSCRNLVPVQRVVYNVLSELEKTFNLPVLEALFSDVNMQEYPDLIHIYKGFENVIHDKLPLQESEEEEREERSGLQLSLEQGTGENSFRSLTWPPSGSPSHAGTTPPENGLSEHPCETEQINAKRKDTTSDKDDSLGSQQTNEQCAQKAEPTESCEQIAVQVNNGDAGREMPCPLPCDEESPEAELHNHGIQINSCSVRLVDIKKEKPFSNSKVECQAQARTHHNQASDIIVISSEDSEGSTDVDEPLEVFISAPRSEPVINNDNPLESNDEKEGQEATCSRPQIVPEPMDFRKLSTFRESFKKRVIGQDHDFSESSEEEAPAEASSGALRSKHAPMTSRSTSTWRIPSRKRRFSSSDFSDLSNGEELQETCSSSLRRGSGKED

SEQ ID NO: 14562 - protein, 1233 aa, Homo sapiens
MSIDHLKQKIPPALFYKETYLGPNEVLKNGMYCSLYEVVEKTRIGSNMESLLQKLDREKLVLVKPLGDRGYLFLLSPYQMVPPYEYQTAKSRVLHALFLFQEPRSIVTSQKGSTNAAPQERHESMPDVLKIAQFLQFSLIQCRKEFKNISAINFHSVVEKYVSEFFKRGFGSGKREFIMFPYDSRLDDKKFLYSAPRNKSHIDTCLHAYIFRPEVYQLPICKLKELFEENRKLQQFSPLSDYEGQEEEMNGTKMKFGKRNNSRGEAIISGKQRSSHSLDYDKDRVKELINLIQCRKKSVGGDSDTEDMRSKTVLKRKLEDLPENMRKLAKTSNLSENCHLYEESPQPIGSLGHDADLRRQQQDTCNSGIADIHRLFNWLSETLANARHSDASLTDTVNKALGLSTDDAYEELRQKHEYELNSTPDKKDYEQPTCAKVENAQFKGTQSLLLEVDATSKYSVAISTSEVGTDHKLHLKEDPNLISVNNFEDCSLCPSVPIEHGFRRQQSKSNNVEETEIHWKLIPITGGNARSPEDQLGKHGEKQTPDTLKGTTEDDVLTGQVEEQCVPAAEAEPPAVSETTERTVLGEYNLFSRKIEEILKQKNVSYVSTVSTPIFSTQEKMKRLSEFIYSKTSKAGVQEFVDGLHEKLNTIIIKASAKGGNLPPVSPNDSGAKIASNPLERHVIPVSSSDFNNKHLLEPLCSDPLKDTNSDEQHSTSALTEVEMNQPQHATELMVTSDHIVPGDMAREPVEETTKSPSDVNISAQPALSNFISQLEPEVFNSLVKIMKDVQKNTVKFYIHEEEESVLCKEIKEYLIKLGNTECHPEQFLERRSKLDKLLIIIQNEDIAGFIHKIPGLVTLKKLPCVSFAGVDSLDDVKNHTYNELFVSGGFIVSDESILNPEVVTVENLKNFLTFLEELSTPEGKWQWKVHCKFQKKLKELGRLNAKALSLLTLLNVYQKKHLVEILSYHNCDSQTRNAPELDCLIRLQAQNIQQRHIVFLTEKNIKMLSSYTDNGIVVATAEDFMQNFKNLVGYHNSITEENLPQLGANENLESQSALLENDEKDEEDMSLDSGDEISHIEVCSNFHSEIWEKETKGSRGTDQKKNTQIELQSSPDVQNSLLEDKTYLDSEERTSIDIVCSEGENSNSTEQDSYSNFQVYHSQLNMSHQFSHFNVLTHQTFLGTPYALSSSQSQENENYFLSAYTESLDRDKSPPPLSWGKSDSSRPYSQEK

SEQ ID NO: 14563 - protein, 247 aa, Homo sapiens
MVRCVPSAVIVCFLRPPQPGRTVIFHDVAVLTDKLFPIVEAMQKHFSAGLGTYYSDSIFFLSVAMHQIMPKEILQIIQLDLDLKFKTNIRELFEEFDSFLPGAIIGIAREMQPVYRHTFWQFRHENPQTRVGGPPPEGLPGFNSGVMLLNLEAMRQSPLYSRLLEPAQVQQLADKYHFRGHLGDQDFFTMIGMEHPKLFHVLDCTWNRQLCTWWRDHGYSDVFEAYFRCEGHVKIYHGNCNTPIPED

SEQ ID NO: 14564 - protein, 1261 aa, Homo sapiens [sequence omitted]

SEQ ID NO: 14565 - protein, 1504 aa, Homo sapiens
MVSESDFSKDVAVQVLPLDKIEENNKQKANDIFISQYTMGQKDALRTVLKQNVSLCLTGWSDHSGVITTHCSLYLLRLMRSSHLSLPSSWDYRAQSMPVFKEVKVHLLEDAGIEKDAVTQETRISPSGIDSATTVAAATAAAIATAAPLIKVQSDLEAKVNSVTELLSKLQETDKHLQRVTEQQTSIQRKQEKLHCHDHEKQMNVFMEQHIRHLEKLQQQQIDIQTHFISAALKTSSFQPVSMPSSRAVEKYSVKPEHPNLGSCNPSLYNTFASKQAPLKEVEDTSFDKQKSPLETPAPRRFAPVPVSRDDELSKRENLLEEKENMEVSCHRGNVRLLEQILNNNDSLTRKSESSNTTSLTRSKIGWTPEKTNRFPSCEELETTKVTMQKSDDVLHDLGQKEKETNSMVQPKESLSMLKLPDLPQNSVKLQTTNTTRSVLKDAEKILRGVQNNKKVLEENLEAIIRAKDGAAMYSLINALSTNREMSEKIRIRKTVDEWIKTISAEIQDELSRTDYEQKRFDQKNQRTKKGQNMTKDIRTNTQDKTVNKSVIPRKHSQKQIEEHFRNLPMRGMPASSLQKERKEGLLKATTVIQDEDYMLQVYGKPVYQGHRSTLKKGPYLRFNSPSPKSRPQRPKVIERVKGTKVKSIRTQTDFYATKPKKMDSKMKHSVPVLPHGDQQYLFSPSREMPTFSGTLEGHLIPMAILLGQTQSNSDTMPPAGVIVSKPHPVTVTTSIPPSSRKVETGVKKPNIAIVEMKSEKKDPPQLTVQVLPSVDIDSISNSSADVLSPLSSPKEASLPPVQTWIKTPEIMKVDEEEVKFPGTNFDEIIDVIQEEEKCDEIPDSEPILEFNRSVKADSTKYNGPPFPPVASTFQPTADILDKVIERKETLENSLIQWVEQEIMSRIISGLFPVQQQIAPSISVSVSETSEPLTSDIVEGTSSGALQLFVDAGVPVNSNVIKHFVNEALAETIAVMLGDREAKKQGPVATGVSGDASTNETYLPARVCTPLPTPQPTPPCSPSSPAKECVLVKTPDSSPCDSDHDMAFPVKEICAEKGDDMPAIMLVNTPTVTPTTTPPPAAAVFTPTLSDISIDKLKVSSPELPKPWGDGDLPLEEENPNSPQEELHPRAIVMSVAKDEEPESMDFPAQPPPPEPVPFMPFPAGTKAPSPSQMPGSDSSTLESTLSVTVTETETLDKPISEGEILFSCGQKLAPKILEDIGLYLTNLNDSLSSTLHDAVEMEDDPPSEGQVIRMSHKKFHADAILSFAKQNQESAVSQQAVYHSEDLENSVGELSEGQRPQLTAAAENILMGHSLYMQPPVTNTQSLDQQCDPKPLSRQFDTVSGSIYEDSCASHGPMSLGELELEPNSKLVLPTTLLTAQENDVNLPVAAEDFSQYQLKQNQDVKQVEHKPSQSYLRVRNKSDIAPSQQQVSPGDMDRTQIELNPYLTCVFSGGKAVPLSASQMPPAKMSVMLPSVNLEDCSQSLSLSTMQEDMESSGADTF

SEQ ID NO: 14566 - protein, 622 aa, Homo sapiens
MCGLQFSLPCLRLFLVVTCYLLLLLHKEILGCSSVCQLCTGRQINCRNLGLSSIPKNFPESTVFLYLTGNNISYINESELTGLHSLVALYLDNSNILYVYPKAFVQLRHLYFLFLNNNFIKRLDPGIFKGLLNLRNLYLQYNQVSFVPRGVFNDLVSVQYLNLQRNRLTVLGSGTFVGMVALRILDLSNNNILRISESGFQHLENLACLYLGSNNLTKVPSNAFEVLKSLRRLSLSHNPIEAIQPFAFKGLANLEYLLLKNSRIRNVTRDGFSGINNLKHLILSHNDLENLNSDTFSLLKNLIYLKLDRNRIISIDNDTFENMGASLKILNLSFNNLTALHPRVLKPLSSLIHLQANSNPWECNCKLLGLRDWLASSAITLNIYCQNPPSMRGRALRYINITNCVTSSINVSRAWAVVKSPHIHHKTTALMMAWHKVTTNGSPLENTETENITFWERIPTSPAGRFFQENAFGNPLETTAVLPVQIQLTTSVTLNLEKNSALPNDAASMSGKTSLICTQEVEKLNEAFDILLAFFILACVLIIFLIYKVVQFKQKLKASENSRENRLEYYSFYQSARYNVTASICNTSPNSLESPGLEQIRLHKQIVPENEAQVILFEHSAL

SEQ ID NO: 14567 - protein, 322 aa, Homo sapiens
MLALVLVVMVWYSISREDRYIELFYFPIPEKKEPCLQGEAESKASKLFGNYSRDQPIFLRLEDYFWVKTPSAYELPYGTKGSEDLLLRVLAITSSSIPKNIQSLRCRRCVVVGNGHRLRNSSLGDAINKYDVVIRLNNAPVAGYEGDVGSKTTMRLFYPESAHFDPKVENNPDTLLVLVAFKAMDFHWIETILSDKKRVRKGFWKQPPLIWDVNPKQIRILNPFFMEIAADKLLSLPMQQPRKIKQKPTTGLLAITLALHLCDLVHIAGFGYPDAYNKKQTIHYYEQITLKSMAGSGHNVSQEALAIKRMLEMGAIKNLTSF

SEQ ID NO: 14568 - protein, 149 aa, Homo sapiens
MAKMEVKTSLLDNMIGVGDMVLLEPLNEETFINNLKKRFDHSEIYTYIGSVVISVNPYRSLPIYSPEKVEEYRNRNFYELSPHIFALSDEAYRSLRDQDKDQCILITGESGAGKTEASKLVMSYVAAVCGKGAEVNQVKEQLLQSNPVL

SEQ ID NO: 14569 - protein, 550 aa, Homo sapiens
MKWEEYEELLHYAIVTPNIEPCASQSSHPKGELVPDVRISTIHDILHSQGNNSEVRETAIEVGKGCDFHISSHSKTDESSPVLSPRKPSHPVMDFFSSHLLADSSSPATNSSHTDAHEILVSDFLVSDENLQKMENVLDLWSSGLKTNIISELSKWRLNFIDWHRMEMRKEKEKHAAHLKQLCNQINELKELQKTFEISIGRKDEVISSLSHAIGKQKEKIELMRTFFHWRIGHVRARQDVYEGKLADQYYQRTLLKKVWKVWRSVVQKQWKDVVERACQARAEEVCIQISNDYEAKVAMLSGALENAKAEIQRMQHEKEHFEDSMKKAFMRGVCALNLEAMTIFQNRNDAGIDSTNNKKEEYGPGVQGKEHSAHLDPSAPPMPLPVTSPLLPSPPAAVGGASATAVPSAASMTSTRAASASSVHVPVSALGAGSAATAASEEMYVPRVVTSAQQKAGRTITARITGRCDFASKNRISSSLAIMGVSPPMSSVVVEKHHPVTVQTIPQATAAKYPRTIHPESSTSASRSLGTRSAHTQSLTSVHSIKVVD

SEQ ID NO: 14570 - protein, 1385 aa, Homo sapiens
TPAAIPTSAPIPASFSLSRVCFPAAQAPAMQKVPLSFQPGTVLTPSQPLVYIPPPSCGQPLSVATLPTTLGVSSTLTLPVLPSYLQDRCLPGVLASPELRSYPYAFSVARPLTSDSKLVSLEVNRLPCTSPSGSTTTQPAPDGVPGPLADTSLVTASAKVLPTPQPLLPAPSGSSAPPHPAKMPSGTEQQTEGTSVTFSPLKSPPQLEREMASPPECSEMPLDLSSKSNRQKLPLPNQRKTPPMPVLTPVHTSSKALLSTVLSRSQRTTQAAGGNVTSCLGSTSSPFVIFPEIVRNGDPSTWVKNSTALISTIPGTYVGVANPVPASLLLNKDPNLGLNRDPRHLPKQEPISIIDQGEPKGTGATCGKKGSQAGAEGQPSTVKRYTPARIAPGLPGCQTKELSLWKPTGPANIYPRCSVNGKPTSTQVLPVGWSPYHQASLLSIGISSAGQLTPSQGAPIRPTSVVSEFSGVPSLSSSEAVHGLPEGQPRPGGSFVPEQDPVTKNKTCRIAAKPYEEQVNPVLLTLSPQTGTLALSVQPSGGDIRMNQGPEESESHLCSDSTPKMEGPQGACGLKLAGDTKPKNQVLATYMSHELVLATPQNLPKMPELPLLPHDSHPKELILDVVPSSRRGSSTERPQLGSQVDLGRVKMEKVDGDVVFNLATCFRADGLPVAPQRGQAEVRAKAGQARVKQESVGVFACKNKWQPDDVTESLPPKKMKCGKEKDSEEQQLQPQAKAVVRSSHRPKCRKLPSDPQESTKKSPRGASDSGKEHNGVRGKHKHRKPTKPESQSPGKRADSHEEGSLEKKAKSSFRDFIPVVLSTRTRSQSGSICSSFAGMADSDMGSQEVFPTEEEEEVTPTPAKRRKVRKTQRDTQYRSHHAQDKSLLSQGRRHLWRAREMPWRTEAARQMWDTNEEEEEEEEEGLLKRKKRRRQKSRKYQTGEYLTEQEDEQRRKGRADLKARKQKTSSSQSLEHRLRNRNLLLPNKVQGISDSPNGFLPNNLEEPACLENSEKPSGKRKCKTKHMATVSEEAKGKGRWSQQKTRSPKSPTPVKPTEPCTPSKSRSASSEEASESPTARQIPPEARRLIVNKNAGETLLQRAARLGYKDVVLYCLQKDSEDVNHRDNAGYTALHEACSRGWTDILNILLEHGANVNCSAQDGTRPVHDAVVNDNLETIWLLLSYGADPTLATYSGQTAMKLASSDTMKRFLSDHLSDLQGRAEGDPGVSWDFYSSSVLEEKDGFACDLLHNPPGSSDQEGDDPMEEDDFMFELSDKPLLPCYNLQVSVSRGPCNWFLFSDVLKRLKLSSRIFQARFPHFEITTMPKAEFYRQVASSQLLTPAERPGGLDDRSPPGSSETVELVRYEPDLLRLLGSEVEFQSCNS

SEQ ID NO: 14571 - protein, 96 aa, Homo sapiens
MDDDIAALVVDNGSGMCKAGFAGDDAPRAVFPSIVGRPRHQGVMVGMGQKDSYVGDEAQSKRGILTLKYPIEHGIVTNWDDMEKIWHHTFYNELRV

SEQ ID NO: 14572 - protein, 379 aa, Homo sapiens
MDAPRASAAKPPTGRKMKARAPPPPGKAATLHVHSDQKPPHDGALGSQQNLVRMKEALRASTMDVTVVLPSGLEKRSVLNGSHAMMDLLVELCLQNHLNPSHHALEIRSSETQQPLSFKPNTLIGTLNVHTVFLKEKVPEEKVKPGPPKVPEKSVRLVVNYLRTQKAVVRVSPEVPLQNILPVICAKCEVSPEHVVLLRDNIAGEELELSKSLNELGIKELYAWDNRRETFRKSSLGNDETDKEKKKFLGFFKVNKRSNSKGCLTTPNSPSMHSRSLTLGPSLSLGSISGVSVKSEMKKRRAPPPPGSGPPVQDKASEKVSLGSQIDLQKKKRRAPAPPPPQPPPPSPLIPNRTEDKEENRKSTMVYCCASFPTQAKRF

SEQ ID NO: 14573 - protein, 4302 aa, Homo sapiens
MPPAAPARLALALGLGLWLGALAGGPGRGCGPCEPPCLCGPAPGAACRVNCSGRGLRTLGPALRIPADATALDVSHNLLRALDVGLLANLSALAELDISNNKISTLEEGIFANLFNLSEINLSGNPFECDCGLAWLPRWAEEQQVRVVQPEAATCAGPGSLAGQPLLGIPLLDSGCGEEYVACLPDNSSGTVAAVSFSAAHEGLLQPEACSAFCFSTGQGLAALSEQGWCLCGAAQPSSASFACLSLCSGPPPPPAPTCRGPTLLQHVFPASPGATLVGPHGPLASGQLAAFHIAAPLPVTATRWDFGDGSAEVDAAGPAASHRYVLPGRYHVTAVLALGAGSALLGTDVQVEAAPAALELVCPSSVQSDESLDLSIQNRGGSGLEAAYSIVALGEEPARAVHPLCPSDTEIFPGNGHCYRLVVEKAAWLQAQEQCQAWAGAALAMVDSPAVQRFLVSRVTRSLDVWIGFSTVQGVEVGPAPQGEAFSLESCQNWLPGEPHPATAEHCVRLGPTGWCNTDLCSAPHSYVCELQPGGPVQDAENLLVGAPSGDLQGPLTPLAQQDGLSAPHEPVEVMVFPGLRLSREAFLTTAEFGTQELRRPAQLRLQVYRLLSTAGTPENGSEPESRSPDNRTQLAPACMPGGRWCPGANICLPLDASCHPQACANGCTSGPGLPGAPYALWREFLFSVPAGPPAQYSVTLHGQDVLMLPGDLVGLQHDAGPGALLHCSPAPGHPGPRAPYLSANASSWLPHLPAQLEGTWACPACALRLLAATEQLTVLLGLRPNPGLRLPGRYEVRAEVGNGVSRHNLSCSFDVVSPVAGLRVIYPAPRDGRLYVPTNGSALVLQVDSGANATATARWPGGSVSARFENVCPALVATFVPGCPWETNDTLFSVVALPWLSEGEHVVDVVVENSASRANLSLRVTAEEPICGLRATPSPEARVLQGVLVRYSPVVEAGSDMVFRWTINDKQSLTFQNVVFNVIYQSAAVFKLSLTASNHVSNVTVNYNVTVERMNRMQGLQVSTVPAVLSPNATLALTAGVLVDSAVEVAFLWTFGDGEQALHQFQPPYNESFPVPDPSVAQVLVEHNVMHTYAAPGEYLLTVLASNAFENLTQQVPVSVRASLPSVAVGVSDGVLVAGRPVTFYPHPLPSPGGVLYTWDFGDGSPVLTQSQPAANHTYASRGTYHVRLEVNNTVSGAAAQADVRVFEELRGLSVDMSLAVEQGAPVVVSAAVQTGDNITWTFDMGDGTVLSGPEATVEHVYLRAQNCTVTVGAASPAGHLARSLHVLVFVLEVLRVEPAACIPTQPDARLTAYVTGNPAHYLFDWTFGDGSSNTTVRGCPTVTHNFTRSGTFPLALVLSSRVNRAHYFTSICVEPEVGNVTLQPERQFVQLGDEAWLVACAWPPFPYRYTWDFGTEEAAPTRARGPEVTFIYRDPGSYLVTVTASNNISAANDSALVEVQEPVLVTSIKVNGSLGLELQQPYLFSAVGRGRPASYLWDLGDGGWLEGPEVTHAYNSTGDFTVRVAGWNEVSRSEAWLNVTVKRRVRGLVVNASRTVVPLNGSVSFSTSLEAGSDVRYSWVLCDRCTPIPGGPTISYTFRSVGTFNIIVTAENEVGSAQDSIFVYVLQLIEGLQVVGGGRYFPTNHTVQLQAVVRDGTNVSYSWTAWRDRGPALAGSGKGFSLTVLEAGTYHVQLRATNMLGSAWADCTMDFVEPVGWLMVAASPNPAAVNTSVTLSAELAGGSGVVYTWSLEEGLSWETSEPFTTHSFPTPGLHLVTMTAGNPLGSANATVEVDVQVPVSGLSIRASEPGGSFVAAGSSVPFWGQLATGTNVSWCWAVPGGSSKRGPHVTMVFPDAGTFSIRLNASNAVSWVSATYNLTAEEPIVGLVLWASSKVVAPGQLVHFQILLAAGSAVTFRLQVGGANPEVLPGPRFSHSFPRVGDHVVSVRGKNHVSWAQAQVRIVVLEAVSGLQVPNCCEPGIATGTERNFTARVQRGSRVAYAWYFSLQKVQGDSLVILSGRDVTYTPVAAGLLEIQVRAFNALGSENRTLVLEVQDAVQYVALQSGPCFTNRSAQFEAATSPSPRRVAYHWDFGDGSPGQDTDEPRAEHSYLRPGDYRVQVNASNLVSFFVAQATVTVQVLACREPEVDVVLPLQVLMRRSQRNYLEAHVDLRDCVTYQTEYRWEVYRTASCQRPGRPARVALPGVDVSRPRLVLPRLALPVGHYCFVFVVSFGDTPLTQSIQANVTVAPERLVPIIEGGSYRVWSDTRDLVLDGSESYDPNLEDGDQTPLSFHWACVASTQREAGGCALNFGPRGSSTVTIPRERLAAGVEYTFSLTVWKAGRKEEATNQTVLIRSGRVPIVSLECVSCKAQAVYEVSRSSYVYLEGRCLNCSSGSKRGRWAARTFSNKTLVLDETTTSTGSAGMRLVLRRGVLRDGEGYTFTLTVLGRSGEEEGCASIRLSPNRPPLGGSCRLFPLGAVHALTTKVHFECTGWHDAEDAGAPLVYALLLRRCRQGHCEEFCVYKGSLSSYGAVLPPGFRPHFEVGLAVVVQDQLGAAVVALNRSLAITLPEPNGSATGLTVWLHGLTASVLPGLLRQADPQHVIEYSLALVTVLNEYERALDVAAEPKHERQHRAQIRKNITETLVSLRVHTVDDIQQIAAALAQCMGPSRELVCRSCLKQTLHKLEAMMLILQAETTAGTVTPTAIGDSILNITGDLIHLASSDVRAPQPSELGAESPSRMVASQAYNLTSALMRILMRSRVLNEEPLTLAGEEIVAQGKRSDPRSLLCYGGAPGPGCHFSIPEAFSGALANLSDVVQLIFLVDSNPFPFGYISNYTVSTKVASMAFQTQAGAQIPIERLASERAITVKVPNNSDWAARGHRSSANSANSVVVQPQASVGAVVTLDSSNPAAGLHLQLNYTLLDGHYLSEEPEPYLAVYLHSEPRPNEHNCSASRRIRPESLQGADHRPYTFFISPGSRDPAGSYHLNLSSHFRWSALQVSVGLYTSLCQYFSEEDMVWRTEGLLPLEETSPRQAVCLTRHLTAFGASLFVPPSHVRFVFPEPTADVNYIVMLTCAVCLVTYMVMAAILHKLDQLDASRGRAIPFCGQRGRFKYEILVKTGWGRGSGTTAHVGIMLYGVDSRSGHRHLDGDRAFHRNSLDIFRIATPHSLGSVWKIRVWHDNKGLSPAWFLQHVIVRDLQTARSAFFLVNDWLSVETEANGGLVEKEVLAASDAALLRFRRLLVAELQRGFFDKHIWLSIWDRPPRSRFTRIQRATCCVLLICLFLGANAVWYGAVGDSAYSTGHVSRLSPLSVDTVAVGLVSSVVVYPVYLAILFLFRMSRSKVAGSPSPTPAGQQVLDIDSCLDSSVLDSSFLTFSGLHAEAFVGQMKSDLFLDDSKSLVCWPSGEGTLSWPDLLSDPSIVGSNLRQLARGQAGHGLGPEEDGFSLASPYSPAKSFSASDEDLIQQVLAEGVSSPAPTQDTHMETDLLSSLSSTPGEKTETLALQRLGELGPPSPGLNWEQPQAARLSRTGLVEGLRKRLLPAWCASLAHGLSLLLVAVAVAVSGWVGASFPPGVSVAWLLSSSASFLASFLGWEPLKVLLEALYFSLVAKRLHPDEDDTLVESPAVTPVSARVPRVRPPHGFALFLAKEEARKVKRLHGMLRSLLVYMLFLLVTLLASYGDASCHGHAYRLQSAIKQELHSRAFLAITRSEELWPWMAHVLLPYVHGNQSSPELGPPRLRQVRLQEALYPDPPGPRVHTCSAAGGFSTSDYDVGWESPHNGSGTWAYSAPDLLGAWSWGSCAVYDSGGYVQELGLSLEESRDRLRFLQLHNWLDNRSRAVFLELTRYSPAVGLHAAVTLRLEFPAAGRALAALSVRPFALRRLSAGLSLPLLTSVCLLLFAVHFAVAEARTWHREGRWRVLRLGAWARWLLVALTAATALVRLAQLGAADRQWTRFVRGRPRRFTSFDQVAQLSSAARGLAASLLFLLLVKAAQQLRFVRQWSVFGKTLCRALPELLGVTLGLVVLGVAYAQLAILLVSSCVDSLWSVAQALLVLCPGTGLSTLCPAESWHLSPLLCVGLWALRLWGALRLGAVILRWRYHALRGELYRPAWEPQDYEMVELFLRRLRLWMGLSKVKEFRHKVRFEGMEPLPSRSSRGSKVSPDVPPPSAGSDASHPSTSSSQLDGLSVSLGRLGTRCEPEPSRLQAVFEALLTQFDRLNQATEDVYQLEQQLHSLQGRRSSRAPAGSSRGPSPGLRPALPSRLARASRGVDLATGPSRTPLRAKNKVHPSST

SEQ ID NO: 14574 - protein, 1360 aa, Homo sapiens
MASDSPARSLDEIDLSALRDPAGIFELVELVGNGTYGQVYKGRHVKTGQLAAIKVMDVTGDEEEEIKQEINMLKKYSHHRNIATYYGAFIKKNPPGMDDQLWLVMEFCGAGSVTDLIKNTKGNTLKEEWIAYICREILRGLSHLHQHKVIHRDIKGQNVLLTENAEVKLVDFGVSAQLDRTVGRRNTFIGTPYWMAPEVIACDENPDATYDFKSDLWSLGITAIEMAEGAPPLCDMHPMRALFLIPRNPAPRLKSKKWSKKFQSFIESCLVKNHSQRPATEQLMKHPFIRDQPNERQVRIQLKDHIDRTKKKRGEKDETEYEYSGSEEEEEENDSGEPSSILNLPGESTLRRDFLRLQLANKERSEALRRQQLEQQQRENEEHKRQLLAERQKRIEEQKEQRRRLEEQQRREKELRKQQEREQRRHYEEQMRREEERRRAEHEQEYIRRQLEEEQRQLEILQQQLLHEQALLLEYKRKQLEEQRQAERLQRQLKQERDYLVSLQHQRQEQRPVEKKPLYHYKEGMSPSEKPAWAKEVEERSRLNRQSSPAMPHKVANRISDPNLPPRSESFSISGVQPARTPPMLRPVDPQIPHLVAVKSQGPALTASQSVHEQPTKGLSGFQEALNVTSHRVEMPRQNSDPTSENPPLPTRIEKFDRSSWLRQEEDIPPKVPQRTTSISPALARKNSPGNGSALGPRLGSQPIRASNPDLRRTEPILESPLQRTSSGSSSSSSTPSSQPSSQGGSQPGSQAGSSERTRVRANSKSEGSPVLPHEPAKVKPEESRDITRPSRPASYKKAIDEDLTALAKELRELRIEETNRPMKKVTDYSSSSEESESSEEEEEDGESETHDGTVAVSDIPRLIPTGAPGSNEQYNVGMVGTHGLETSHADSFSGSISREGTLMIRETSGEKKRSGHSDSNGFAGHINLPDLVQQSHSPAGTPTEGLGRVSTHSQEMDSGTEYGMGSSTKASFTPFVDPRVYQTSPTDEDEEDEESSAAALFTSELLRQEQAKLNEARKISVVNVNPTNIRPHSDTPEIRKYKKRFNSEILCAALWGVNLLVGTENGLMLLDRSGQGKVYNLINRRRFQQMDVLEGLNVLVTISGKKNKLRVYYLSWLRNRILHNDPEVEKKQGWITVGDLEGCIHYKVVKYERIKFLVIALKNAVEIYAWAPKPYHKFMAFKSFADLQHKPLLVDLTVEEGQRLKVIFGSHTGFHVIDVDSGNSYDIYIPSHIQGNITPHAIVILPKTDGMEMLVCYEDEGVYVNTYGRITKDVVLQWGEMPTSVAYIHSNQIMGWGEKAIEIRSVETGHLDGVFMHKRAQRLKFLCERNDKVFFASVRSGGSSQVFFMTLNRNSMMNW

SEQ ID NO: 14575 - protein, 795 aa, Homo sapiens
MDHLNEATQGKEHSEMSNNVSDPKGPPAKIARLEQNGSPLGRGRLGSTGAKMQGVPLKHSGHLMKTNLRKGTMLPVFCVVEHYENAIEYDCKEEHAEFVLVRKDMLFNQLIEMALLSLGYSHSSAAQAKGLIQVGKWNPVPLSYVTDAPDATVADMLQDVYHVVTLKIQLHSCPKLEDLPPEQWSHTTVRNALKDLLKDMNQSSLAKECPLSQSMISSIVNSTYYANVSAAKCQEFGRWYKHFKKTKDMMVEMDSLSELSQQGANHVNFGQQPVPGNTAEQPPSPAQLSHGSQPSVRTPLPNLHPGLVSTPISPQLVNQQLVMAQLLNQQYAVNRLLAQQSLNQQYLNHPPPVSRSMNKPLEQQVSTNTEVSSEIYQWVRDELKRAGISQAVFARVAFNRTQGLLSEILRKEEDPKTASQSLLVNLRAMQNFLQLPEAERDRIYQDERERSLNAASAMGPAPLISTPPSRPPQVKTATIATERNGKPENNTMNINASIYDEIQQEMKRAKVSQALFAKVAATKSQGWLCELLRWKEDPSPENRTLWENLSMIRRFLSLPQPERDAIYEQESNAVHHHGDRPPHIIHVPAEQIQSPSPTTLGKGESRGVFLPGLPTPAPWLGAAPQQQQQQQQQQQQQQQAPPPPQPQQQPQTGPRLPPRQPTVASPAESDEENRQKTRPRTKISVEALGILQSFIQDVGLYPDEEAIQTLSAQLDLPKYTIIKFFQNQRYYLKHHGKLKDNSGLEVDVAEYKEEELLKDLEESVQDKNTNTLFSVKLEEELSVEGNTDINTDLKD

SEQ ID NO: 14576 - protein, 1983 aa, Homo sapiens
MANFLLPRGTSSFRRFTRESLAAIEKRMAEKQARGSTTLQESREGLPEEEAPRPQLDLQASKKLPDLYGNPPQELIGEPLEDLDPFYSTQKTFIVLNKGKTIFRFSATNALYVLSPFHPIRRAAVKILVHSLFNMLIMCTILTNCVFMAQHDPPPWTKYVEYTFTAIYTFESLVKILARGFCLHAFTFLRDPWNWLDFSVIIMAYVSENIKLGNLSALRTFRVLRALKTISVIPGLKTIVGALIQSVKKLADVMVLTVFCLSVFALIGLQLFMGNLRHKCVRNFTALNGTNGSVEADGLVWESLDLYLSDPENYLLKNGTSDVLLCGNSSDAGTCPEGYRCLKAGENPDHGYTSFDSFAWAFLALFRLMTQDCWERLYQQTLRSAGKIYMIFFMLVIFLGSFYLVNLILAVVAMAYEEQNQATIAETEEKEKRFQEAMEMLKKEHEALTIRGVDTVSRSSLEMSPLAPVNSHERRSKRRKRMSSGTEECGEDRLPKSDSEDGPRAMNHLSLTRGLSRTSMKPRSSRGSIFTFRRRDLGSEADFADDENSTAGESESHHTSLLVPWPLRRTSAQGQPSPGTSAPGHALHGKKNSTVDCNGVVSLLGAGDPEATSPGSHLLRPVMLEHPPDTTTPSEEPGGPQMLTSQAPCVDGFEEPGARQRALSAVSVLTSALEELEESRHKCPPCWNRLAQRYLIWECCPLWMSIKQGVKLVVMDPFTDLTITMCIVLNTLFMALEHYNMTSEFEEMLQVGNLVFTGIFTAEMTFKIIALDPYYYFQQGWNIFDSIIVILSLMELGLSRMSNLSVLRSFRLLRVFKLAKSWPTLNTLIKIIGNSVGALGNLTLVLAIIVFIFAVVGMQLFGKNYSELRDSDSGLLPRWHMMDFFHAFLIIFRILCGEWIETMWDCMEVSGQSLCLLVFLLVMVIGNLVVLNLFLALLLSSFSADNLTAPDEDREMNNLQLALARIQRGLRFVKRTTWDFCCGLLRQRPQKPAALAAQGQLPSCIATPYSPPPPETEKVPPTRKETRFEEGEQPGQGTPGDPEPVCVPIAVAESDTDDQEEDEENSLGTEEESSKQESQPVSGGPEAPPDSRTWSQVSATASSEAEASASQADWRQQWKAEPQAPGCGETPEDSCSEGSTADMTNTAELLEQIPDLGQDVKDPEDCFTEGCVRRCPCCAVDTTQAPGKVWWRLRKTCYHIVEHSWFETFIIFMILLSSGALAFEDIYLEERKTIKVLLEYADKMFTYVFVLEMLLKWVAYGFKKYFTNAWCWLDFLIVDVSLVSLVANTLGFAEMGPIKSLRTLRALRPLRALSRFEGMRVVVNALVGAIPSIMNVLLVCLIFWLIFSIMGVNLFAGKFGRCINQTEGDLPLNYTIVNNKSQCESLNLTGELYWTKVKVNFDNVGAGYLALLQVATFKGWMDIMYAAVDSRGYEEQPQWEYNLYMYIYFVIFIIFGSFFTLNLFIGVIIDNFNQQKKKLGGQDIFMTEEQKKYYNAMKKLGSKKPQKPIPRPLNKYQGFIFDIVTKQAFDVTIMFLICLNMVTMMVETDDQSPEKINILAKINLLFVAIFTGTVLSDIIQKYFFSPTLFRVIRLARIGRILRLIRGAKGIRTLLFALMMSLPALFNIGLLLFLVMFIYSIFGMANFAYVKWEAGIDDMFNFQTFANSMLCLFQITTSAGWDGLLSPILNTGPPYCDPTLPNSNGSRGDCGSPAVGILFFTTYIIISFLIVVNMYIAIILENFSVATEESTEPLSEDDFDMFYEIWEKFDPEATQFIEYSVLSDFADALSEPLRIAKPNQISLINMDLPMVSGDRIHCMDILFAFTKRVLGESGEMDALKIQMEEKFMAANPSKISYEPITTTLRRKHEEVSAMVIQRAFRRHLLQRSLKHASFLFRQQAGSGLSEEDAPEREGLIAYVMSENFSRPLGPPSSSSISSTSFPPSYDSVTRATSDNLQVRGSDYSHSEDLADFPPSPDRDRESIV

SEQ ID NO: 14577 - protein, 256 aa, Homo sapiens
HKVNTLALKYGLRGHVPITKSTASLQKQILGFTQRLHAAEVERRSLRLEVTEFKRSVNEMKKELDKAQGLQMQLNEFKQSKLITHEKFESACEELNNALLREEQAQMLLNEQAQQLQELNYKLELHSSEEADKNQTLGEAVKSLSEAKMELRRKDQSLRQLNRHLTQLEQDKRRLEENIHDAESALRMAAKDKECVANHMRAVENTLHKVRDQISLSWSAASRNDFTLQLPKLHLETFAMEGLKGGPEVVACQVRV

SEQ ID NO: 14578 - protein, 2267 aa, Homo sapiens
MLRGPGPGLLLLAVQCLGTAVPSTGASKSKRQAQQMVQPQSPVAVSQSKPGCYDNGKHYQINQQWERTYLGNALVCTCYGGSRGFNCESKPEAEETCFDKYTGNTYRVGDTYERPKDSMIWDCTCIGAGRGRISCTIANRCHEGGQSYKIGDTWRRPHETGGYMLECVCLGNGKGEWTCKPIAEKCFDHAAGTSYVVGETWEKPYQGWMMVDCTCLGEGSGRITCTSRNRCNDQDTRTSYRIGDTWSKKDNRGNLLQCICTGNGRGEWKCERHTSVQTTSSGSGPFTDVRAAVYQPQPHPQPPPYGHCVTDSGVVYSVGMQWLKTQGNKQMLCTCLGNGVSCQETAVTQTYGGNSNGEPCVLPFTYNGRTFYSCTTEGRQDGHLWCSTTSNYEQDQKYSFCTDHTVLVQTRGGNSNGALCHFPFLYNNHNYTDCTSEGRRDNMKWCGTTQNYDADQKFGFCPMAAHEEICTTNEGVMYRIGDQWDKQHDMGHMMRCTCVGNGRGEWTCIAYSQLRDQCIVDDITYNVNDTFHKRHEEGHMLNCTCFGQGRGRWKCDPVDQCQDSETGTFYQIGDSWEKYVHGVRYQCYCYGRGIGEWHCQPLQTYPSSSGPVEVFITETPSQPNSHPIQWNAPQPSHISKYILRWRPKNSVGRWKEATIPGHLNSYTIKGLKPGVVYEGQLISIQQYGHQEVTRFDFTTTSTSTPVTSNTVTGETTPFSPLVATSESVTEITASSFVVSWVSASDTVSGFRVEYELSEEGDEPQYLDLPSTATSVNIPDLLPGRKYIVNVYQISEDGEQSLILSTSQTTAPDAPPDTTVDQVDDTSIVVRWSRPQAPITGYRIVYSPSVEGSSTELNLPETANSVTLSDLQPGVQYNITIYAVEENQESTPVVIQQETTGTPRSDTVPSPRDLQFVEVTDVKVTIMWTPPESAVTGYRVDVIPVNLPGEHGQRLPISRNTFAEVTGLSPGVTYYFKVFAVSHGRESKPLTAQQTTKLDAPTNLQFVNETDSTVLVRWTPPRAQITGYRLTVGLTRRGQPRQYNVGPSVSKYPLRNLQPASEYTVSLVAIKGNQESPKATGVFTTLQPGSSIPPYNTEVTETTIVITWTPAPRIGFKLGVRPSQGGEAPREVTSDSGSIVVSGLTPGVEYVYTIQVLRDGQERDAPIVNKVVTPLSPPTNLHLEANPDTGVLTVSWERSTTPDITGYRITTTPTNGQQGNSLEEVVHADQSSCTFDNLSPGLEYNVSVYTVKDDKESVPISDTIIPEVPQLTDLSFVDITDSSIGLRWTPLNSSTIIGYRITVVAAGEGIPIFEDFVDSSVGYYTVTGLEPGIDYDISVITLINGGESAPTTLTQQTAVPPPTDLRFTNIGPDTMRVTWAPPPSIDLTNFLVRYSPVKNEEDVAELSISPSDNAVVLTNLLPGTEYVVSVSSVYEQHESTPLRGRQKTGLDSPTGIDFSDITANSFTVHWIAPRATITGYRIRHHPEHFSGRPREDRVPHSRNSITLTNLTPGTEYVVSIVALNGREESPLLIGQQSTVSDVPRDLEVVAATPTSLLISWDAPAVTVRYYRITYGETGGNSPVQEFTVPGSKSTATISGLKPGVDYTITVYAVTGRGDSPASSKPISINYRTEIDKPSQMQVTDVQDNSISVKWLPSSSPVTGYRVTTTPKNGPGPTKTKTAGPDQTEMTIEGLQPTVEYVVSVYAQNPSGESQPLVQTAVTTIPAPTDLKFTQVTPTSLSAQWTPPNVQLTGYRVRVTPKEKTGPMKEINLAPDSSSVVVSGLMVATKYEVSVYALKDTLTSRPAQGVVTTLENVSPPRRARVTDATETTITISWRTKTETITGFQVDAVPANGQTPIQRTIKPDVRSYTITGLQPGTDYKIYLYTLNDNARSSPVVIDASTAIDAPSNLRFLATTPNSLLVSWQPPRARITGYIIKYEKPGSPPREVVPRPRPGVTEATITGLEPGTEYTIYVIALKNNQKSEPLIGRKKTGQEALSQTTISWAPFQDTSEYIISCHPVGTDEEPLQFRVPGTSTSATLTGLTRGATYNVIVEALKDQQRHKVREEVVTVGNSVNEGLNQPTDDSCFDPYTVSHYAVGDEWERMSESGFKLLCQCLGFGSGHFRCDSSRWCHDNGVNYKIGEKWDRQGENGQMMSCTCLGNGKGEFKCDPHEATCYDDGKTYHVGEQWQKEYLGAICSCTCFGGQRGWRCDNCRRPGGEPSPEGTTGQSYNQYSQRYHQRTNTNVNCPIECFMPLDVQADREDSRE

SEQ ID NO: 14579 - protein, 103 aa, Homo sapiens
MTPNSMTENGLTAWDKPKHCPDREHDWKLVGMSEACLHRKSHSERRSTLKNEQSSPHLIQTTWTSSIFHLDHDDVNDQSVSSAQTFQTEEKKCKGYIPSYLDK

SEQ ID NO: 14580 - protein, 587 aa, Homo sapiens
MSAGDAVCTGWLVKSPPERKLQRYAWRKRWFVLRRGRMSGNPDVLEYYRNKHSSKPIRVIDLSECAVWKHVGPSFVRKEFQNNFVFIVKTTSRTFYLVAKTEQEMQVWVHSISQVCNLGHLEDGAADSMESLSYTPSSLQPSSASSLLTAHAASSSLPRDDPNTNAVATEETRSESELLFLPDYLVLSNCETGRLHHTSLPTRCDSWSNSDRSLEQASFDDVFVDCLQPLPSSHLVHPSCHGSGAQEVPSSRPQAALIWSREINGPPRDHLSSSPLLESSLSSTIQVDKNQGSLPCGAKELDIMSNTPPPRPPKPSHLSERRQEEWSTHSGSKKPECTLVPRRISLSGLDNMRTWKADVEGQSLRHRDKRLSLNLPCRFSPMYPTASASIEDSYVPMSPQAGASGLGPHCSPDDYIPMNSGSISSPLPELPANLEPPPVNRDLKPQRKSRPPPLDLRNLSIIREHASLTRTRTVPCSRTSFLSPERNGINSARFFANPVSREDEESYIEMEEHRTASSLSSGALTWTKKFSLDYLALDFNSASPAPMQQKLLLSEEQRVDYVQVDEQKTQALQSTKQEWTDERQSKV

SEQ ID NO: 14581 - protein, 210 aa, Homo sapiens
WVGSLSMGMIFFCCPIVSVFTDLFGCRKTAVVGAAVGFVGLMSSSFVSSIEPLYLTYGIIFACGCSFAYQPSLVILGHYFKKRLGLVNGIVTAGSSVFTILLPLLLRVLIDSVGLFYTLRVLCIFMFVLFLAGFTYRPLATSTKDKESGGSGSSLFSRKKFSPPKKIFNFAIFKVTAYAVWAVGIPLALFGYFVPYVHLAKFSFVILKYE

SEQ ID NO: 14582 - protein, 4865 aa, Homo sapiens
MAEGGEGGEDEIQFLRTEDEVVLQCIATIHKEQRKFCLAAEGLGNRLCFLEPTSEAKYIPPDLCVCNFVLEQSLSVRALQEMLANTGENGGEGAAQGGGHRTLLYGHAVLLRHSFSGMYLTCLTTSRSQTDKLAFDVGLREHATGEACWWTIHPASKQRSEGEKVRIGDDLILVSVSSERYLHLSVSNGNIQVDASFMQTLWNVHPTCSGSSIEEGYLLGGHVVRLFHGHDECLTIPSTDQNDSQHRRIFYEAGGAGTRARSLWRVEPLRISWSGSNIRWGQAFRLRHLTTGHYLALTEDQGLILQDRAKSDTKSTAFSFRASKELKEKLDSSHKRDIEGMGVPEIKYGDSVCFVQHIASGLWVTYKAQDAKTSRLGPLKRKVILHQEGHMDDGLTLQRCQREESQAARIIRNTTALFSQFVSGNNRTAAPITLPIEEVLQTLQDLIAYFQPPEEEMRHEDKQNKLRSLKNRQNLFKEEGMLALVLNCIDRLNVYNSVAHFAGIAREESGMAWKEILNLLYKLLAALIRGNRNNCAQFSNNLDWLISKLDRLESSSGILEVLHCILTESPEALNLIAEGHIKSIISLLDKHGRNHKVLDILCSLCLCNGVAVRANQNLICDNLLPRRNLLLQTRLINDVTSIRPNIFLGVAEGSAQYKKWYFELIIDQVDPFLTAEPTHLRVGWASSSGYAPYPGGGEGWGGNGVGDDLYSYGFDGLHLWSGRIPRAVASINQHLLRSDDVVSCCLDLGVPSISFRINGQPVQGMFENFNTDGLFFPVMSFSAGVKVRFLMGGRHGEFKFLPPSGYAPCYEALLPKEKMRLEPVKEYKRDADGIRDLLGTTQFLSQASFIPCPVDTSQVILPPHLEKIRDRLAENIHELWGMNKIELGWTFGKIRDDNKRQHPCLVEFSKLPETEKNYNLQMSTETLKTLLALGCHIAHVNPAAEEDLKKVKLPKNYMMSNGYKPAPLDLSDVKLLPPQEILVDKLAENAHNVWAKDRIKQGWTYGIQQDLKNKRNPRLVPYALLDERTKKSNRDSLREAVRTFVGYGYNIEPSDQELADSAVEKVSIDKIRFFRVERSYAVRSGKWYFEFEVVTGGDMRVGWARPGCRPDVELGADDQAFVFEGNRGQRWHQGSGYFGRTWQPGDVVGCMINLDDASMIFTLNGELLITNKGSELAFADYEIENGFVPICCLGLSQIGRMNLGTDASTFKFYTMCGLQEGFEPFAVNMNRDVAMWFSKRLPTFVNVPKDHPHIEVMRIDGTMDSPPCLKVTHKTFGTQNSNADMIYCRLSMPVECHSSFSHSPCLDSEAFQKRKQMQEILSHTTTQCYYAIRIFAGQDPSCVWVGWVTPDYHLYSEKFDLNKNCTVTVTLGDERGRVHESVKRSNCYMVWGGDIVASSQRSNRSNVDLEIGCLVDLAMGMLSFSANGKELGTCYQVEPNTKVFPAVFLQPTSTSLFQFELGKLKNAMPLSAAIFRSEEKNPVPQCPPRLDVQTIQPVLWSRMPNSFLKVETERVSERHGWVVQCLEPLQMMALHIPEENRCVDILELCEQEDLMRFHYHTLRLYSAVCALGNSRVAYALCSHVDLSQLFYAIDNKYLPGLLRSGFYDLLISIHLASAKERKLMMKNEYIIPITSTTRNIRLFPDESKRHGLPGVGLRTCLKPGFRFSTPCFVVTGEDHQKQSPEIPLESLRTKALSMLTEAVQCSGAHIRDPVGGSVEFQFVPVLKLIGTLLVMGVFDDDDVRQILLLIDPSVFGEHSAGTEEGAEKEEVTQVEEKAVEAGEKAGKEAPVKGLLQTRLPESVKLQMCELLSYLCDCELQHRVEAIVAFGDIYVSKLQANQKFRYNELMQALNMSAALTARKTKEFRSPPQEQINMLLNFQLGENCPCPEEIREELYDFHEDLLLHCGVPLEEEEEEEEDTSWTGKLCALVYKIKGPPKPEKEQPTEEEERCPTTLKELISQTMICWAQEDQIQDSELVRMMFNLLRRQYDSIGELLQALRKTYTISHTSVSDTINLLAALGQIRSLLSVRMGKEEELLMINGLGDIMNNKVFYQHPNLMRVLGMHETVMEVMVNVLGTEKSQIAFPKMVASCCRFLCYFCRISRQNQKAMFEHLSYLLENSSVGLASPSMRGSTPLDVAASSVMDNNELALSLEEPDLEKVVTYLAGCGLQSCPMLLAKGYPDVGWNPIEGERYLSFLRFAVFVNSESVEENASVVVKLLIRRPECFGPALRGEGGNGLLAAMQGAIKISENPALDLPSQGYKREVSTGDDEEEEEIVHMGNAIMSFYSALIDLLGRCAPEMHLIQTGKGEAIRIRSILRSLVPTEDLVGIISIPLKLPSLNKDGSVSEPDMAANFCPDHKAPMVLFLDRVYGIKDQTFLLHLLEVGFLPDLRASASLDTVSLSTTEAALALNRYICSAVLPLLTRCAPLFAGTEHCTSLIDSTLQTIYRLSKGRSLTKAQRDTIEECLLAICNHLRPSMLQQLLRRLVFDVPQLNEYCKMPLKLLTNHYEQCWKYYCLPSGWGSYGLAVEEELHLTEKLFWGIFDSLSHKKYDPDLFRMALPCLSAIAGALPPDYLDTRITATLEKQISVDADGNFDPKPINTMNFSLPEKLEYIVTKYAEHSHDKWACDKSQSGWKYGISLDENVKTHPLIRPFKTLTEKEKEIYRWPARESLKTMLAVGWTVERTKEGEALVQQRENEKLRSVSQANQGNSYSPAPLDLSNVVLSRELQGMVEVVAENYHNIWAKKKKLELESKGGGSHPLLVPYDTLTAKEKFKDREKAQDLFKFLQVNGIIVSRGMKDMELDASSMEKRFAYKFLKKILKYVDSAQEFIAHLEAIVSSGKTEKSPRDQEIKFFAKVLLPLVDQYFTSHCLYFLSSPLKPLSSSGYASHKEKEMVAGLFCKLAALVRHRISLFGSDSTTMVSCLHILAQTLDTRTVMKSGSELVKAGLRAFFENAAEDLEKTSENLKLGKFTHSRTQIKGVSQNINYTTVALLPILTSIFEHVTQHQFGMDLLLGDVQISCYHILCSLYSLGTGKNIYVERQRPALGECLASLAAAIPVAFLEPTLNRYNPLSVFNTKTPRERSILGMPDTVEDMCPDIPQLEGLMKEINDLAESGARYTEMPHVIEVILPMLCNYLSYWWERGPENLPPSTGPCCTKVTSEHLSLILGNILKIINNNLGIDEASWMKRIAVYAQPIISKARPDLLRSHFIPTLEKLKKKAVKTVQEEEQLKADGKGDTQEAELLILDEFAVLCRDLYAFYPMLIRYVDNNRSNWLKSPDADSDQLFRMVAEVFILWCKSHNFKREEQNFVIQNEINNLAFLTGDSKSKMSKSGGQDQERKKTKRRGDLYSIQTSLIVAALKKMLPIGLNMCTPGDQELISLAKSRYSHRDTDEEVREHLRNNLHLQEKSDDPAVKWQLNLYKDVLKSEEPFNPEKTVERVQRISAAVFHLEQVEQPLRSKKAVWHKLLSKQRKRAVVACFRMAPLYNLPRHRSINLFLHGYQRFWIETEEYSFEEKLVQDLAKSPKVEEEEEEETEKQPDPLHQIILYFSRNALTERSKLEDDPLYTSYSSMMAKSCQSGEDEEEDEDKEKTFEEKEMEKQKTLYQQARLHERGAAEMVLQMISASKGEMSPMVVETLKLGIAILNGGNAGVQQKMLDYLKEKKDAGFFQSLSGLMQSCSVLDLNAFERQNKAEGLGMVTEEGTLIVRERGEKVLQNDEFTRDLFRFLQLLCEGHNSDFQNFLRTQMGNTTTVNVIISTVDYLLRLQESISDFYWYYSGKDIIDESGQHNFSKALAVTKQIFNSLTEYIQGPCIGNQQSLAHSRLWDAVVGFLHVFANMQMKLSQDSSQIELLKELLDLLQDMVVMLLSLLEGNVVNGTIGKQMVDTLVESSTNVEMILKFFDMFLKLKDLTSSDTFKEYDPDGKGIISKKEFQKAMEGQKQYTQSEIDFLLSCAEADENDMFNYVDFVDRFHEPAKDIGFNVAVLLTNLSEHMPNDSRLKCLLDPAESVLNYFEPYLGRIEIMGGAKKIERVYFEISESSRTQWEKPQVKESKRQFIFDVVNEGGEQEKMELFVNFCEDTIFEMQLASQISESDSADRPEEEEEDEDSSYVLEIAGEEEEDGSLEPASAFAMACASVKRNVTDFLKRATLKNLRKQYRNVKKMTAKELVKVLFSFFWMLFVGLFQLLFTILGGIFQILWSTVFGGGLVEGAKNIRVTKILGDMPDPTQFGIHDDTMEAERAEVMEPGITTELVHFIKGEKGDTDIMSDLFGLHPKKEGSLKHGPEVGLGDLSEIIGKDEPPTLESTVQKKRKAQAAEMKAANEAEGKVESEKADMEDGEKEDKDKEEEQAEYLWTEVTKKKKRRCGQKVEKPEAFTANFFKGLEIYQTKLLHYLARNFYNLRFLALFVAFAINFILLFYKVTEEPLEEETEDVANLWNSFNDEEEEEAMVFFVLQESTGYMAPTLRALAIIHTIISLVCVVGYYCLKVPLVVFKREKEIARKLEFDGLYITEQPSEDDIKGQWDRLVINTPSFPNNYWDKFVKRKVINKYGDLYGAERIAELLGLDKNALDFSPVEETKAEAASLVSWLSSIDMKYHIWKLGVVFTDNSFLYLAWYTTMSVLGHYNNFFFAAHLLDIAMGFKTLRTILSSVTHNGKQLVLTVGLLAVVVYLYTVVAFNFFRKFYNKSEDDDEPDMKCDDMMTCYLFHMYVGVRAGGGIGDEIEDPAGDPYEMYRIVFDITFFFFVIVILLAIIQGLIIDAFGELRDQQEQVREDMETKCFICGIGNDYFDTTPHGFETHTLQEHNLANYLFFLMYLINKDETEHTGQESYVWKMYQERCWDFFPAGDCFRKQYEDQLG

SEQ ID NO: 14583 - protein, 829 aa, Homo sapiens
MFALGLPFLVLLVASVESHLGVLGPKNVSQKDAEFERTYVDEVNSELVNIYTFNHTVTRNRTEGVRVSVNVLNKQKGAPLLFVVRQKEAVVSFQVPLILRGMFQRKYLYQKVERTLCQPPTKNESEIQFFYVDVSTLSPVNTTYQLRVSRMDDFVLRTGEQFSFNTTAAQPQYFKYEFPEGVDSVIVKVTSNKAFPCSVISIQDVLCPVYDLDNNVAFIGMYQTMTKKAAITVQRKDFPSNSFYVVVVVKTEDQACGGSLPFYPFAEDEPVDQGHRQKTLSVLVSQAVTSEAYVSGMLFCLGIFLSFYLLTVLLACWENWRQKKKTLLVAIDRACPESASLLGHPRVLADSFPGSSPYEGYNYGSFENVSGSTDGLVDSAGTGDLSYGYQGTRPRVDSMSSVEEDDYDTLTDIDSDKNVIRTKQYLYVADLARKDKRVLRKKYQIYFWNIATIAVFYALPVVQLVITYQTVVNVTGNQDICYYNFLCAHPLGNLSAFNNILSNLGYILLGLLFLLIILQREINHNRALLRNDLCALECGIPKHFGLFYAMGTALMMEGLLSACYHVCPNYTNFQFDTSFMYMIAGLCMLKLYQKRHPDINASAYSAYACLAIVIFFSVLGVVFGKGNTAFWIVFSIIHIIATLLLSTQLYYMGRWKLDSGIFRRILHVLYTDCIRQCSGPLYVDRMVLLVMGNVINWSLAAYGLIMRPNDFASYLLAIGICNLLLYFAFYIIMKLRSGERIKLIPLLCIVCTSVVWGFALFFFFQGLSTWQKTPAESREHNRDCILLDFFDDHDIWHFLSSIAMFGSFLVLLTLDDDLDTVQRDKIYVF

SEQ ID NO: 14584 - protein, 382 aa, Homo sapiens
MAEGLKFKDVVIYFSQKEWECLHSAQKDLYRDVMLENYGNLVLLGLSDTKPNVISLLEQKKEPWMVKRKETKEWCPDWEFGRETKNLSPKENIYEIRSPQQEKARVIREIRCQVERQQGHQEGHFRPAVIPFTSMQCTAHREYQWLHTGEKSCECRKCKNAFRYQSCPIQHEIIHNKEKEPECGECRKIFNSGSDLIKHQTLHESKKHSENNKCAFNHDSGITQPQSINTGEKPHKCKECGKAFRSSSQISQHQRMHLGEKPYKCRECGKAFPSTAQLNLHQRIHTDEKYYESKACGKAFTRPSHLFRHQRIHTGEKPHKCKECGKAFRYDTQLSLHQIIHTGERRYECRECGKVYSCASQLSLHQRIHTGEKPHECKECGK

SEQ ID NO: 14585 - protein, 75 aa, Homo sapiens
MLPPQKKPWESMAKGLVLGALFTSFLLLVYSYAVPPLHAGLASTTPEAAASCSPPALEPEAVIRANGSAGECQPR

SEQ ID NO: 14586 - protein, 241 aa, Homo sapiens
MTSVTRSEIIDEKGPVMSKTHDHQLESSLSPVEVFAKTSASLEMNQGVSEERIHLGSSPKKGGNCDLSHQERLQSKSLHLSPQEQSASYQDRRQSWRRASMKETNRRKSLHPIHQGITELSRSISVDLAESKRLGCLLLSSFQFSIQKLEPFLRDTKGFSLESFRAKASSLSEELKHFADGLETDGTLQKCFEDSNGKASDFSLEASVAEMKEYITKFSLERQTWDQLLLHYQQEAKEILS

SEQ ID NO: 14587 - protein, 181 aa, Homo sapiens
MERGDQPKRTRNENIFNCLYKNPEATFKLICFPWMGGGSTHFAKWGQDTHDLLEVHSLRLPGRESRVEEPLENDISQLVDEVVCALQPVIQDKPFAFFGHSMGSYIAFRTALGLKENNQPEPLHLFLSSATPVHSKAWHRIPKDDELSEEQISHYLMEFGGTPKHFAEAKEFVKQCSPIIR

SEQ ID NO: 14588 - protein, 530 aa, Homo sapiens
MHHPAPAWPRCGWCASHTWQISLGPRSTSFILCPLSSCGPRGEVRSDGWRQLPERLGVGGAGRNMPLGRGLTLWRGSTPTVCLSWSQARCLPGLSQDVAPGAVGVPPLPGVMSVLRRVSFLKKAVDQRNKALTSLNEAMNVSCALLSSGTGPRPISCTTSTTWSRLQTQDVLMATCVLENSSSFSLDQGWTLCIQVLTSSCALDLDSACSAITYTIPVDQLGPGARREVTLPLGPGENGGLDLPVTVSCTLFYSLREVVGGALAPSDSEDPFLDECPSDVLPEQEGVCLPLSRHTVDMLQCLRFPGLAPPHTRAPSPLGPTRDPVATFLETCREPGSQPAGPASLRAEYLPPSVASIKVSAELLRAALKDGHSGVPLCCATLQWLLAENAAVDVVRARALSSIQGVAPDGANVHLIVREVAMTDLCPAGPIQAVEIQVESSSLADICRAHHAVVGRMQTMVTEQATQGSSAPDLRVQYLRQIHANHETLLREVQTLRDRLCTEDEASSCATAQRLLQVYRQLRHPSLILL

SEQ ID NO: 14589 - protein, 1404 aa, Homo sapiens
MAWKTLPIYLLLLLSVFVIQQVSSQDLSSCAGRCGEGYSRDATCNCDYNCQHYMECCPDFKRVCTAELSCKGRCFESFERGRECDCDAQCKKYDKCCPDYESFCAEVHNPTSPPSSKKAPPPSGASQTIKSTTKRSPKPPNKKKTKKVIESEEITEEHSVSENQESSSSSSSSSSSSTIRKIKSSKNSAANRELQKKLKVKDNKKNRTKKKPTPKPPVVDEAGSGLDNGDFKVTTPDTSTTQHNKVSTSPKITTAKPINPRPSLPPNSDTSKETSLTVNKETTVETKETTTTNKQTSTDGKEKTTSAKETQSIEKTSAKDLAPTSKVLAKPTPKAETTTKGPALTTPKEPTPTTPKEPASTTPKEPTPTTIKSAPTTPKEPAPTTTKSAPTTPKEPAPTTTKEPAPTTPKEPAPTTTKEPAPTTTKSAPTTPKEPAPTTPKKPAPTTPKEPAPTTPKEPTPTTPKEPAPTTKEPAPTTPKEPAPTAPKKPAPTTPKEPAPTTPKEPAPTTTKEPSPTTPKEPAPTTTKSAPTTTKEPAPTTTKSAPTTPKEPSPTTTKEPAPTTPKEPAPTTPKKPAPTTPKEPAPTTPKEPAPTTTKKPAPTTPKEPAPTTPKETAPTTPKKLTPTTPEKLAPTTPEKPAPTTPEELAPTTPEEPTPTTPEEPAPTTPKAAAPNTPKEPAPTTPKEPAPTTPKEPAPTTPKETAPTTPKGTAPTTLKEPAPTTPKKPAPKELAPTTTKEPTSTTSDKPAPTTPKGTAPTTPKEPAPTTPKEPAPTTPKGTAPTTLKEPAPTTPKKPAPKELAPTTTKGPTSTTSDKPAPTTPKETAPTTPKEPAPTTPKKPAPTTPETPPPTTSEVSTPTTTKEPTTIHKSPDESTPELSAEPTPKALENSPKEPGVPTTKTPAATKPEMTTTAKDKTTERDLRTTPETTTAAPKMTKETATTTEKTTESKITATTTQVTSTTTQDTTPFKITTLKTTTLAPKVTTTKKTITTTEIMNKPEETAKPKDRATNSKATTPKPQKPTKAPKKPTSTKKPKTMPRVRKPKTTPTPRKMTSTMPELNPTSRIAEAMLQTTTRPNQTPNSKLVEVNPKSEDAGGAEGETPHMLLRPHVFMPEVTPDMDYLPRVPNQGIIINPMLSDETNICNGKPVDGLTTLRNGTLVAFRGHYFWMLSPFSPPSPARRITEVWGIPSPIDTVFTRCNCEGKTFFFKDSQYWRFTNDIKDAGYPKPIFKGFGGLTGQIVAALSTAKYKNWPESVYFFKRGGSIQQYIYKQEPVQKCPGRRPALNYPVYGETTQVRRRRFERAIGPSQTHTIRIQYSPARLAYQDKGVLHNEVKVSILWRGLPNVVTSAISLPNIRKPDGYDYYAFSKDQYYNIDVPSRTARAITTRSGQTLSKVWYNCP

SEQ ID NO: 14590 - protein, 88 aa, Homo sapiens
VPAAPPPPQGFKQEYHDPLYEHGVPGMPGPPAHGFQSPMGIKQEPRDYCVDSEVPNCQSSYMRGGYFSSSHEGCSALGHPEEPASHEL

SEQ ID NO: 14591 - protein, 434 aa, Homo sapiens
MRPPQCLLHTPSLASPLLLLLLWLLGGGVGAEGREDAELLVTVRGGRLRGIRLKTPGGPVSAFLGIPFAEPPMGPRRFLPPEPKQPWSGVVDATTFQSVCYQYVDTLYPGFEGTEMWNPNRELSEDCLYLNVWTPYPRPTSPTPVLVWIYGGGFYSGASSLDVYDGRFLVQAERTVLVSMNYRVGAFGFLALPGSREAPGNVGLLDQRLALQWVQENVAAFGGDPTSVTLFGESAGAASVGMHLLSPPSRGLFHRAVLQSGAPNGPWATVGMGEARRRATQLAHLVGCPPGGTGGNDTELVACLRTRPAQVLVNHEWHVLPQESVFRFSFVPVVDGDFLSDTPEALINAGDFHGLQVLVGVVKDEGSYFLVYGAPGFSKDNESLISRAEFLAGTRSTRRSASGRPSSTAGAPTWCTGRTSSTTTASRIAAQTCD

SEQ ID NO: 14592 - protein, 203 aa, Homo sapiens
IYLAHRVAQAWELAQFIQCVSLGLKWEVGWDPGAEGEQGPSHGEELVMEELPPHQPGSPSHTSKKADVVLLCGDLNMHPEDLGCCLLKEWTGLHDAYLETRDFKGSEEGNTMVPKNCYVSQQELKPFPFGVRIDYVLYKAVSGFYISCKSFETTTGFDPHRGTPLSDHEALMATLFVRHSPPQQNPSSTHGPAERSPLMCVLK

SEQ ID NO: 14593 - protein, 457 aa, Homo sapiens
MRKKWKMGGMKYIFSLLFFLLLEGGKTEQVKHSETYCMFQDKKYRVGERWHPYLEPYGLVYCVNCICSENGNVLCSRVRCPNVHCLSPVHIPHLCCPRCPDSLPPVNNKVTSKSCEYNGTTYQHGELFVAEGLFQNRQPNQCTQCSCSEGNVYCGLKTCPKLTCAFPVSVPDSCCRVCRGDGELSWEHSDGDIFRQPANREARHSYHRSHYDPPPSRQAGGLSRFPGARSHRGALMDSQQASGTIVQIVINNKHKHGQVCVSNGKTYSHGESWHPNLRAFGIVECVLCTCNVTKQECKKIHCPNRYPCKYPQKIDGKCCKVCPGKKAKEELPGQSFDNKGYFCGEETMPVYESVFMEDGETTRKIALETERPPQVEVHVWTIRKGILQHFHIEKISKRMFEELPHFKLVTRTTLSQWKIFTEGEAQISQMCSSRVCRTELEDLVKVLYLERSEKGHC

SEQ ID NO: 14594 - protein, 1400 aa, Homo sapiens
MAARRGRRDGVAPPPSGGPGPDPGGGARGSGWGSRSQAPYGTLGAVSGGEQVLLHEEAGDSGFVSLSRLGPSLRDKDLEMEELMLQDETLLGTMQSYMDASLISLIEDFGSLGESRLSLEDQNEVSLLTALTEILDNADSENLSPFDSIPDSELLVSPREGSSLHKLLTLSRTPPERDLITPVDPLGPSTGSSRGSGVEMSLPDPSWDFSPPSFLETSSPKLPSWRPPRSRPRWGQSPPPQQRSDGEEEEEVASFSGQILAGELDNCVSSIPDFPMHLACPEEEDKATAAEMAVPAAGDESISSLSELVRAMHPYCLPNLTHLASLEDELQEQPDDLTLPEGCVVLEIVGQAATAGDDLEIPVVVRQVSPGPRPVLLDDSLETSSALQLLMPTLESETEAAVPKVTLCSEKEGLSLNSEEKLDSACLLKPREVVEPVVPKEPQNPPANAAPGSQRARKGRKKKSKEQPAACVEGYARRLRSSSRGQSTVGTEVTSQVDNLQKQPQEELQKESGPLQGKGKPRAWARAWAAALENSSPKNLERSAGQSSPAKEGPLDLYPKLADTIQTNPIPTHLSLVDSAQASPMPVDSVEADPTAVGPVLAGPVPVDPGLVDLASTSSELVEPLPAEPVLINPVLADSAAVDPAVVPISDNLPPVDAVPSGPAPVDLALVDPVPNDLTPVDPVLVKSRPTDPRRGAVSSALGGSAPQLLVESESLDPPKTIIPEVKEVVDSLKIESGTSATTHEARPRPLSLSEYRRRRQQRQAETEERSPQPPTGKWPSLPETPTGLADIPCLVIPPAPAKKTALQRSPETPLEICLVPVGPSPASPSPEPPVSKPVASSPTEQVPSQEMPLLARPSPPVQSVSPAVPTPPSMSAALPFPAGGLGMPPSLPPPPLQPPSLPLSMGPVLPDPFTHYAPLPSWPCYPHVSPSGYPCLPPPPTVPLVSGTPGAYAVPPTCSVPWAPPPAPVSPYSSTCTYGPLGWGPGPQHAPFWSTVPPPPLPPASIGRAVPQPKMESRGTPAGPPENVLPLSMAPPLSLGLPGHGAPQTEPTKVEVKPVPASPHPKHKVSALVQSPQMKALACVSAEGVTVEEPASERLKPETQETRPREKPPLPATKAVPTPRQSTVPKLPAVHPARLRKLSFLPTPRTQGSEDVVQAFISEIGIEASDLSSLLEQFEKSEAKKECPPPAPADSLAVGNSGSSCSSSGRSRRCSSSSSSSSSSSSSSSSSSSSRSRSRSPSPRRRSDRRRRYSSYRSHDHYQRQRVLQKERAIEERRVVFIGKIPGRMTRSELKQRFSVFGEIEECTIHFRVQGDNYGFVTYRYAEEAFAAIESGHKLRQADEQPFDLCFGGRRQFCKRSYSDLDSNREDFDPAPVKSKFDSLDFDTLLKQAQKNLRR

SEQ ID NO: 14595 - protein, 169 aa, Homo sapiens
LARQKFSRLMEEKEKLQKHGVCIRVLGDLHLLPLDLQELIAQAVQATKNYNNDISESLLDKCLYTNRSPHPDILIRTSGEVRLSDFLLWQQKARDMYAEERKRQQLERDQATVTEQLLREGLQASGDAQLRRTRLHKLSARREERVQGFLQALELKRADWLARLGTASA

SEQ ID NO: 14596 - protein, 2325 aa, Homo sapiens
MATNIEQIFRSFVVSKFREIQQELSSGRNEGQLNGETNTPIEGNQAGDAAASARSLPNEEIVQKIEEVLSGVLDTELRYKPDLKEGSRKSRCVSVQTDPTDEIPTKKSKKHKKHKNKKKKKKKEKEKKYKRQPEESESKTKSHDDGNIDLESDSFLKFDSEPSAVALELPTRAFGPSETNESPAVVLEPPVVSMEVSEPHILETLKPATKTAELSVVSTSVISEQSEQSVAVMPEPSMTKILDSFAAAPVPTTTLVLKSSEPVVTMSVEYQMKSVLKSVESTSPEPSKIMLVEPPVAKVLEPSETLVVSSETPTEVYPEPSTSTTMDFPESSAIEALRLPEQPVDVPSEIADSSMTRPQELPELPKTTALELQESSVASAMELPGPPATSMPELQGPPVTPVLELPGPSATPVPELPGPLSTPVPELPGPPATAVPELPGPSVTPVPQLSQELPGLPAPSMGLEPPQEVPEPPVMAQELPGLPLVTAAVELPEQPAVTVAMELTEQPVTTTELEQPVGMTTVEHPGHPEVTTATGLLGQPEATMVLELPGQPVATTALELPGQPSVTGVPELPGLPSATRALELSGQPVATGALELPGPLMAAGALEFSGQSGAAGALELLGQPLATGVLELPGQPGAPELPGQPVATVALEISVQSVVTTSELSTMTVSQSLEVPSTTALESYNTVAQELPTTLVGETSVTVGVDPLMAPESHILASNTMETHILASNTMDSQMLASNTMDSQMLASNTMDSQMLASSTMDSQMLATSSMDSQMLATSSMDSQMLATSTMDSQMLATSSMDSQMLATSSMDSQMLATSSMDSQMLATSSMDSQMLATSTMDSQMLATSTMDSQMLATSSMDSQMLASGTMDSQMLASGTMDAQMLASGTMDAQMLASSTQDSAMLGSKSPDPYRLAQDPYRLAQDPYRLGHDPYRLGHDAYRLGQDPYRLGHDPYRLTPDPYRMSPRPYRIAPRSYRIAPRPYRLAPRPLMLASRRSMMMSYAAERSMMSSYERSMMSYERSMMSPMAERSMMSAYERSMMSAYERSMMSPMAERSMMSAYERSMMSAYERSMMSPMADRSMMSMGADRSMMSSYSAADRSMMSSYSAADRSMMSSYTADRSMMSMAADSYTDSYTDTYTEAYMVPPLPPEEPPTMPPLPPEEPPMTPPLPPEEPPEGPALPTEQSALTAENTWPTEVPSSPSEESVSQPEPPVSQSEISEPSAVPTDYSVSASDPSVLVSEAAVTVPEPPPEPESSITLTPVESAVVAEEHEVVPERPVTCMVSETPAMSAEPTVLASEPPVMSETAETFDSMRASGHVASEVSTSLLVPAVTTPVLAESILEPPAMAAPESSAMAVLESSAVTVLESSTVTVLESSTVTVLEPSVVTVPEPPVVAEPDYVTIPVPVVSALEPSVPVLEPAVSVLQPSMIVSEPSVSVQESTVTVSEPAVTVSEQTQVIPTEVAIESTPMILESSIMSSHVMKGINLSSGDQNLAPEIGMQEIALHSGEEPHAEEHLKGDFYESEHGINIDLNINNHLIAKEMEHNTVCAAGTSPVGEIGEEKILPTSETKQRTVLDTYPGVSEADAGETLSSTGPFALEPDATGTSKGIEFTTASTLSLVNKYDVDLSLTTQDTEHDMVISTSPSGGSEADIEGPLPAKDIHLDLPSNNNLVSKDTEEPLPVKESDQTLAALLSPKESSGGEKEVPPPPKETLPDSGFSANIEDINEADLVRPLLPKDMERLTSLRAGIEGPLLASDVGRDRSAASPVVSSMPERASESSSEEKDDYEIFVKVKDTHEKSKKNKNRDKGEKEKKRDSSLRSRSKRSKSSEHKSRKRTSESRSRARKRSSKSKSHRSQTRSRSRSRRRRRSSRSRSKSRGRRSVSKEKRKRSPKHRSKSRERKRKRSSSRDNRKTVRARSRTPSRRSRSHTPSRRRRSRSVGRRRSFSISPSRRSRTPSRRSRTPSRRSRTPSRRSRTPSRRSRTPSRRSRTPSRRRRSRSVVRRRSFSISPVRLRRSRTPLRRRFSRSPIRRKRSRSSERGRSPKRLTDLDKAQLLEIAKANAAAMCAKAGVPLPPNLKPAPPPTIEEKVAKKSGGATIEELTEKCKQIAQSKEDDDVIVNKPHVSDEEEEEPPFYHHPFKLSEPKPIFFNLNIAAAKPTPPKSQVTLTKEFPVSSGSQHRKKEADSVYGEWVPVEKNGEENKDDDNVFSSNLPSEPVDISTAMSERALAQKRLSENAFDLEAMSMLNRAQERIDAWAQLNSIPGQFTGSTGVQVLTQEQLANTGAQAWIKKGQILVAVFLPRSVPAVLFTTLLLPRPRISS

SEQ ID NO: 14597 - protein, 128 aa, Homo sapiens
MDSFDLALLQEWDLESLCVYEPDRNALRRKERERRNQETQQDDGTFNSSYSLFSEPYKTNKGDELSNRIQNTLGNYDEMKDFLTDRSNQSHLVGVPKPGVPQTPVNKIDEHFVADSRAQNQPSSICST

SEQ ID NO: 14598 - protein, 125 aa, Homo sapiens
CGVSTYAPDMSRMLGGEEARPNSWPWQVSLQYSSNGQWYHTCGGSLIANSWVLTAAHCIRQIIKAHKVLQRCSLILFFVRDLCSSQLELTGVSAGSSGIYRVMLGQHNLYVAESGSLAVSVSKIV

SEQ ID NO: 14599 - protein, 756 aa, Homo sapiens
VSFVQYSDEVKSEFKLNTYNDKALALGALQNIRYRGGNTRTGKALTFIKEKVLTWESGMRKNVPKVLVVVTDGRSQDEVKKAALVIQQSGFSVFVVGVADVDYNELANIASKPSERHVFIVDDFESFEKIEDNLITFVCETATSSCPLIYLDGYTSPGFKMLEAYNLTEKNFASVQGVSLESGSFPSYSAYRIQKNAFVNQPTADLHPNGLPPSYTIILLFRLLPETPSDPFAIWQITDRDYKPQVGVIADPSSKTLSFFNKDTRGEVQTVTFDTEEVKTLFYGSFHKVHIVVTSKSVKIYIDCYEIIEKDIKEAGNITTDGYEILGKLLKGERKSAAFQIQSFDIVCSPVWTSRDRCCDIPSRRDEGKCPAFPNSCTCTQDSVGPPGPPGPAGGPGAKGPRGERGISGAIGPPGPRGDIGPPGPQGPPGPQGPNGLSIPGEQGRQGMKGDAGEPGLPGRTGTPGLPGPPGPMGPPGDRGFTGKDGAMGPRGPPGPPGSPGSPGVTGPSGKPGKPGDHGRPGPSGLKGEKGDRGDIASQNMMRAVARQVCEQLISGQMNRFNQMLNQIPNDYQSSRNQPGPPGPPGPPGSAGARGEPGPGGRPGFPGTPGMQGPPGERGLPGEKGERGTGSSGPRGLPGPPGPQGESRTGPPGSTGSRGPPGPPGRPGNSGIRGPPGPPGYCDSSQCASIPYNGQGYPEPYVPEGGAYLPEREPFIVPVEPERTAEYEDYGADEPAEEPPEPHRRWRRALPHGPGQ

SEQ ID NO: 14600 - protein, 81 aa, Homo sapiens
MMCQSEARQGPELRAAKWLHFPQLALRRRLGQLSCMSRPALKLRSWPLTVLYYLLPFGALRPLSRVGWRPVSRVALYKSVP

SEQ ID NO: 14601 - protein, 118 aa, Homo sapiens
MEFGLSWVFLVAILKGVQCEVQLVESGGVVVQPGGSLRLSCAASGFTFDDYTMHWVRQAPGKGLEWVSLISWDGGSTYYADSVKGRFTISRDNSKNSLYLQMNSLRTEDTALYYCAKD

SEQ ID NO: 14602 - protein, 288 aa, Homo sapiens
GCQHGTCHQPWQCICHSGWAGKFCDKGFHGRDCERKAGPCEQAGSPCRNGGQCQDDQGFALNFTCRCLVGFVGARCEVNVDDCLMRPCANGATCLDGINRFSCLCPEGFAGRFCTINLDDCASRPCQRGARCRDRVHDFDCLCPSGYGGKTCELVLPVPDPPTTVDTPLGPTSAVVVPATGPAPHSAGAGLLRISVKEVVRRQEAGLGEPSLVALVVFGALTAALVLATVLLTLRAWRRGVCPPGPCCYPAPHYAPACQDQECQVSMLPAGLPLPRDLPPEPGKTTAL

SEQ ID NO: 14603 - protein, 234 aa, Homo sapiens
NYLFQGRQECYAFNGTQRFLERYIYNREEFARFDSDVGEFRAVTELGRPAAEYWNSQKDILEEKRAVPDRMCRHNYELGGPMTLQRRVQPRVNVSPSKKGPLQHHNLLVCHVTDFYPGSIQVRWFLNGQEETAGVVSTNLIRNGDWTFQILVMLEMTPQQGDVYTCQVEHTSLDSPVTVEWKAQSDSARSKTLTGAGGFVLGLIICGVGIFMHRRSKKGEKACRFNEDLHKQGS

SEQ ID NO: 14604 - protein, 1023 aa, Homo sapiens
QALPDSELTQEALKVSAVPQPADQKTGLSTVTSSFYSHTEKPNISYQQELPDSHLTEEALKVSNVPGPADQKTGVSTVTSTSYSHREKPIVSYQRELPHFTEAGLKILRVPGPADQKTGINILPSNSYPQREHSVISYEQELPDLTEVTLKAIGVPGPADQKTGIQIASSSSYSNREKASIFHQQELPDVTEEALNVFVVPGQGDRKTEIPTVPLSYYSRREKPSVISQQELPDSHLTEEALKVSPVSIPAEQKTGIPIGLSSSYSHSHKEKLKISTVHIPDDQKTEFPAATLSSYSQIEKPKISTVIGPNDQKTPSQTAFHSSYSQTVKPNILFQQQLPDRDQSKGILKISAVPELTDVNTGKPVSLSSSYFHREKSNIFSPQELPGSHVTEDVLKVSTIPGPAGQKTVLPTALPSSFSHREKPDIFYQKDLPDRHLTEDALKISSALGQADQITGLQTVPSGTYSHGENHKLVSEHVQRLIDNLNSSDSSVSSNNVLLNSQADDRVVINKPESAGFRDVGSEEIQDAENSAKTLKEIRTLLMEAENMALKRCNFPAPLARFRDISDISFIQSKKVVCFKEPSSTGVSNGDLLHRQPFTEESPSSRCIQKDIGTQTNLKCRRGIENWEFISSTTVRSPLQEAESKVSMALEETLRQYQAAKSVMRSEPEGCSGTIGNKIIIPMMTVIKSDSSSDASDGNGSCSWDSNLPESLESVSDVLLNFFPYVSPKTSITDSREEEGVSESEDGGGSSVDSLAAHVKNLLQCESSLNHAKEILRNAEEEESRVRAHAWNMKFNLAHDCGYSISELNEDDRRKVEEIKAELFGHGRTTDLSKGLQSPRGMGCKPEAVCSHIIIESHEKGCFRTLTSEHPQLDRHPCAFRSAGPSEMTRGRQNPSSCRAKHVNLSASLDQNNSHFKVWNSLQLKSHSPFQNFIPDEFKISKGLRMPFDEKMDPWLSELVEPAFVPPKEVDFHSSSQMPSPEPMKKFTTSITFSSHRHSKCISNSSVVKITREDEDPTFCFL

SEQ ID NO: 14605 - protein, 1436 aa, Homo sapiens
MNQPPQIAPKRERKTIRIRDPNQGGKDITEEIMSGARTASTPTPPQTGGGLEPQANGETPQVAVIVRPDDRSQGAIIADRPGLPGPEHSPSESQPSSPSPTPSPSPVLEPGSEPNLAVLSIPGDTMTTIQMSVEESTPISRETGEPYRLSPEPTPLAEPILEVEVTLSKPVPESEFSSSPLQAPTPLASHTVEIHEPNGMVPSEDLEPEVESSPELAPPPACPSESPVPIAPTAQPEELLNGAPSPPAVDLSPVSEPEEQAKEVTASMAPPTIPSATPATAPSATSPAQEEEMEEEEEEEEGEAGEAGEAESEKGGEELLPPESTPIPANLSQNLEAAAATQVAVSVPKRRRKIKELNKKEAVGDLLDAFKEANPAVPEVENQPPAGSNPGPESEGSGVPPRPEEADETWDSKEDKIHNAENIQPGEQKYEYKSDQWKPLNLEEKKRYDREFLLGFQFIFASMQKPEGLPHISDVVLDKANKTPLRPLDPTRLQGINCGPDFTPSFANLGRTTLSTRGPPRGGPGGELPRGPQAGLGPRRSQQGPRKEPRKIIATVLMTEDIKLNKAEKAWKPSSKRTAADKDRGEEDADGSKTQDLFRRVRSILNKLTPQMFQQLMKQVTQLAIDTEERLKGVIDLIFEKAISEPNFSVAYANMCRCLMALKVPTTEKPTVTVNFRKLLLNRCQKEFEKDKDDDEVFEKKQKEMDEAATAEERGRLKEELEEARDIARRRSLGNIKFIGELFKLKMLTEAIMHDCVVKLLKNHDEESLECLCRLLTTIGKDLDFEKAKPRMDQYFNQMEKIIKEKKTSSRIRFMLQDVLDLRGSNWVPRRGDQGPKTIDQIHKEAEMEEHREHIKVQQLMAKGSDKRRGGPPGPPISRGLPLVDDGGWNTVPISKGSRPIDTSRLTKITKPGSIDSNNQLFAPGGRLSWGKGSSGGSGAKPSDAASEAARPATSTLNRFSALQQAVPTESTDNRRVVQRSSLSRERGEKAGDRGDRLERSERGGDRGDRLDRARTPATKRSFSKEVEERSRERPSQPEGLRKAASLTEDRDRGRDAVKREAALPPVSPLKAALSEEELEKKSKAIIEEYLHLNDMKEAVQCVQELASPSLLFIFVRHGVESTLERSAIAREHMGQLLHQLLCAGHLSTAQYYQGLYEILELAEDMEIDIPHVWLYLAELVTPILQEGGVPMGELFREITKPLRPLGKAASLLLEILGLLCKSMGPKKVGTLWREAGLSWKEFLPEGQDIGAFVAEQKVEYTLGEESEAPGQRALPSEELNRQLEKLLKEGSSNQRVFDWIEANLSEQQIVSNTLVRALMTAVCYSAIIFETPLRVDVAVLKARAKLLQKYLCDEQKELQALYALQALVVTLEQPPNLLRMFFDALYDEDVVKEDAFYSWESSKDPAEQQGKGVALKSVTAFFKWLREAEEESDHN

SEQ ID NO: 14606 - protein, 804 aa, Homo sapiens
MKSIGVKTVKVCGSKSSVRIEGQPCSLGQSRRKVKLMGERSYTLSIGNGDYFWANKEMLWDYVQTLSDQGAEKHEGTGQSSGITDQEKELSTNAFQAFTSGNYDACLQHLACLQDINKDDYKIILNTAVAEFFKSNQTTTDNLRQTLNQLKNQVHSAVEEMDGLDDVENSMLYYNQAVILYHLRQYTEAISVGEKLYQFIEPFEEKFAQAVCFLLVDLYILTYQAEKALHLLAVLEKMISQGNNNKNGKNETGNNNNKDGSNHKAESGALIEAAKSKIHQYKVRAYIQMKSLKACKREIKSVMNTAGNSAPSLFLKSNFEYLRGNYRKAVKLLNSSNIAEHPGFMKTGECLRCMFWNNLGCIHFAMSKHNLGIFYFKKALQENDNVCAQLSAGSTDPGKKFSGRPMCTLLTNKRYELLYNCGIQLLHIGRPLAAFECLIEAVQVYHANPRLWLRLAECCIAANKGTSEQETKGLPSKKGIVQSIVGQGYHRKIVLASQSIQNTVYNDGQSSAIPVASMEFAAICLRNALLLLPEEQQDPKQENGAKNSNQLGGNTESSESSETCSSKSHDGDKFIPAPPSSPLRKQELENLKCSILACSAYVALALGDNLMALNHADKLLQQPKLSGSLKFLGHLYAAEALISLDRISDAITHLNPENVTDVSLGISSNEQDQGSDKGENEAMESSGKRAPQCYPSSVNSARTVMLFNLGSAYCLRSEYDKARKCLHQAASMIHPKEVPPEAILLAVYLELQNGNTQLALQIIKRNQLLPAVKTHSEVRKKPVFQPVHPIQPIQMPAFTTVQRK

SEQ ID NO: 14607 - protein, 190 aa, Homo sapiens
AKREGRGKRGAWAAPAGVLGGRPRGEPPCLPSGPQRPPLPRRMRFMLLFSRQGKLRLQKWYLATSDKERKKMVRELMQVVLARKPKMCSFLEWRDLKVVYKRYASLYFCCAIEGQDNELITLELIHRYVELLDKYFGSVCELDIIFNFEKAYFILDEFLMGGDVQDTSKKSVLKAIEQADLLQEEDESPR

SEQ ID NO: 14608 - protein, 2694 aa, Homo sapiens
MASRERLFELWMLYCTKKDPDYLKLWLDTFVSSYEQFLDVDFEKLPTRVDDMPPGISLLPDNILQVLRIQLLQCVQKMADGLEEQQQALSILLVKFFIILCRNLSNVEEIGTCSYINYVITMTTLYIQQLKSKKKEKEMADQTCIEEFVIHALAFCESLYDPYRNWRHRISGRILSTVEKSRQKYKPASLTVEFVPFFYQCFQESEHLKESLKCCLLHLFGAIVAGGQRNALQAISPATMEVLMRVLADCDSWEDGDPEEVGRKAELTLKCLTEVVHILLSSNSDQRQVETSTILENYFKLLNSDHSALPNQRRSRQWENRFIALQIKMLNTITAMLDCTDRPVLQAIFLNSNCFEHLIRLLQNCKVFQGQLDCLAISTIQALTAVMNKSPAAKEVFKERIGYTHMLEVLKSLGQPPLELLKELMNMAVEGDHTSVGILGISNVQPLLLLIQWLPELQSHDLQIFISDWLKRICCINRQSRTTCVNANMGIRIIETLDLHSSLHQTCAENLIAIHGSLGSQSVSSEEIRRLLRLLRVDESESVHPYVTPVTRAILTMARKLSLESALQYFNLSHSMAGISVPPIQKWPGSAFSFSAWFCLDQDQLTLGIANKGGKRKQLYSFFTGSGMGFEAFITHSGMLVVAVCTKREYATVMLPDHSFCDSLWHNITVVHMPGKRPFGQSFVYIYDNGQQKVSAPLRFPAMNEPFTSCCIGSAGQRTTTPPPSQIPDPPFSSPITPHRTSFGGILSSASWGGTIEKSKLITKLISAGTQDSEWGCPTSLEGQLGSVIIFYEPLQPPQVKALYLAGPNCLSPWKCQESDMADLPGNILLYYTAKACKNSICLDLSTNCLHGRLTGNKVVNWDIKDIINCIGGLNVLFPLLEQISHFSEGQIPEEKNESTVPESVTPVEGDWLVWTSTKASESRLERNLVATFILIVKHFIQRHPINQGNLIHSHGVATLGALLQKVPSTLMDVNVLMAVQLLIEQVSLEKNMQLLQQMYQYLLFDFRIWNRGDFPFRIGHIQYLSTIIKDSRRVFRKKYGVQFLLDTLRIYYGNGCKYNELSLDDIRTIRTSLYGLIKYFLCKGGSHEEIQSIMGYIAATNEEEQLFGILDVLFSLLRTSPTRGQLFLLLFEPGNADILYALLLNQKYSDRLREIIFKIMEQMLKCTNVYERSKQHIRLREVGYSGLGLLLNEALVNTSLIKNLTHQIINTDPVINFKDLLSVVYISHRAHINVRVAICRKVLQILQFQPDAAHQISQQVGWQDTLVRLFLKAKFENGNTLHKHSRAVLMKDNDKNMSTEDTKKNSDEKTDEEKITSFASANVSSDQWSLEDRHSLDSNTPLFPEDSSVGELSFKSENQEEFWHSNPSHLSLDLSGIDSCEMSDSGSQVPDSLPSTPSPVESTKSFSVHSDRESSITNDMGFSDDFSLLESQERCEEELLQLLTHILNYVMCKGLEKSDDDTWIERGQVFSALSKPGISSELLRPSDEIKLTLLQKMLEWAISENREAKTNPVTAENAFRLVLIIQDFLQSEGLVNSNMWTEKLLEDMMLLFDCLSVCYSESPVWVKLSQIQIQLLLGFIGRGNLQVCAMASAKLNTLLQTKVIENQDEACYILGKLEHVLSQSIKEQTEIYSFLIPLVRTLVSKIYELLFMNLHLPSLPFTNGSSSFFEDFQEYCNSNEWQVYIEKYIVPYMKQYEAHTFYDGHENMALYWKDCYEALMVNMHKRDREGGESKLKFQELFVEPFNRKARQENLRYNNMLKQLSSQQLATLRRWKAIQLYLTCERGPWAKRKQNPIHWKLANVENYSRMRLKLVPNYNFKTHEEASALRDNLGIQHSQPSSDTLLLEVVKQVKVSDMVEDKLDLPEEDITARVNVDEKEEQDQKEKLVLMEDCELITIIDVIPGRLEITTQHIYFYDGSIEKEDGVGFDFKWPHSQIREIHLRRYNLRRSALEIFHVDQSNYFLNFKKEVRNKIYSRLLSLHSPNSYYGSRSPQELFKASGLTQKWVNREISNFDYLIQINTMAGRTYNDLAQYPVFPWILQDYTSEELDLNNPAVFRDLSKPIGVVNEKNAKAMREKYENFEDPMGTIDKFHYGTHYSNSAGVMHYLIRVEPFTTLHIQLQSGRFDCADRQFHSIPATWQALMDNPYDVKELIPEFFYFPEFLENQNQFNLGRLQISKELVNDVILPKWAKSAEDFIYKHRKALESEYVSAHLHEWIDLIFGYKQRGPAAVEALNVFYYCSYEGAVDLDALTDEKERKALEGMINNFGQTPCQLLKEPHPPRLSAEEAVQKPTKIDTSTLNLFQHLPELKSFFIEGISDGIPLLKATIPKNQYRSFMSQGSPELLITISMNYVIGTHGWLPYDRNISNYFTFIKDQTVTNPKTQRSINGSFAPGLEITSKLFVVSHDAKLLFSAGYWDNSIQVMSLTKGKIISHIIRHMDIVTCLATDYCGIHLISGSRDTTCMIWQITQQGGVPVGLASKPFQILYGHTNEVLSVGISTELDMAVSGSRDGTVIIHTIQKGQYMRTLRPPCESSLFLTIPNLAISWEGHIVVYSSTEEKTTLKDKNALHLFSINGKYLGSQILKEQVSDICIIGEHIVTGSIQGFLSIRDLHSLNLSINPLAMRLPIHCVCVTKEYSHILVGLEDGKLIVVGVGKPAEMRSGQLSRKFWGSSKRLSQISAGETEYNTQDSK

SEQ ID NO: 14609 - protein, 539 aa, Homo sapiens
MDCQLSILLLLSCSVLDSFGELIPQPSNEVNLLDSKTIQGELGWISYPSHGWEEISGVDEHYTPIRTYQVCNVMDHSQNNWLRTNWVPRNSAQKIYVELKFTLRDCNSIPLVLGTCKETFNLYYMESDDDHGVKFREHQFTKIDTIAADESFTQMDLGDRILKLNTEIREVGPVNKKGFYLAFQDVGACVALVSVRVYFKKCPFTVKNLAMFPDTVPMDSQSLVEVRGSCVNNSKEEDPPRMYCSTEGEWLVPIGKCSCNAGYEERGFMCQACRPGFYKALDGNMKCAKCPPHSSTQEDGSMNCRCENNYFRADKDPPSMACTRPPSSPRNVISNINETSVILDWSWPLDTGGRKDVTFNIICKKCGWNIKQCEPCSPNVRFLPRQFGLTNTTVTVTDLLAHTNYTFEIDAVNGVSELSSPPRQFAAVSITTNQAAPSPVLTIKKDRTSRNSISLSWQEPEHPNGIILDYEVKYYEKQEQETSYTILRARGTNVTISSLKPDTIYVFQIRARTAAGYGTNSRKFEFETSPDCMYYFNAV

SEQ ID NO: 14610 - protein, 1009 aa, Homo sapiens
MSQMNNVGFSTAILLTPVDPTALLDYREVHQMIRELAIGIYCLNQIPSISLEANYDQSSSCQLPPAYYDTRIGQILINIDYMLKALWHGIYMPKEKRARFSELWRAIMDIDPDGKPQTNKDIFSEFSSAGLTDITKDPDFNEIYDEDVNEDPTYDPNSPEETAVFMKYAENIMLKLTFSTTQIQQYENVFIFETGYWLTNAIKYNQDYLDICTYQRLQQRLYLQKKIIQKHFEKKKDIRRGIGYLKLICFLIPFLLSLKKKMKVPYLSSLLQPFSDDKVKTERELPPFIYGRDFKCQNFHYKENQYFHVHGGIEFDISTPSIENALEDFQKNLEKIRDCAANTFIEDSGYKEYYSIPVMEFHGKSYYVIYFELETFYQQLYKTQWWGAINEIVNNLRLKRLPLTDAQLHEQFKKKLGFKRAMKCKSIPFGMKSAVERGLSAVFHTFSRKTSSSTINVSDEAGYTIFHHAALHNRVSIICQLCNANFKVNQRRFVTFSQGPTPLHLAAQACSLETTVCLLCSKADYTLSEKRGWMPIHFAAFYDNVCIIIALCRKDPSLLEAEATAENQCTPLLLAATSGALDTIQYLFSIGANWRKTDIKGNNIIHLSVLTFHTEVLKYIIKLNIPELPVWKTLVEMLQCESYKRRMMAVMSLEVICLANDQYWRCILDAGTIPALINLLKSSKIKLQCKTVGLLSNISTHKSAVHALVEAGGIPSLINLLVCDEPEVHSRCAVILYDIAQCENKDVIAKYNGIPSLINLLNLNIENVLVNVMNCIRVLCIGNENNQRAVREHKGLPYLIRFLSSDSDVLKAVSSAAIAEVGRDNKEIQDAIAMEGAIPPLVALFKGKQISVQMKGAMAVESLASHNALIQKAFLEKSLTKYLLKLLKAFQIDVKEQGAVALWALAGQTLKQQKYMAEQIGYSFIINMLLSPSAKMQYVGGEAVIALSKDSRMHQNQICEGNGIAPLVRLLRISTIAEGTLLSVIRAVGSICIGYLLKSRLCINTFCLQ

SEQ ID NO: 14611 - protein, 246 aa, Homo sapiens
NNNSIMSFFKTLVSPNKAETKKDPEDTGAEKSPTTSADLKSDKANFTSQETQGAGKNSKGCNPSGHTQSVTTPEPAKEGTKEKSGPTSLPLGKLFWKKSVKEDSVPTGAEENSVKGDGGITHSEEINGKDSSCQTSDSTEKTITPPEPEPTGAPQKGKEGSSKDKKSAAEMNKQKSNKQEAKEPAQCTEQATVDTNSLQNGDKLQKRPEKRQQSLGGFFKGLGPKRMLDAQVQTDPVSIGPVGKSK

SEQ ID NO: 14612 - protein, 715 aa, Homo sapiens
MPLPEPSEQEGESVKAGQEPSPKPGTDVIPAAPRKPREFSKLVLLTASDQDEDGVGSKPQEVHCVLSLEMAGPATLASTLQILPVEEQGGVVQPALEMPEQKCSKLDAAPQSLEFLRTPFGGRLLVLESFLYKQEKAVGDKVYWKCRQHAELGCRGRAITRGLRATVMRGHCHAPDEQGLEARRQREKLPSLALPEGLGEPQGPEGPGGRVEEPLEGVGPWQCPEEPEPTPGLVLSKPALEEEEAPRALSLLSLPPKKRSILGLGQARPLEFLRTCYGGSFLVHESFLYKREKAVGDKVYWTCRDHALHGCRSRAITQGQRVTVMRGHCHQPDMEGLEARRQQEKAVETLQAGQDGPGSQVDTLLRGVDSLLYRRGPGPLTLTRPRPRKRAKVEDQELPTQPEAPDEHQDMDADPGGPEFLKTPLGGSFLVYESFLYRREKAAGEKVYWTCRDQARMGCRSRAITQGRRVTVMRGHCHPPDLGGLEALRQREKRPNTAQRGSPGGPEFLKTPLGGSFLVYESFLYRREKAAGEKVYWTCRDQARMGCRSRAITQGRRVMVMRRHCHPPDLGGLEALRQREHFPNLAQWDSPDPLRPLEFLRTSLGGRFLVHESFLYRKEKAAGEKVYWMCRDQARLGCRSRAITQGHRIMVMRSHCHQPDLAGLEALRQRERLPTTAQQEDPEKIQVQLCFKTCSPESQQIYGDIKDVRLDGESQ

SEQ ID NO: 14613 - protein, 369 aa, Homo sapiens
MRLKNQIISTMEPQVSNGPTSNTSNGPSSNNRNCPSPMQTGATTDDSKTNLIVNYLPQNMTQEEFRSLFGSIGEIESCKLVRDKITGQSLGYGFVNYIDPKDAEKAINTLNGLRLQTKTIKVSYARPSSASIRDANLYVSGLPKTMTQKELEQLFSQYGRIITSRILVDQVTGVSRGVGFIRFDKRIEAEEAIKGLNGQKPSGATEPITVKFANNPSQKSSQALLSQLYQSPNRRYPGPLHHQAQRFRLDNLLNMAYGVKRFSPITIDGMTSLVGMNIPGHTGTGWCIFVYNLSPDSDESVLWQLFGPFGAVNNVKVIRDFNTNKCKGFGFVTMTNYDEAAMAIASLNGYRLGDRVLQVSFKTNKAHKS

SEQ ID NO: 14614 - protein, 1464 aa, Homo sapiens
MSGMGENTSDPSRAETRKRKECPDQLGPSPKRNTEKRNREQENKYIEELAELIFANFNDIDNFNFKPDKCAILKETVKQIRQIKEQEKAAAANIDEVQKSDVSSTGQGVIDKDALGPMMLEALDGFFFVVNLEGNVVFVSENVTQYLRYNQEELMNKSVYSILHVGDHTEFVKNLLPKSIVNGGSWSGEPPRRNSHTFNCRMLVKPLPDSEEEGHDNQEAHQKYETMQCFAVSQPKSIKEEGEDLQSCLICVARRVPMKERPVLPSSESFTTRQDLQGKITSLDTSTMRAAMKPGWEDLVRRCIQKFHAQHEGESVSYAKRHHHEVLRQGLAFSQIYRFSLSDGTLVAAQTKSKLIRSQTTNEPQLVISLHMLHREQNVCVMNPDLTGQTMGKPLNPISSNSPAHQALCSGNPGQDMTLSSNINFPINGPKEQMGMPMGRFGGSGGMNHVSGMQATTPQGSNYALKMNSPSQSSPGMNPGQPTSMLSPRHRMSPGVAGSPRIPPSQFSPAGSLHSPVGVCSSTGNSHSYTNSSLNALQALSEGHGVSLGSSLASPDLKMGNLQNSPVNMNPPPLSKMGSLDSKDCFGLYGEPSEGTTGQAESSCHPGEQKETNDPNLPPAVSSERADGQSRLHDSKGQTKLLQLLTTKSDQMEPSPLASSLSDTNKDSTGSLPGSGSTHGTSLKEKHKILHRLLQDSSSPVDLAKLTAEATGKDLSQESSSTAPGSEVTIKQEPVSPKKKENALLRYLLDKDDTKDIGLPEITPKLERLDSKTDPASNTKLIAMKTEKEEMSFEPGDQPGSELDNLEEILDDLQNSQLPQLFPDTRPGAPAGSVDKQAIINDLMQLTAENSPVTPVGAQKTALRISQSTFNNPRPGQLGRLLPNQNLPLDITLQSPTGAGPFPPIRNSSPYSVIPQPGMMGNQGMIGNQGNLGNSSTGMIGNSASRPTMPSGEWAPQSSAVRVTCAATTSAMNRPVQGGMIRNPAASIPMRPSSQPGQRQTLQSQVMNIGPSELEMNMGGPQYSQQQAPPNQTAPWPESILPIDQASFASQNRQPFGSSPDDLLCPHPAAESPSDEGALLDQLYLALRNFDGLEEIDRALGIPELVSQSQAVDPEQFSSQDSNIMLEQKAPVFPQQYASQAQMAQGSYSPMQDPNFHTMGQRPSYATLRMQPRPGLRPTGLVQNQPNQLRLQLQHRLQAQQNRQPLMNQISNVSNVNLTLRPGVPTQAPINAQMLAQRQREILNQHLRQRQMHQQQQVQQRTLMMRGQGLNMTPSMVAPSGMPATMSNPRIPQANAQQFPFPPNYGISQQPDPGFTGATTPQSPLMSPRMAHTQSPMMQQSQANPAYQAPSDINGWAQGNMGGNSMFSQQSPPHFGQQANTSMYSNNMNINVSMATNTGGMSSMNQMTGQISMTSVTSVPTSGLSSMGPEQVNDPALRGGNLFPNQLPGMDMIKQEGDTTRKYC

SEQ ID NO: 14615 - protein, 453 aa, Homo sapiens
MAGAGGGGCPAGGNDFQWCFSQVKGAIDEDVAEADIISTVEFNYSGDLLATGDKGGRVVIFQREQENKSRPHSRGEYNVYSTFQSHEPEFDYLKSLEIEEKINKIRWLPQQNAAHFLLSTNDKTIKLWKISERDKRAEGYNLKDEDGRLRDPFRITALRVPILKPMDLMVEASPRRIFANAHTYHINSISVNSDHETYLSADDLRINLWHLEITDRSFNIVDIKPANMEELTEVITAAEFHPHQCNVFVYSSSKGTIRLCDMRSSALCDRHSKFFEEPEDPSSRSFFSEIISSISDVKFSHSGRYMMTRDYLSVKVWDLNMESRPVETHQVHEYLRSKLCSLYENDCIFDKFECCWNGSDSAIMTGSYNNFFRMFDRDTRRDVTLEASRESSKPRASLKPRKVCTGGKRRKDEISVDSLDFNKKILHTAWHPVDNVIAVAATNNLYIFQDKIN

SEQ ID NO: 14616 - protein, 634 aa, Homo sapiens
PSPSMFGELLQNASTMGDLRNCPSNCGERIRIRRVLMNAPQIITIGLVWDSDHSDLAEDVIHSLGTCLKLGDLFFRVTDDRAKQSELYLVGMICYYGKHYSTFFFQTKIRKWMYFDDAHVKEIGPKWKDVVTKCIKGHYQPLLLLYADPQGTPVSTQDLPPQAEFQSYSRTCYDSEDSGREPSISSDTRTDSSTESYPYKHSHHESVVSHFSSDSQGTVIYNVENDSMSQSSRDTGHLTDSECNQKHTSKKGSLIERKRSSGRVRRKGDEPQASGYHSEGETLKEKQAPRNASKPSSSTNRLRDFKETVSNMIHNRPSLASQTNVGSHCRGRGGDQPDKKPPRTLPLHSRDWEIESTSSESKSSSSSKYRPTWRPKRESLNIDSIFSKDKRKHCGYTQLSPFSEDSAKEFIPDEPSKPPSYDIKFGGPSPQYKRWGPARPGSHLLEQHPRLIQRMESGYESSERNSSSPVSLDAALPESSNVYRDPSAKRSAGLVPSWRHIPKSHSSSILEVDSTASMGGWTKSQPFSGEEISSKSELDELQEEVARRAQEQELRRKREKELEAAKGFNPHPSRFMDLDELQNQGRSDGFERSLQEAESVFEESLHLEQKGDCAAALALCNEAILNSLSRSKYC

SEQ ID NO: 14617 - protein, 223 aa, Homo sapiens
LQAYICAVQLDHGHAAAWMDLGTLYESCNQPQDAIKCYLNATRSKSCSNTSALAARIKYLQAQLCNLPQGSLQNKTKLLPSIEEAWSLPIPAELTSRQGAMNTAQQNTSDNWSGGHAVSHPPVQQQAHSWCLTPQKLQMRPTGVAQVRSTGIPNGPTADSSLPTNSVSGQQPQLALTRVPSVSQPGVRPACPGQPLANGPFSAGHVPCSTSRTLGSTDTILIG

SEQ ID NO: 14618 - protein, 714 aa, Homo sapiens
MTKRRLQTITACLQLREGSPSLHRGLHPSREEKRDSRMAEEKKLKLSNTVLPSESMKVVAESMGIAQIQEETCQLLTDEVSYRIKEIAQDALKFMHMGKRQKLTTSDIDYALKLKNVEPLYGFHAQEFIPFRFASGGGRELYFYEEKEVDLSDIINTPLPRVPLDVCLKAHWLSIEGCQPAIPENPPPAPKEQQKAEATEPLKSAKPGQEEDGPLKGKGQGATTADGKGKEKKAPPLLEGAPLRLKPRSIHELSVEQQLYYKEITEACVGSCEAKRAEALQSIATDPGLYQMLPRFSTFISEGVRVNVVQNNLALLIYLMRMVKALMDNPTLYLEKYVHELIPAVMTCIVSRQLCLRPDVDNHWALRDFAARLVAQICKHFSTTTNNIQSRITKTFTKSWVDEKTPWTTRYGSIAGLAELGHDVIKTLILPRLQQEGERIRSVLDGPVLSNIDRIGADHVQSLLLKHCAPVLAKLRPPPDNQDAYRAEFGSLGPLLCSQVVKARAQAALQAQQVNRTTLTITQPRPTLTLSQAPQPGPRTPGLLKVPGSIALPVQTLVSARAAAPPQPSPPPTKFIVMSSSSSAPSTQQVLSLSTSAPGSGSTTTSPVTTTVPSVQPIVKLVSTATTAPPSTAPSGPGSVQKYIVVSLPPTGEGKGGPTSHPSPVPPPASSPSPLSGSALCGGKQEAGDSPPPAPGTPKANGSQPNSGSPQPAP

SEQ ID NO: 14619 - protein, 171 aa, Homo sapiens
MSNPSAPPPYEDRNPLYPGPPPPGGYGQPSVLPGGYPAYPGYPQPGYGHPAGYPQPMPPTHPMPMNYGPGHGYDGEERAVSDSFGPGEWDDRKVRHTFIRKVYSIISVQLLITVAIIAIFTFVEPVSAFVRRNVAVYYVSYAVFVVTYLILACCQGPRRRFPWNIILLTLF

SEQ ID NO: 14620 - protein, 440 aa, Homo sapiens
NRAASKYPKTKKYLVTEWLNDKAEKQECPVECPLRITTDPTVLATTLNMLPGLIHSPLICTTPKHYIRFGSPFIPERRRRPLLPDGTFSSCKKRWIKQALEEGMTQTSSVPQETRTQHLYQSNENSSSSSICKDNADLLSPLKKWKSRYLMEQNVTKLLRPLSPVTPPPPNSGSKSPQLATPGSSHPGEEECRNGYSLMFSPVTSLTTASRCNTPLQFENISSPESSPAHRPESLSPELCHRKDLDLAKVGYLDSNTNSCADRPSLLNSGHSDLAPHPSLGPTSETGFPSRSGDGHQTLVRNSDQAFRTEFNLMYAYSPLNAMPRADGLYRGSPLVGDRKPLHLDGGYCSPAEGFSSRYEHGLMKDLSRGSLSPGGERACEGVPSAPQNPPQRKKVSLLEYRKRKQEAKENSAGGGGDSAQSKSKSAGAGQGSSNSVSDT

SEQ ID NO: 14621 - protein, 483 aa, Homo sapiens
MQWIRGGSGMLITGDSIVSAEAVWDHVTMANRELAFKAGDVIKVLDASNKDWWWGQIDDEEGWFPASFVRLWVNQEDEVEEGPSDVQNGHLDPNSDCLCLGRPLQNRDQMRANVINEIMSTERHYIKHLKDICEGYLKQCRKRRDMFSDEQLKVIFGNIEDIYRFQMGFVRDLEKQYNNDDPHLSEIGPCFLEHQDGFWIYSEYCNNHLDACMELSKLMKDSRYQHFFEACRLLQQMIDIAIDGFLLTPVQKICKYPLQLAELLKYTAQDHSDYRYVAAALAVMRNVTQQINERKRRLENIDKIAQWQASVLDWEGEDILDRSSELIYTGEMAWIYQPYGRNQQRVFFLFDHQMVLCKKDLIRRDILYYKGRIDMDKYEVVDIEDGRDDDFNVSMKNAFKLHNKETEEIHLFFAKKLEEKIRWLRAFREERKMVQEDEKIGFEISENQKRQAAMTVRKVPKQKGGTGEGEIEFVGFFAGPTPA

SEQ ID NO: 14622 - protein, 1337 aa, Homo sapiens
MKPAAREARLPPRSPGLRWALPLLLLLLRLGQILCAGGTPSPIPDPSVATVATGENGITQISSTAESFHKQNGTGTPQVETNTSEDGESSGANDSLRTPEQGSNGTDGASQKTPSSTGPSPVFDIKAVSISPTNVILTWKSNDTAASEYKYVVKHKMENEKTITVVHQPWCNITGLRPATSYVFSITPGIGNETWGDPRVIKVITEPIPVSDLRVALTGVRKAALSWSNGNGTASCRVLLESIGSHEELTQDSRLQVNISGLKPGVQYNINPYLLQSNKTKGDPLGTEGGLDASNTERSRAGSPTAPVHDESLVGPVDPSSGQQSRDTEVLLVGLEPGTRYNATVYSQAANGTEGQPQAIEFRTNAIQVFDVTAVNISATSLTLIWKVSDNESSSNYTYKIHVAGETDSSNLNVSEPRAVIPGLRSSTFYNITVCPVLGDIEGTPGFLQVHTPPVPVSDFRVTVVSTTEIGLAWSSHDAESFQMHITQEGAGNSRVEITTNQSIIIGGLFPGTKYCFEIVPKGPNGTEGASRTVCNRTVPSAVFDIHVVYVTTTEMWLDWKSPDGASEYVYHLVIESKHGSNHTSTYDKAITLQGLIPGTLYNITISPEVDHVWGDPNSTAQYTRPSNVSNIDVSTNTTAATLSWQNFDDASPTYSYCLLIEKAGNSSNATQVVTDIGITDATVTELIPGSSYTVEIFAQVGDGIKSLEPGRKSFCTDPASMASFDCEVVPKEPALVLKWTCPPGANAGFELEVSSGAWNNATHLESCSSENGTEYRTEVTYLNFSTSYNISITTVSCGKMAAPTRNTCTTGITDPPPPDGSPNITSVSHNSVKVKFSGFEASHGPIKAYAVILTTGEAGHPSADVLKYTYEDFKKGASDTYVTYLIRTEEKGRSQSLSEVLKYEIDVGNESTTLGYYNGKLEPLGSYRACVAGFTNITFHPQNKGLIDGAESYVSFSRYSDAVSLPQDPGVICGAVFGCIFGALVIVTVGGFIFWRKKRKDAKNNEVSFSQIKPKKSKLIRVENFEAYFKKQQADSNCGFAEEYEDLKLVGISQPKYAAELAENRGKNRYNNVLPYDISRVKLSVQTHSTDDYINANYMPGYHSKKDFIATQGPLPNTLKDFWRMVWEKNVYAIIMLTKCVEQGRTKCEEYWPSKQAQDYGDITVAMTSEIVLPEWTIRDFTVKNIQTSESHPLRQFHFTSWPDHGVPDTTDLLINFRYLVRDYMKQSPPESPILVHCSAGVGRTGTFIAIDRLIYQIENENTVDVYGIVYDLRMHRPLMVQTEDQYVFLNQCVLDIVRSQKDSKVDLIYQNTTAMTIYENLAPVTTFGKTNGYIA

SEQ ID NO: 14623 - protein, 403 aa, Homo sapiens
YEGYDSTANPTVSNVFSTAAFRFGHATIHPLVRRLDASFQEHPDLPGLWLHQAFFSPWTLLRGGYNEWREFCGLPRLETPADLSTAIASRSVADKILDLYKHPDNIDVWLGGLAENFLPRARTGPLFACLIGKQMKALRDGDWFWWENSHVFTDAQRRELEKHSLSRVICDNTGLTRVPMDAFQVGKFPEDFESCDSITGMNLEAWRETFPQDDKCGFPESVENGDFVHCEESGRRVLVYSCRHGYELQGREQLTCTQEGWDFQPPLCKDVNECADGAHPPCHASARCRNTKGGFQCLCADPYELGDDGRTCVDSGRLPRVTWISMSLAALLIGGFAGLTSTVICRWRVLGWKAGILTGCREPSEGKVAGHCRTASCSQNHRTTLFQTQANPKSAGRLFSQHG

SEQ ID NO: 14624 - protein, 660 aa, Homo sapiens
MSRIEKMSILGVRSFGIEDKDKQIITFFSPLTILVGPNGAGKTTIIECLKYICTGDFPPGTKGNTFVHDPKVAQETDVRAQIRLQFRDVNGELIAVQRSMVCTQKSKKTEFKTLEGVITRTKHGEKVSLSSKCAEIDREMISSLGVSKAVLNNVIFCHQEDSNWPLSEGKALKQKFDEIFSATRYIKALETLRQVRQTQGQKVKEYQMELKYLKQYKEKACEIRDQITSKEAQLTSSKEIVKSYENELDPLKNRLKEIEHNLSKIMKLDNEIKALDSRKKQMEKDNSELEEKMEKVFQGTDEQLNDLYHNHQRTVREKERKLVDCHRELEKLNKESRLLNQEKSELLVEQGRLQLQADRHQEHIRARDSLIQSLATQLELDGFERGPFSERQIKNFHKLVRERQEGEAKTANQLMNDFAEKETLKQKQIDEIRDKKTGLGRIIELKSEILSKKQNELKNVKYELQQLEGSSDRILELDQELIKAADKDEQIRKIKSRHSDELTSLLGYFPNKKQLEDWLHSKSKEINQTRDRLAKLNKELASSEQNKNHINNELKRKEEQLSSYEDKLFDVCGSQDFESDLDRLKEEIEKSSKQRAMLAGATAVYSQFITQLTDENQSCCPVCQRVFQTEAELQEVISDLQSKLRLAPDKLKSTESELKK

SEQ ID NO: 14625 - protein, 280 aa, Homo sapiens
MDLIDILWRQDIDLGVSREVFDFSQRRKEYELEKQKKLEKERQEQLQKEQEKAFFAQLQLDEETGEFLPIQPAQHIQSETSGSANYSQVAHIPKSDALYFDDCMQLLAQTFPFVDDNEVSSATFQSLVPDIPGHIESPVFIATNQAQSPETSVAQVAPVDLDGMQQDIEQVWEELLSIPELQCLNIENDKLVETTMVPSPEAKLTEVDNYHFYSSIPSMEKEVGNCSPHFLNAFEDSFSSILSTEDPNQLTVNSLNSDATVNTDFGDEFYSAFIAEPSIS

SEQ ID NO: 14626 - protein, 1739 aa, Homo sapiens
KIYPEEITPLLPAISGEKIAEDQTCFFLQILLKYMVIQAASLEWKNKENQDTGFKFLFTLFRKYYLPHLFPSFTKLTNIYKPVLDIPHLRPKPVYITTTRDNENIYSTKIPYMAARVVFIKWIVTFFLEKKYLTATQNTKNGVDVLPKIIQTVGGGAVQERAPELDGGGPTEQDKSHSNSSTLSDRRLSNSSLCSIEEEHRMVYEMVQRILLSTRGYVNFVNEVFHQAFLLPSCEIAVTRKVVQVYRKWILQDKPVFMEEPDRKDVAQEDAEKLGFSETDSKEASSESSGHKRSSSWGRTYSFTSAMSRGCVTEEENTNVKAGVQALLQVFLTNSANIFLLEPCAEVPVLLKEQVDACKAVLIIFRRMIMELTMNKKTWEQMLQILLRITEAVMQKPKDKQIKDLFAQSLAGLLFRTLMVAWIRANLCVYISRELWDDFLGVLSSLTEWEELINEWANIMDSLTAVLARTVYGVEMTNLPLDKLSEQKEKKQRGKGCVLDPQKGTTVGRSFSLSWRSHPDVTEPMRFRSATTSGAPGVEKARNIVRQKATEVEECQQSENAPAAGSGHLTVGQQQQVLRSSSTSDIPEPLCSDSSQGQKAENTQNSSSSEPQPIQENKGHVKREHEGITILVRRSSSPAELDLKDDLQQTQGKCRERQKSESTNSDTTLGCTNEAELSMGPWQTCEEDPELNTPTDVVADADARHWLQLSPTDASNLTDSSECLTDDCSIIAGGSLTGWHPDSAAVLWRRVLGILGDVNNIQSPKIHARVFCYLYELWYKLAKIRDNLAISLDNQSSPSPPVLIPPLRMFASWLFKAATLPNEYKEGKLQAYRLICAMMTRRQDVLPNSDFLVHFYLVMHLGLTSEDQDILNTIIRHCPPRFFSLGFPGFSMLVGDFITAAARVLSTDILTAPRSEAVTVLGSLVCFPNTYQEIPLLQSVPEVNEAITGTEDVKHYLINILLKNATEEPNEYARCIAVCSLGVWICEELAQCTSHPQVKEAINVIGVTLKFPNKIVAQVACDVLQLLVSYWEKLQMFETSLPRKMAEILVATVAFLLPSAEYSSVETDKKFIVSLLLCLLDWCMALPVSVLLHPVSTAVLEEQHSARAPLLDYIYRVLHCCVCGSSTYTQQSHYILTLADLSSTDYDPFLPLANVKSSEPVQYHSSAELGNLLTVEEEKKRRSLELIPLTARMVMAHLVNHLGHYPLSGGPAILHSLVSENHDNAHVEGSELSFEVFRSPNLQLFVFNDSTLISYLQTPTEGPVGGSPVGSLSDVRVIVRDISGKYSWDGKVLYGPLEGCLAPNGRNPSFLISSWHRDTFGPQKDSSQVEEGDDVLDKLLENIGHTSPECLLPSQLNLNEPSLTPCGMNYDQEKEIIEVILRQNAQEDEYIQSHNFDSAMKVTSQGQPSPVEPRGPFYFCRLLLDDLGMNSWDRRKNFHLLKKNSKLLRELKNLDSRQCRETHKIAVFYIAEGQEDKCSILSNERGSQAYEDFVAGLGWEVDLSTHCGFMGGLQRNGSTGQTAPYYATSTVEVIFHVSTRMPSDSDDSLTKKLRHLGNDEVHIVWSEHSRDYRRGIIPTAFGDVSIIIYPMKNHMFFIAITKKPEVPFFGPLFDGAIVSGKLLPSLVCATCINASRAVKCLIPLYQSFYEERALYLEAIIQNHREVMTFEDFAAQVFSPSPSYSLSGTGALASSLSADLEEPLSEEETEHPLLPLPRATKPRISRKFRCCTSALSRSSH

SEQ ID NO: 14627 - protein, 152 aa, Homo sapiens
GALLEDVAHNPRPRRIAQRGRNTSRMAEDTSPNMNDNILLPVRNNDQALGLTQCMLGCVSWFTCFACSLRTQAQQVLFNTCRCKLLCQKLMEKTGILLLCAFGVSQGPAQSQVEVSLGPGTDYRTLGKTLHCHVTQFPHLPDGCCCENYEMK

SEQ ID NO: 14628 - protein, 1372 aa, Homo sapiens
MSGGASATGPRRGPPGLEDTTSKKKQKDRANQESKDGDPRKETGSRYVAQAGLEPLASGDPSASASHAAGITGSRHRTRLFFPSSSGSASTPQEEQTKEGACEDPHDLLATPTPELLLDWRQSAEEVIVKLRVGVGPLQLEDVDAAFTDTDCVVRFAGGQQWGGVFYAEIKSSCAKVQTRKGSLLHLTLPKKKKPLGTQELVPGLRCQENGQELSPIALEPGPEPHRAKQEARNQKRAQGRGEVGAGAGPGAQAGPSAKRAVHLCRGPEGDGSRDDPGPRGDAPPFVADPATQVEADEQLCIPPLNSQTCLLGSEENLAPLAGEKAVPPGNDPVSPAMVRSRNPGKDDCAKEEMAVAADAATLVDEPESMVNLAFVKNDSYEKGPDSVVVHVYVKEICRDTSRVLFREQDFTLIFQTRDGNFLRLHPGCGPHTTFRWQVKLRNLIEPEQCTFCFTASRIDICLRKRQSQRWGGLEAPAARVGGAKVAVPTGPTPLDSTPPGGAPHPLTGQEEARAVEKDKSKARSEDTGLDSVATRTPMEHVTPKPETHLASPKPTCMVPPMPHSPVSGDSVEEEEEEEKKVCLPGFTGLVNLGNTCFMNSVIQSLSNTRELRDFFHDRSFEAEINYNNPLGTGGRLAIGFAVLLRALWKGTHHAFQPSKLKAIVASKASQFTGYAQHDAQEFMAFLLDGLHEDLNRIQNKPYTETVDSDGRPDEVVAEEAWQRHKMRNDSFIVDLFQGQYKSKLVCPVCAKVSITFDPFLYLPVPLPQKQKVLPVFYFAREPHSKPIKFLVSVSKENSTASEVLDSLSQSVHVKPENLRLAEVIKNRFHRVFLPSHSLDTVSPSDTLLCFELLSSELAKERVVVLEVQQRPQVPSVPISKCAACQRKQQSEDEKLKRCTRCYRVGYCNQLCQKTHWPDHKGLCRPENIGYPFLVSVPASRLTYARLAQLLEGYARYSVSVFQPPFQPGRMALESQSPGCTTLLSTGSLEAGDSERDPIQPPELQLVTPMAEGDTGLPRVWAAPDRGPVPSTSGISSEMLASGPIEVGSLPAGERVSRPEAAVPGYQHPSEAMNAHTPQFFIYKIDSSNREQRLEDKGDTPLELGDDCSLALVWRNNERLQEFVLVASKELECAEDPGSAGEAARAGHFTLDQCLNLFTRPEVLAPEEAWYCPQCKQHREASKQLLLWRLPNVLIVQLKRFSFRSFIWRDKINDLVEFPVRNLDLSKFCIGQKEEQLPSYDLYAVINHYGGMIGGHYTACARLPNDRSSQRSDVGWRLFDDSTVTTVDESQVVTRYAYVLFYRRRNSPVERPPRAGHSEHHPDLGPAAEAAASQGLGPGQAPEVAPTRTAPERFAPPVDRPAPTYSNMEEVD

SEQ ID NO: 14629 - protein, 222 aa, Homo sapiens
MADDQGCIEEQGVEDSANEDSVDAKPDRSSFVPSLFSKKKKNVTMRSIKTTRDRVPTYQYNMNFEKLGKCIIINNKNFDKVTGMGVRNGTDKDAEALFKCFRSLGFDVIVYNDCSCAKMQDLLKKASEEDHTNAACFACILLSHGEENVIYGKDGVTPIKDLTAHFRGDRCKTLLEKPKLFFIQACRGTELDDGIQADSGPINDTDANPRYKIPVEADFLFA

SEQ ID NO: 14630 - protein, 1239 aa, Homo sapiens
MTIWQMQKQAQRGSPARTHSMMSLSVRPQRRLLSARVNRSQSFAGVLGSHERGPRSFPVFSPPGPPRKPPALSRVSRMFSVAHPAAKVPQPERLDLVYTALKRGLTAYLEVHQQEQEKLQGQIRESKRNSRLGFLYDLDKQVKSIERFLRRLEFHASKIDELYEAYCVQRRLRDGAYNMVRAYTTGSPGSREARDSLAEATRGHREYTESMCLLESELEAQLGEFHLRMKGLAGFARLCVGDQYEICMKYGRQRWKLRGRIEGSGKQVWDSEETIFLPLLTEFLSIKVTELKGLANHVVVGSVSCETKDLFAALPQVVAVDINDLGTIKLSLEVTWSPFDKDDQPSAASSVNKASTVTKRFSTYSQSPPDTPSLREQAFYNMLRRQEELENGTAWSLSSESSDDSSSPQLSGTARHSPAPRPLVQQPEPLPIQVAFRRPETPSSGPLDEEGAVAPVLANGHAPYSRTLSHISEASVDAALAEASVEAVGPESLAWGPSPPTHPAPTHGEHPSPVPPALDPGHSATSSTLGTTGSVPTSTDPAPSAHLDSVHKSTDSGPSELPGPTHTTTGSTYSAITTTHSAPSPLTHTTTGSTHKPIISTLTTTGPTLNIIGPVQTTTSPTHTMPSPTHTTASPTHTSTSPTHTPTSPTHKTSMSPPTTTSPTPSGMGLVQTATSPTHPTTSPTHPTTSPILINVSPSTSLELATLSSPSKHSDPTLPGTDSLPCSPPVSNSYTQADPMAPRTPHPSPAHSSRKPLTSPAPDPSESTVQSLSPTPSPPTPAPQHSDLCLAMAVQTPVPTAAGGSGDRSLEEALGALMAALDDYRGQFPELQGLEQEVTRLESLLMQRQGLTRSRASSLSITVEHALESFSFLNEDEDEDNDVPGDRPPSSPEAGAEDSIDSPSARPLSTGCPALDAALVRHLYHCSRLLLKLGTFGPLRCQEAWALERLLREARVLEAVCEFSRRWEIPASSAQEVVQFSASRPGFLTFWDQCTERLSCFLCPVERVLLTFCNQYGARLSLRQPGLAEAVCVKFLEDALGQKLPRRPQPGPGEQLTVFQFWSFVETLDSPTMEAYVTETAEEVLLVRNLNSDDQAVVLKALRLAPEGRLRRDGLRALSSLLVHGNNKVMAAVSTQLRSLSLGPTFRERALLCFLDQLEDEDVQTRVAGCLALGCIKAPEGIEPLVYLCQTDTEAVREAARQSLQQCGEEGQSAHRRLEESLDALPRIFGPGSMASTAF

SEQ ID NO: 14631 - protein, 676 aa, Homo sapiens
MAAAKVALTKRADPAELRTIFLKYASIEKNGEFFMSPNDFVTRYLNIFGESQPNPKTVELLSGVVDQTKDGLISFQEFVAFESVLCAPDALFMVAFQLFDKAGKGEVTFEDVKQVFGQTTIHQHIPFNWDSEFVQLHFGKERKRHLTYAEFTQFLLEIQLEHAKQAFVQRDNARTGRVTAIDFRDIMVTIRPHVLTPFVEECLVAAAGGTTSHQVSFSYFNGFNSLLNNMELIRKIYSTLAGTRKDVEVTKEEFVLAAQKFGQVTPMEVDILFQLADLYEPRGRMTLADIERIAPLEEGTLPFNLAEAQRQQKASGDSARPVLLQVAESAYRFGLGSVAGAVGATAVYPIDLVKTRMQNQRSTGSFVGELMYKNSFDCFKKVLRYEGFFGLYRGLLPQLLGVAPEKAIKLTVNDFVRDKFMHKDGSVPLAAEILAGGCAGGSQVIFTNPLEIVKIRLQVAGEITTGPRVSALSVVRDLGFFGIYKGAKACFLRDIPFSAIYFPCYAHVKASFANEDGQVSPGSLLLAGAIAGMPAASLVTPADVIKTRLQVAARAGQTTYSGVIDCFRKILREEGPKALWKGAGARVFRSSPQFGVTLLTYELLQRWFYIDFGGVKPMGSEPVPKSRINLPAPNPDHVGGYKLAVATFAGIENKFGLYLPLFKPSVSTSKAIGGGP

SEQ ID NO: 14632 - protein, 961 aa, Homo sapiens
ATAATSPALKRLDLRDPAALFETHGAEEIRGLERQVRAEIEHKKEELRQMVGERYRDLIEAADTIGQMRRCAVGLVDAVKATDQYCARLRQAGSAAPRPPRAQQPQQPSQEKFYSMAAQIKLLLEIPEKIWSSMEASQCLHATQLYLLCCHLHSLLQLDSSSSRYSPVLSRFPILIRQVAAASHFRSTILHESKMLLKCQGVSDQAVAEALCSIMLLEESSPRQALTDFLLARKATIQKLLNQPHHGAGIKAQICSLVELLATTLKQAHALFYTLPEGLLPDPALPCGLLFSTLETITGQHPAGKGTGVLQEEMKLCSWFKHLPASIVEFQPTLRTLAHPISQEYLKDTLQKWIHMCNEDIKNGITNLLMYVKSMKGLAGIRDAMWELLTNESTNHSWDVLCRRLLEKPLLFWEDMMQQLFLDRLQTLTKEGFDSISSSSKELLVSALQELESSTSNSPSNKHIHFEYNMSLFLWSESPNDLPSDAAWVSVANRGQFASSGLSMKAQAISPCVQNFCSALDSKLKVKLDDLLAYLPSDDSSLPKDVSPTQAKSSAFDRYADAGTVQEMLRTQSVACIKHIVDCIRAELQSIEEGVQGQQDALNSAKLHSVLFMARLCQSLGELCPHLKQCILGKSESSEKPAREFRALRKQGKVKTQEIIPTQAKWQEVKEVLLQQSVMGYQVWSSAVVKVLIHGFTQSLLLDDAGSVLATATSWDELEIQEEAESGSSVTSKIRLPAQPSWYVQSFLFSLCQEINRVGGHALPKVTLQEMLKSCMVQVVAAYEKLSEEKQIKKEGAFPVTQNRALQLLYDLRYLNIVLTAKGDEVKSGRSKPDSRIEKVTDHLEALIDPFDLDVFTPHLNSNLHRLVQRTSVLFGLVTGTENQLAPRSSTFNSQEPHNILPLASSQIRFGLLPLSMTSTRKAKSTRNIETKAQVGAKSKRLIRGWVPTSHRATHDQLPFK

SEQ ID NO: 14633 - protein, 561 aa, Homo sapiens
MADHNPDSDSTPRTLLRRVLDTADPRTPRRPRSARAGARRALLETASPRKLSGQTRTIARGRSHGARSVGRSAHIQASGHLEEQTPRTLLKNILLTAPESSILMPESVVKPVPAPQAVQPSRQESSCGSLELQLPELEPPTTLAPGLLAPGRRKQRLRLSVFQQGVDQGLSLSQEPQGNADASSLTRSLNLTFATPLQPQSVQRPGLARRPPARRAVDVGAFLRDLRDTSLAPPNIVLEDTQPFSQPMVGSPNVYHSLPCTPHTGAEDAEQAAGRKTQSSGPGLQKNSPGKPAQFLAGEAEEVNAFALGFLSTSSGVSGEDEVEPLHDGVEEAEKKMEEEGVSVSEMEATGAQGPSRVEEAEGHTEVTEAEGSQGTAEADGPGASSGDEDASGRAASPESASSTPESLQARRHHQFLEPAPAPGAAVLSSEPAEPLLVRHPPRPRTTGPRPRQDPHKAGLSHYVKLFSFYAKMPMERKALEMVEKCLDKYFQHLCDDLEVFAAHAGRKTVKPEDLELLMRRQGLVTDQVSLHVLVERHLPLEYRQLLIPCAYSGNSVFPAQ

SEQ ID NO: 14634 - protein, 944 aa, Homo sapiens
MSVACVLKRKAVLWQDSFSPHLKHHPQEPANPNMPVVLTSGTGSQAQPQPAANQALAAGTHSSPVPGSIGVAGRSQDDAMVDYFFQRQHGEQLGGGGSGGGGYNNSKHRWPTGDNIHAEHQVRSMDELNHDFQALALEGRAMGELFQRPNALAVQQLTAAQQQQYALAAAHQPHIGLAPAAFVPNPYIISAAPPGTDPYTAGLAAAATLGPAVVPHQYYGVTPWGVYPASLFQQQAAAAAAATNSANQQTTPQAQQGQQQVLRGGASQRPLTPNQNQQGQQTDPLVAAAAVNSALAFGQGLAAGMPGYPVLAPAAYYDQTGALVVNAGARNGLGAPVRLVAPAPVIISSSAAQAAVAAAAASANGAAGGLAGTTNGPFRPLGTQQPQPQPQQQPNNNLASSSFYGNNSLNSNSQSSSLFSQGSAQPANTSLGFGSSSSLGATLGSALGGFGTAVANSNTGSGSRRDSLTGSSDLYKRTSSSLTPIGHSFYNGLSFSSSPGPVGMPLPSQGPGHSQTPPPSLSSHGSSSSLNLGGLTNGSGRYISAAPGAEAKYRSASSASSLFSPSSTLFSSSRLRYGMSDVMPSGRSRLLEDFRNNRYPNLQLREIAGHIMEFSQDQHGSRFIQLKLERATPAERQLVFNEILQAAYQLMVDVFGNYVIQKFFEFGSLEQKLALAERIRGHVLSLALQMYGCRVIQKALEFIPSDQQNEMVRELDGHVLKCVKDQNGNHVVQKCIECVQPQSLQFIIDAFKGQVFALSTHPYGCRVIQRILEHCLPDQTLPILEELHQHTEQLVQDQYGNYVIQHVLEHGRPEDKSKIVAEIRGNVLVLSQHKFASNVVEKCVTHASRTERAVLIDEVCTMNDGPHSALYTMMKDQYANYVVQKMIDVAEPGQRKIVMHKIRPHIATLRKYTYGKHILAKLEKYYMKNGVDLGPICGPPNGII

SEQ ID NO: 14635 - protein, 661 aa, Homo sapiens
MASTDYSTYSQAAAQQGYSAYTAQPTQGYAQTTQAYGQQSYGTYGQPTDVSYTQAQTTATYGQTAYATSYGQPPTVEGTSTGYTTPTAPQAYSQPVQGYGTGAYDTTTATVTTTQASYAAQSAYGTQPAYPAYGQQPAATAPTRPQDGNKPTETSQPQSSTGGYNQPSLGYGQSNYSYPQVPGSYPMQPVTAPPSYPPTSYSSTQPTSYDQSSYSQQNTYGQPSSYGQQSSYGQQSSYGQQPPTSYPPQTGSYSQAPSQYSQQSSSYGQQSSFRQDHPSSMGVYGQESGGFSGPGENRSMSGPDNRGRGRGGFDRGGMSRGGRGGGRGGMGAGERGGFNKPGGPMDEGPDLDLGPPVDPDEDSDNSAIYVQGLNDSVTLDDLADFFKQCGVVKMNKRTGQPMIHIYLDKETGKPKGDATVSYEDPPTAKAAVEWFDGKDFQGSKLKVSLARKKPPMNSMRGGLPPREGRGMPPPLRGGPGGPGGPGGPMGRMGGRGGDRGGFPPRGPRGSRGNPSGGGNVQHRAGDWQCPNPGCGNQNFAWRTECNQCKAPKPEGFLPPPFPPPGGDRGRGGPGGMRGGRGGLMDRGGPGGMFRGGRGGDRGGFRGGRGMDRGGFGGGRRGGPGGPPGPLMEQMGGRRGGRGGPGKMDKGEHRQERRDRPY

SEQ ID NO: 14636 - protein, 648 aa, Homo sapiens
FLQLQILSQQQQQQQHRFSYLGMHQAQLKEPNEQMVRNPNSSSTPLSNTPLSPVKNSFSGQTGVSSFKPGPLPPNLDDLKVSELRQQLRIRGLPVSGTKTALMDRLRPFQDCSGNPVPNFGDITTVTFPVTPNTLPNYQSSSSTSALSNGFYHFGSTSSSPPISPASSDLSVAGSLPDTFNDASPSFGLHPSPVHVCTEESLMSSLNGGSVPSELDGLDSEKDKMLVEKQKVINELTWKLQQEQRQVEELRMQLQKQKRNNCSEKKPLPFLAASIKQEEAVSSCPFASQVPVKRQSSSSECHPPACEAAQLQPLGNAHCVESSDQTNVLSSTFLSPQCSPQHSPLGAVKSPQHISLPPSPNNPHFLPSSSGAQGEGHRVSSPISSQVCTAQNSGAHDGHPPSFSPHSSSLHPPFSGAQADSSHGAGGNPCPKSPCVQQKQMTRSQQMDELLDVLIESGEMPADAREDHSCLQKVPKIPRSSRSPTAVLTKPSASFEQASSGSQIPFDPYATDSDEHLEVLLNSQSPLGKMSDVTLLKIGSEEPHFDGIMDGFSGKAAEDLFNAHEILPGPLSPMQTQFSPSSVDSNGLQLSFTESPWETMEWLDLTPPNSTPGFSALTTSSPSIFNIDFLDVTDLNLNSSMDLHLQQW

SEQ ID NO: 14637 - protein, 672 aa, Homo sapiens
MEALEVDDISPALEVTEEFFSTLDSNLEKAVQQAEVYGIQEVPELVGHEVLSNITDNGAMRNVTSLGKGGMIWDHCKSRLLETKAQNVFPAKEQFMVQRGTTPDNLSWMEQKEASTFNFFNICQRRRDRPRSVNDLLDETSTFKPGHARSRSDITQVDWRVVLKTTPLQQQQQQQPLLQGPHVTRPSFLLPSPNKIEDAQGNTEHKQTFPNILKKGYLEIRKDHDSYWQSCYAELSPYNLYFYSLDSSGNQNLYATYQLSHFQSISVLGNLEARMVDTVLYDNTQLQLKAESPWEALDWGQKLWEVVHAAVPGYMGRQNELTISPGLGHHDDYTQNHSFQKKTSGLLPPSPVLDSSKQYQNILKSGTLYRLTVQNNWKAFTFVLSRAYLMAFQPGKLDEDPLLSYNVDVCLAVQMDNLDGCDSCFQVIFPQDVLRLRAETRQRAQEWMEALKIAANVARSSEQNLQVTLRNKPKDQMGGHELRKNKRQSVTTSFLSILTTLSLERGLTAQSFKCAGCQRSIGLSNGKAKVCNYSGWYYCSSCHVDDSFLIPARIVHNWDTSKYKVSKQAKEFLEYVYEEPLIDIQQENAMLYHHAEPLAAVLRLRQRLKSLRAYLFSCRAAVAEDLRRRNDQQHALVMLNVFGEFSPENTSFNRSTCIHLPTCSRPRHYSQI

SEQ ID NO: 14638 - protein, 822 aa, Homo sapiens [sequence omitted]

SEQ ID NO: 14639 - protein, 721 aa, Homo sapiens
MEEELKCPVCGSLFREPIILPCSHNVCLPCARTIAVQTPDGGSAAGGLGGGAGGGGDHADKLSLYSETDSGYGSYTPSLKSPNGVRVLPMVPAPPGSSAAAARGAACSSLSSSSSSITCPQCHRSASLDHRGLRGFQRNRLLEAIVQRYQQGRGAVPGTSAAAAVAICQLCDRTPPEPAATLCEQCDVLYCSACQLKCHPSRGPFAKHRLGAPSGGGGCKSPGGAGAGATGGSTARKFPTCPEHEMENYSMYCVSCRTPVCYLCLEEGRHAKHEVKPLGAMWKQHKAQLSQALNGVSDKAKEAKEFLVQLKNILQQIQENGLDYEACLVAQCDALVDALTRQKAKLLTKVTKEREHKLKMVWDQINHCTLKLRQSTGLMEYCLEVIKENDPSGFLQISDALIKRVQVSQEQWVKGALEPKVSAEFDLTLDSEPLLQAIHQLDFIQMKCRVPPVPLLQLEKCCTRNNSVTLAWRMPPFTHSPVDGYILELDDGAGGQFREVYVGKETLCTIDGLHFNSTYNARVKAFNSSGVGPYSKTVVLQTSDVAWFTFDPNSGHRDIILSNDNQTATCSSYDDRVVLGTAAFSKGVHYWELHVDRYDNHPDPAFGVARASVVKDMMLGKDDKAWAMYVDNNRSWFMHCNSHTNRTEGGVCKGATVGVLLDLNKHTLTFFINGQQQGPTAFSHVDGVFMPALSLNRNVQVTLHTGLEVPTNLGRPKLSGN

SEQ ID NO: 14640 - protein, 193 aa, Homo sapiens
MAAIRKKLVIVGDGACGKTCLLIVFSKDQFPEVYVPTVFENYVADIEVDGKQVELALWDTAGQEDYDRLRPLSYPDTDVILMCFSIDSPDSLENIPEKWTPEVKHFCPNVPIILVGNKKDLRNDEHTRRELAKMKQEPVKPEEGRDMANRIGAFGYMECSAKTKDGVREVFEMATRAALQARRGKKKSGCLVL

SEQ ID NO: 14641 - protein, 422 aa, Homo sapiens
MEPPASKVPEVPTAPATDAAPKRVEIQMPKPAEAPTAPSPAQTLENSEPAPVSQLQSRLEPKPQPPVAEATPRSQEATEAAPSCVGDMADTPRDAGLKQAPASRNEKAPVDFGYVGIDSILEQMRRKAMKQGFEFNIMVVGQSGLGKSTLINTLFKSKISRKSVQPTSEERIPKTIEIKSITHDIEEKGVRMKLTVIDTPGFGDHINNENCWQPIMKFINDQYEKYLQEEVNINRKKRIPDTRVHCCLYFIPATGHSLRPLDIEFMKRLSKVVNIVPVIAKADTLTLEERVHFKQRITADLLSNGIDVYPQKEFDEDSEDRLVNEKFREMIPFAVVGSDHEYQVNGKRILGRKTKWGTIEVENTTHCEFAYLRDLLIRTHMQNIKDITSSIHFEAYRVKRLNEGSSAMANGMEEKEPEAPEM

SEQ ID NO: 14642 - protein, 587 aa, Homo sapiens
PVVSSRVSPGTRPTAMGSFSSHMTEFPRKRKGSDSDPSHQNPLTYLLSTRIEISASSGSREAHSQTEKRRRDKMNNLIEELSAMIPQCNPMARKLDKLTVLRMAVQHLRSLKGLTNSYVGSNYRPSFLQDNELRHLILKTAEGFLFVVGCERGKILFVSKSVSKILNYDQASLTGQSLFDFLHPKDVAKVKEQLSSFDISPREKLIDAKTGLQVHSNLHAGRTRVYSGSRRSFFCRIKSCKISVKEEHGCLPNSKKKEHRKFYTIHCTGYLRSWPPNIVGMEEERNSKKDNSNFTCLVAIGRLQPYIVPQNSGEINVKPTEFITRFAVNGKFVYVDQRATAILGYLPQELLGTSCYEYFHQDDHNNLTDKHKAVLQSKEKILTDSYKFRAKDGSFVTLKSQWFSFTNPWTKELEYIVSVNTLVLGHSEPGEASFLPCSSQSSEESSRQSCMSVPGMSTGTVLGAGSIGTDIANEILDLQRLQSSSYLDDSSPTGLMKDTHTVNCRSMSNKELFPPSPSEMGELEATRQNQSTVAVHSHEPLLSDGAQLDFDALCDNDDTAMAAFMNYLEAEGGLGDPGDFSDIQWTL

SEQ ID NO: 14643 - protein, 638 aa, Homo sapiens
MENLQTNFSLVQGSTKKLNGMGDDGSPPAKKMITDIHANGKTINKVPTVKKEHLDDYGEAPVETDGEHVKRTCTSVPETLHLNPSLKHTLAQFHLSSQSSLGGPAAFSARHSQESMSPTVFLPLPSPQVLPGPLLIPSDSSTELTQTVLEGESISCFQVGGEKRLCLPQVLNSVLREFTLQQINTVCDELYIYCSRCTSDQLHILKVLGILPFNAPSCGLITLTDAQRLCNALLRPRTFPQNGSVLPAKSSLAQLKETGSAFEVEHECLGKCQGLFAPQFYVQPDAPCIQCLECCGMFAPQTFVMHSHRSPDKRTCHWGFESAKWHCYLHVNQKYLGTPEEKKLKIILEEMKEKFSMRSGKRNQSKTDAPSGMELQSWYPVIKQEGDHVSQTHSFLHPSYYLYMCDKVVAPNVSLTSAVSQSKELTKTEANASISNNSTSKRKSESATCNLVRDINKVGIGLVAAASSPLLVKDVICEDDKGKIMEEVMRTYLKQQEKLNLILQKKQQLQMEVKMLSSSKSMKELTEEQQNLQKELESLQNEHAQRMEEFYVEQKDLEKKLEQIMKQKCTCDSNLEKDKEAEYAGQLAELRQRLDHAEADRQELQDELRQEREARQKLEMMIKELKLQILKSSKTAKE

SEQ ID NO: 14644 - protein, 1805 aa, Homo sapiens
MAGPRPSPWARLLLAALISVSLSGTLANRCKKAPVKSCTECVRVDKDCAYCTDEMFRDRRCNTQAELLAAGCQRESIVVMESSFQITEETQIDTTLRRSQMSPQGLRVRLRPGEERHFELEVFEPLESPVDLYILMDFSNSMSDDLDNLKKMGQNLARVLSQLTSDYTIGFGKFVDKVSVPQTDMRPEKLKEPWPNSDPPFSFKNVISLTEDVDEFRNKLQGERISGNLDAPEGGFDAILQTAVCTRDIGWRPDSTHLLVFSTESAFHYEADGANVLAGIMSRNDERCHLDTTGTYTQYRTQDYPSVPTLVRLLAKHNIIPIFAVTNYSYSYYEKLHTYFPVSSLGVLQEDSSNIVELLEEAFNRIRSNLDIRALDSPRGLRTEVTSKMFQKTRTGSFHIRRGEVGIYQVQLRALEHVDGTHVCQLPEDQKGNIHLKPSFSDGLKMDAGIICDVCTCELQKEVRSARCSFNGDFVCGQCVCSEGWSGQTCNCSTGSLSDIQPCLREGEDKPCSGRGECQCGHCVCYGEGRYEGQFCEYDNFQCPRTSGFLCNDRGRCSMGQCVCEPGWTGPSCDCPLSNATCIDSNGGICNGRGHCECGRCHCHQQSLYTDTICEINYSAIHPGLCEDLRSCVQCQAWGTGEKKGRTCEECNFKVKMVDELKRAEEVVVRCSFRDEDDDCTYSYTMEGDGAPGPNSTVLVHKKKDCPPGSFWWLIPLLLLLLPLLALLLLLCWKYCACCKACLALLPCCNRGHMVGFKEDHYMLRENLMASDHLDTPMLRSGNLKGRDVVRWKVTNNMQRPGFATHAASINPTELVPYGLSLRLARLCTENLLKPDTRECAQLRQEVEENLNEVYRQISGVHKLQQTKFRQQPNAGKKQDHTIVDTVLMAPRSAKPALLKLTEKQVEQRAFHDLKVAPGYYTLTADQDARGMVEFQEGVELVDVRVPLFIRPEDDDEKQLLVEAIDVPAGTATLGRRLVNITIIKEQARDVVSFEQPEFSVSRGDQVARIPVIRRVLDGGKSQVSYRTQDGTAQGNRDYIPVEGELLFQPGEAWKELQVKLLELQEVDSLLRGRQVRRFHVQLSNPKFGAHLGQPHSTTIIIRDPDELDRSFTSQMLSSQPPPHGDLGAPQNPNAKAAGSRKIHFNWLPPSGKPMGYRVKYWIQGDSESEAHLLDSKVPSVELTNLYPYCDYEMKVCAYGAQGEGPYSSLVSCRTHQEVPSEPGRLAFNVVSSTVTQLSWAEPAETNGEITAYEVCYGLVNDDNRPIGPMKKVLVDNPKNRMLLIENLRESQPYRYTVKARNGAGWGPEREAIINLATQPKRPMSIPIIPDIPIVDAQSGEDYDSFLMYSDDVLRSPSGSQRPSVSDDTEHLVNGRMDFAFPGSTNSLHRMTTTSAAAYGTHLSPHVPHRVLSTSSTLTRDYNSLTRSEHSHSTTLPRDYSTLTSVSSHGLPPIWEHGRSRLPLSWALGSRSRAQMKGFPPSRGPRDSIILAGRPAAPSWGPDSRLTAGVPDTPTRLVFSALGPTSLRVSWQEPRCERPLQGYSVEYQLLNGGELHRLNIPNPAQTSVVVEDLLPNHSYVFRVRAQSQEGWGREREGVITIESQVHPQSPLCPLPGSAFTLSTPSAPGPLVFTALSPDSLQLSWERPRRPNGDIVGYLVTCEMAQGGGPATAFRVDGDSPESRLTVPGLSENVPYKFKVQARTTEGFGPEREGIITIESQDGGPFPQLGSRAGLFQHPLQSEYSSITTTHTSATEPFLVDGLTLGAQHLEAGGSLTRHVTQEFVSRTLTTSGTLSTHMDQQFFQT

SEQ ID NO: 14645 - protein, 352 aa, Homo sapiens
MATDVQLADYPLMSPKAELKLEKKSGRKPRSPRDSGPQKELVIPGIVDFERIRRALRTPKPQTPGTYCFGRLSHHSFFSRHHPHPQHVTHIQDLTGKPVCVVRDFPAPLPESTVFSGCQMGIPTISVPIGDPQSNRNPQLSSEAWKKELKELASRVAFLTKEDELKKKEQKEQKEEPLREQGAKYSAETGRLIPASTRAVGRRRSHQGQQSQSSSRHEGVQAFLLQDQELLVLELLCRILETDLLSAIQFWLLYAPPKEKDLALGLLQTAVAQLLPQPLVSIPTEKLLSQLPEVHEPPQEKQEPPCSQSPKKTKISPFTKSEKPEYIGEAQVLQMHSSQNTEKKTSKPRAES

SEQ ID NO: 14646 - protein, 493 aa, Homo sapiens
MAAEPNKTEIQTLFKRLRAVPTNKACFDCGAKNPSWASITYGVFLCIDCSGVHRSLGVHLSFIRSTELDSNWNWFQLRCMQVGGNANATAFFRQHGCTANDANTKYNSRAAQMYREKIRQLGSAALARHGTDPPAWDAPATEPSGTQQPAPSTESSGLAQPEHGPNTDLLGTSPKASLELKSSIIGKKKPAAAKKGLGAKKGLGAQKVSSQSFSEIERQAQVAEKLREQQAADAKKQAEESMVASMRLAYQELQIDRKKEEKKLQNLEGKKREQAERLGMGLVSRSSVSHSVLSEMQVIEQETPVSAKSSRSQLDLFDDVGTFASGPPKYKDNPFSLGESFGSRWDTDAAWGMDRVEEKEPEVTISSIRPISERATNRREVESRSSGLESSEARQKFAGAKAISSDMFFGREVDAEYEARSRLQQLSGSSAISSSDLFGDMDGAHGAGSVSLGNVLPTADIAQFKQGVKSVAGKMAVLANGVMNSLQDRYGSY

SEQ ID NO: 14647 - protein, 46 aa, Homo sapiens
MRYSLSPDNHLEDGIMNMANFLRGFEEKGIKNDRPEDQLSKEKKKI

SEQ ID NO: 14648 - protein, 458 aa, Homo sapiens
MFSCFCFSLQDNSFSSTTVTECDEDPVSLHEDQTDCSSLRDENNKENYPDAGALVEEHAPPSWEPQQQNVEATVLVDSVLRPSMGNFKSRKPKSIFKAESGRSHGESQETEHVVSSQSECQVRAGTPAHESPQNNAFKCQETVRLQPRIDQRTAISPKDAFETRQDLNEEEAAQVHGVKDPAPASTQSVLADGTDSADPSPVHKDGQNEADSAPEDLHSVGTSRLLYHITDGDNPLLSPRCSIFSQSQRFNLDPESAPSPPSTQQFMMPRSSSRCSCGDGKEPQTITQLTKHIQSLKRKIRKFEEKFEQEKKYRPSHGDKTSNPEVLKWMNDLAKGRKQLKELKLKLSEEQGSAPKGPPRNLLCEQPTVPRENGKPEAAGPEPSSSGEETPDAALTCLKERREQLPPQEDSKVTKQDKNLIKPLYDRYRIIKQILSTPSLIPTIVSQDTCMLLLCTDV

SEQ ID NO: 14649 - protein, 1054 aa, Homo sapiens
MGTAQVLPGILQKHCCILPDRNTESQCTLCGEPEEEEAGDLVQPGISFPGPAEEDLDPQYSWSPTQHFNEERYSPAPRSMKGLSGSRTQPPLCSGHTCGLAPPEDCEHLHHGPDARPPYLLSPADSCPGGRHRCSPRSSVHSECVMMPVVLGDHVSSSTFPRMHYSSHYDTRDDCAVAHAGAKINRIPANLLDQFEKQLPLHRDGFHTLQYQRTSAAAEQRSESPGRIRHLVHSVQKLFTKSHSLEGSSKSNANGTKADGRADDHHHAHHAKHSKRSKSKERKPEGKPRPGMSSWWSSDDNLDSDSTYRTPSVLNRHHLGPVAHCYPDALQSPFGDLSLKTSKSNNDVKCSACEGLALTPDAKYLKRSSWSTLTVSQAKEAYRKSSLNLDKPLLHQDAKPALRPCHYLQVPQDEWGGYPTGGKDEEIPCRRMRSGSYIKAMGDEESGESDSSPKTSPKSAILPEPLLKSIGQRPLGEHQTQTYLQAASDVPVGHSLDPAANYNSPKFRSRNQSYMRAVSTLSQASCVSQVSEAEINGQFESVCESVFSEVESQAMDALDLPGCFRTRSHSYLRAIQAGYSQDDECIPMMTPSDITSTIRSTAAVSYTNYKKTPPPVPPRTTSKPLISVTAQSSTESTQDAYQDSRAQRMSPWPQDSRGLYNSTDSLDSNKAMNLALETAAAQRHLPESQSSSVRTSDKAILVSKAEELLKSRCSSIGIQDSEFPEHQPYPRSDVETATDSDTESRGLREYHSVGVQVEDEKRHGRFKRSNSVTAAVQADLELEGFPGHITTEDKGLQFGSSFQRHSEPSTPTQYSAVRTVRTQGLFSYREDYRTQVDTSTLPPPDPWLEPAIDTVETGRMSPCRRDGSWFLKLLHAETKRMEGWCKEMEREAEENDLSEEILGKIRSAVGSAQLLMSQKFQQFYWLCQQNMDPSAMPRPTSQDLAGYWDMLQLSIEDVSMKFDELQRLRLNDWKMMESPERKEERKVPPPIPKKPPKGKFPITREKSLDLPDRQRQEARRRLMAAKRAASFRQNSASERADSIEIYIPEAQTRL

SEQ ID NO: 14650 - protein, 466 aa, Homo sapiens
MEVAPEQPRWMAHPAVLNAQHPDSHHPGLAHNYMEPAQLLPPDEVDVFFNHLDSQGNPYYANPAHARARVSYSPAHARLTGGQMCRPHLLHSPGLPWLDGGKAALSAAAAHHHNPWTVSPFSKTPLHPSAAGGPGGPLSVYPGAGGGSGGGSGSSVASLTPTAAHSGSHLFGFPPTPPKEVSPDPSTTGAASPASSSAGGSAARGEDKDGVKYQVSLTESMKMESGSPLRPGLATMGTQPATHHPIPTYPSYVPAAAHDYSSGLFHPGGFLGGPASSFTPKQRSKARSCSEGRECVNCGATATPLWRRDGTGHYLCNACGLYHKMNGQNRPLIKPKRRLTTTTTLWRRNANGDPVCNACGLYYKLHNVNRPLTMKKEGIQTRNRKMSNKSKKSKKGAECFEELSKCMQEKSSPFSAAALAGHMAPVGHLPPFSHSGHILPTPTPIHPSSSLSFGHPHPSSMVTAMG

SEQ ID NO: 14651 - protein, 2504 aa, Homo sapiens
MSGSTQPVAQTWRATEPRYPPHSLSYPVQIARTHTDVGLLEYQHHSRDYASHLSPGSIIQPQRRRPSLLSEFQPGNERSQELHLRPESHSYLPELGKSEMEFIESKRPRLELLPDPLLRPSPLLATGQPAGSEDLTKDRSLTGKLEPVSPPSPPHTDPELELVPPRLSKEELIQNMDRVDREITMVEQQISKLKKKQQQLEEEAAKPPEPEKPVSPPPIESKHRSLVQIIYDENRKKAEAAHRILEGLGPQVELPLYNQPSDTRQYHENIKINQAMRKKLILYFKRRNHARKQWEQKFCQRYDQLMEAWEKKVERIENNPRRRAKESKVREYYEKQFPEIRKQRELQERMQRVGQRGSGLSMSAARSEHEVSEIIDGLSEQENLEKQMRQLAVIPPMLYDADQQRIKFINMNGLMADPMKVYKDRQVMNMWSEQEKETFREKFMQHPKNFGLIASFLERKTVAECVLYYYLTKKNENYKSLVRRSYRRRGKSQQQQQQQQQQQQQQQQQPMPRSSQEEKDEKEKEKEAEKEEEKPEVENDKEDLLKEKTDDTSGEDNDEKEAVASKGRKTANSQGRRKGRITRSMANEANSEEAITPQQSAELASMELNESSRWTEEEMETAKKGLLEHGRNWSAIARMVGSKTVSQCKNFYFNYKKRQNLDEILQQHKLKMEKERNARRKKKKAPAAASEEAAFPPVVEDEEMEASGVSGNEEEMVEEAEATVNNSSDTESIPSPHTEAAKDTGQNGPKPPATLGADGPPPGPPTPPPEDIPAPTEPTPASEATGAPTPPPAPPSPSAPPPVVPKEEKEEETAAAPPVEEGEEQKPPAAEELAVDTGKAEEPVKSECTEEAEEGPAKGKDAEAAEATAEGALKAEKKEGGSGRATTAKSSGAPQDSDSSATCSADEVDEAEGGDKNRLLSPRPSLLTPTGDPRANASPQKPLDLKQLKQRAAAIPPIQVTKVHEPPREDAAPTKPAPPAPPPPQNLQPESDAPQQPGSSPRGKSRSPAPPADKEAEKPVFFPAFAAEAQKLPGDPPCWTSGLPFPVPPREVIKASPHAPDPSAFSYAPPGHPLPLGLHDTARPVLPRPPTISNPPPLISSAKHPSVLERQIGAISQGMSVQLHVPYSEHAKAPVGPVTMGLPLPMDPKKLAPFSGVKQEQLSPRGQAGPPESLGVPTAQEASVLRGTALGSVPGGSITKGIPSTRVPSDSAITYRGSITHGTPADVLYKGTITRIIGEDSPSRLDRGREDSLPKGHVIYEGKKGHVLSYEGGMSVTQCSKEDGRSSSGPPHETAAPKRTYDMMEGRVGRAISSASIEGLMGRAIPPERHSPHHLKEQHHIRGSITQGIPRSYVEAQEDYLRREAKLLKREGTPPPPPPSRDLTEAYKTQALGPLKLKPAHEGLVATVKEAGRSIHEIPREELRHTPELPLAPRPLKEGSITQGTPLKYDTGASTTGSKKHDVRSLIGSPGRTFPPVHPLDVMADARALERACYEESLKSRPGTASSSGGSIARGAPVIVPELGKPRQSPLTYEDHGAPFAGHLPRGSPVTTREPTPRLQEGSLSSSKASQDRKLTSTPREIAKSPHSTVPEHHPHPISPYEHLLRGVSGVDLYRSHIPLAFDPTSIPRGIPLDAAAAYYLPRHLAPNPTYPHLYPPYLIRGYPDTAALENRQTIINDYITSQQMHHNAATAMAQRADMLRGLSPRESSLALNYAAGPRGIIDLSQVPHLPVLVPPTPGTPATAMDRLAYLPTAPQPFSSRHSSSPLSPGGPTHLTKPTTTSSSERERDRDRERDRDREREKSILTSTTTVEHAPIWRPGTEQSSGSSGGGGGSSSRPASHSHAHQHSPISPRTQDALQQRPSVLHNTGMKGIITAVEPSTPTVLRSTSTSSPVRPAATFPPATHCPLGGTLDGVYPTLMEPVLLPKEAPRVARPERPRADTGHAFLAKPPARSGLEPASSPSKGSEPRPLVPPVSGHATIARTPAKNLAPHHASPDPPAPPASASDPHREKTQSKPFSIQELELRSLGYHGSSYSPEGVEPVSPVSSPSLTHDKGLPKHLEELDKSHLEGELRPKQPGPVKLGGEAAHLPHLRPLPESQPSSSPLLQTAPGVKGHQRVVTLAQHISEVITQDYTRHHPQQLSAPLPAPLYSFPGASCPVLDLRRPPSDLYLPPPDHGAPARGSPHSEGGKRSPEPNKTSVLGGGEDGIEPVSPPEGMTEPGHSRSAVYPLLYRDGEQTEPSRMGSKSPGNTSQPPAFFSKLTESNSAMVKSKKQEINKKLNTHNRNEPEYNISQPGTEIFNMPAITGTGLMTYRSQAVQEHASTNMGLEAIIRKALMGKYDQWEESPPLSANAFNPLNASASLPAAMPITAADGRSDHTLTSPGGGGKAKVSGRPSSRKAKSPAPGLASGDRPPSVSSVHSEGDCNRRTPLTNRVWEDRPSSAGSTPFPYNPLIMRLQAGVMASPPPPGLPAGSGPLAGPHHAWDEEPKPLLCSQYETLSDSE

SEQ ID NO: 14652 - protein, 376 aa, Homo sapiens
MTLPMSDPTAWATAMNNLGMAPLGIAGQPILPDFDPALGMMTGIPPITPMMPGLGIVPPPIPPDMPVVKEIIHCKSCTLFPPNPNLPPPATRERPPGCKTVFVGGLPENGTEQIIVEVFEQCGEIIAIRKSKKNFCHIRFAEEYMVDKALYLSGYRIRLGSSTDKKDTGRLHVDFAQARDDLYEWECKQRMLAREERHRRRMEEERLRPPSPPPVVHYSDHECSIVAEKLKDDSKFSEAVQTLLTWIERGEVNRRSANNFYSMIQSANSHVRRLVNEKAAHEKDMEEAKEKFKQALSGILIQFEQIVAVYHSASKQKAWDHFTKAQRKNISVWCKQAEEIRNIHNDELMGIRREEEMEMSDDEIEEMTETKETEES

SEQ ID NO: 14653 - protein, 1100 aa, Homo sapiens
MESLLLPVLLLLAILWTQAAALINLKYSVEEEQRAGTVIANVAKDAREAGFALDPRQASAFRVVSNSAPHLVDINPSSGLLVTKQKIDRDLLCRQSPKCIISLEVMSSSMEICVIKVEIKDLNDNAPSFPAAQIELEISEAASPGTRIPLDSAYDPDSGSFGVQTYELTPNELFGLEIKTRGDGSRFAELVVEKSLDRETQSHYSFRITALDGGDPPRLGTVGLSIKVTDSNDNNPVFSESTYAVSVPENSPPNTPVIRLNASDPDEGTNGQVVYSFYGYVNDRTRELFQIDPHSGLVTVTGALDYEEGHVYELDVQAKDLGPNSIPAHCKVTVSVLDTNDNPPVINLLSVNSELVEVSESAPPGYVIALVRVSDRDSGLNGRVQCRLLGNVPFRLQEYESFSTILVDGRLDREQHDQYNLTIQARDGGVPMLQSAKSFTVLITDENDNHPHFSKPYYQVIVQENNTPGAYLLSVSARDPDLGLNGSVSYQIVPSQVRDMPVFTYVSINPNSGDIYALRSFNHEQTKAFEFKVLAKDGGLPSLQSNATVRVIILDVNDNTPVITAPPLINGTAEVYIPRNSGIGYLVTVVKAEDYDEGENGRVTYDMTEGDRGFFEIDQVNGEVRTTRTFGESSKSSYELIVVAHDHGKTSLSASALVLIYLSPALDAQESMGSVNLSLIFIIALGSIAGILFVTMIFVAIKCKRDNKEIRTYNCRIAEYSYGHQKKSSKKKKISKNDIRLVPRDVEETDKMNVVSCSSLTSSLNYFDYHQQTLPLGCRRSESTFLNVENQNTRNTSANHIYHHSFNSQGPQQPDLIINGVPLPETENYSFDSNYVNSRAHLIKSSTFKDLEGNSLKDSGHEESDQTDSEHDVQRSLYCDTAVNDVLNTSVTSMGSQMPDHDQNEGFHCREECRILGHSDRCWMPRNPMPIRSKSPEHVRNIIALSIEATAADVEAYDDCGPTKRTFATFGKDVSDHPAEERPTLKGKRTVDVTICSPKVNSVIREAGNGCEAISPVTSPLHLKSSLPTKPSVSYTIALAPPARDLEQYVNNVNNGPTRPSEAEPRGADSEKVMHEVSPILKEGRNKESPGVKRLKDIVL

SEQ ID NO: 14654 - protein, 202 aa, Homo sapiens
TIMEKSETELKDTYARWLPLGLGLNHLGKGEAIEAILAALEVVSEPFRSFANTLVDVCAYAGSGNVLKVQQLLHICSEHFDSKEKEEDKDKKEKKDKDKKEAPADMGAHQLRYGEPTLRRAVPLALALISVSNPRLNILDTLSKFSHDADPEVSYNSIFAMGMVGSGTNNARLAAMLRQLAQYHAKDPNNLFMVRLAQGLTH

SEQ ID NO: 14655 - protein, 541 aa, Homo sapiens
MADEDGEGIHPSAPHRNGGGGGGGGSGLHCAGNGGGGGGGPRVVRIVKSESGYGFNVRGQVSEGGQLRSINGELYAPLQHVSAVLPGGAADRAGVRKGDRILEVNHVNVEGATHKQVVDLIRAGEKELILTVLSVPPHEADNLDPSDDSLGQSFYDYTEKQAVPISVPRYKHVEQNGEKFVVYNVYMAGRQLCSKRYREFAILHQNLKREFANFTFPRLPGKWPFSLSEQQLDARRRGLEEYLEKVCSIRVIGESDIMQEFLSESDENYNGVSDVELRVALPDGTTVTVRVKKNSTTDQVYQAIAAKVGMDSTTVNYFALFEVISHSFVRKLAPNEFPHKLYIQNYTSAVPGTCLTIRKWLFTTEEEILLNDNDLAVTYFFHQAVDDVKKGYIKAEEKSYQLQKLYEQRKMVMYLNMLRTCEGYNEIIFPHCACDSRRKGHVITAISITHFKLHACTEEGQLENQVIAFEWDEMQRWDTDEEGMAFCFEYARGEKKPRWVKIFTPYFNYMHECFERVFCELKWRKENIFQMARSQQRDVAT

SEQ ID NO: 14656 - protein, 463 aa, Homo sapiens
MHSASSMLGAVKMEGHEPSDWSSYYAEPEGYSSVSNMNAGLGMNGMNTYMSMSAAAMGSGSGNMSAGSMNMSSYVGAGMSPSLAGMSPGAGAMAGMGGSAGAAGVAGMGPHLSPSLSPLGGQAAGAMGGLAPYANMNSMSPMYGQAGLSRARDPKTYRRSYTHAKPPYSYISLITMAIQQSPNKMLTLSEIYQWIMDLFPFYRQNQQRWQNSIRHSLSFNDCFLKVPRSPDKPGKGSFWTLHPDSGNMFENGCYLRRQKRFKCEKQLALKEAAGAAGSGKKAAAGAQASQAQLGEAAGPASETPAGTESPHSSASPCQEHKRGGLGELKGTPAAALSPPEPAPSPGQQQQAAAHLLGPPHHPGLPPEAHLKPEHHYAFNHPFSINNLMSSEQQHHHSHHHHQPHKMDLKAYEQVMHYPGYGSPMPGSLAMGPVTNKTGLDASPLAADTSYYQGVYSRPIMNSS

SEQ ID NO: 14657 - protein, 275 aa, Homo sapiens
MLEERSEARPTAQWSVEDEEEAVHEQCQHERDRQLQAQDEEGGGHVPERPKQEMLLSLKPSEAPELDEDEGFGDWSQRPEQRQQHEGAQGALDSGEPPQCRSPEGEQEDRPGLHAYEKEDSDEVHLEELSLSKEGPGPEDTVQDNLGAAGAEEEQEEHQKCQQPRTPSPLVLEGTIEQSSPPLSPTTKLIDRTESLNRSIEKSNSVKKSQPDLPISKIDQWLEQYTQAIETAGRTPKLARQASIELPSMAVASTKSRWETGEVQAQSAAKTPSCK

SEQ ID NO: 14658 - protein, 489 aa, Homo sapiens
MYTSHEDIGYDFEDGPKDKKTLKPHPNIDGGWAWMMVLSSFFVHILIMGSQMALGVLNVEWLEEFHQSRGLTAWVSSLSMGITLIVGPFIGLFINTCGCRQTAIIGGLVNSLGWVLSAYAANVHYLFITFGVAAGLGSGMAYLPAVVMVGRYFQKRRALAQGLSTTGTGFGTFLMTVLLKYLCAEYGWRNAMLIQGAVSLNLCVCGALMRPLSPGKNPNDPGEKDVRGLPAHSTESVKSTGQQGRTEEKDGGLGNEETLCDLQAQECPDQAGHRKNMCALRILKTVSWLTMRVRKGFEDWYSGYFGTASLFTNRMFVAFIFWALFAYSSFVIPFIHLPEIVNLYNLSEQNDVFPLTSIIAIVHIFGKVILGVIADLPCISVWNVFLLANFTLVLSIFILPLMHTYAGLAVICALIGFSSGYFSLMPVVTEDLVGIEHLANAYGIIICANGISALLGPPFAGKLSEVLRAQSACTYGALCYKVPDKEEGF

SEQ ID NO: 14659 - protein, 3122 aa, Homo sapiens
MPGAAGVLLLLLLSGGLGGVQAQRPQQQRQSQAHQQRGLFPAVLNLASNALITTNATCGEKGPEMYCKLVEHVPGQPVRNPQCRICNQNSSNPNQRHPITNAIDGKNTWWQSPSIKNGIEYHYVTITLDLQQVFQIAYVIVKAANSPRPGNWILERSLDDVEYKPWQYHAVTDTECLTLYNIYPRTGPPSYAKDDEVICTSFYSKIHPLENGEIHISLINGRPSADDPSPELLEFTSARYIRLRFQRIRTLNADLMMFAHKDPREIDPIVTRRYYYSVKDISVGGMCICYGHARACPLDPATNKSRCECEHNTCGDSCDQCCPGFHQKPWRAGTFLTKTECEACNCHGKAEECYYDENVARRNLSLNIRGKYIGGGVCINCTQNTAGINCETCTDGFFRPKGVSPNYPRPCQPCHCDPIGSLNEVCVKDEKHARRGLAPGSCHCKTGFGGVSCDRCARGYTGYPDCKACNCSGLGSKNEDPCFGPCICKENVEGGDCSRCKSGFFNLQEDNWKGCDECFCSGVSNRCQSSYWTYGKIQDMSGWYLTDLPGRIRVAPQQDDLDSPQQISISNAEARQALPHSYYWSAPAPYLGNKLPAVGGQLTFTISYDLEEEEEDTERVLQLMIILEGNDLSISTAQDEVYLHPSEEHTNVLLLKEESFTIHGTHFPVRRKEFMTVLANLKRVLLQITYSFGMDAIFRLSSVNLESAVSYPTDGSIAAAVEVCQCPPGYTGSSCESCWPRHRRVNGTIFGGICEPCQCFGHAESCDDVTGECLNCKDHTGGPYCDKCLPGFYGEPTKGTSEDCQPCACPLNIPSNNFSPTCHLDRSLGLICDGCPVGYTGPRCERCAEGYFGQPSVPGGSCQPCQCNDNLDFSIPGSCDSLSGSCLICKPGTTGRYCELCADGYFGDAVDAKNCQPCRCNAGGSFSEVCHSQTGQCECRANVQGQRCDKCKAGTFGLQSARGCVPCNCNSFGSKSFDCEESGQCWCQPGVTGKKCDRCAHGYFNFQEGGCTACECSHLGNNCDPKTGRCICPPNTIGEKCSKCAPNTWGHSITTGCKACNCSTVGSLDFQCNVNTGQCNCHPKFSGAKCTECSRGHWNYPRCNLCDCFLPGTDATTCDSETKKCSCSDQTGQCTCKVNVEGIHCDRCRPGKFGLDAKNPLGCSSCYCFGTTTQCSEAKGLIRTWVTLKAEQTILPLVDEALQHTTTKGIVFQHPEIVAHMDLMREDLHLEPFYWKLPEQFEGKKLMAYGGKLKYAIYFEAREETGFSTYNPQVIIRGGTPTHARIIVRHMAAPLIGQLTRHEIEMTEKEWKYYGDDPRVHRTVTREDFLDILYDIHYILIKATYGNFMRQSRISEISMEVAEQGRGTTMTPPADLIEKCDCPLGYSGLSCEACLPGFYRLRSQPGGRTPGPTLGTCVPCQCNGHSSLCDPETSICQNCQHHTAGDFCERCALGYYGIVKGLPNDCQQCACPLISSSNNFSPSCVAEGLDDYRCTACPRGYEGQYCERCAPGYTGSPGNPGGSCQECECDPYGSLPVPCDPVTGFCTCRPGATGRKCDGCKHWHAREGWECVFCGDECTGLLLGDLARLEQMVMSINLTGPLPAPYKMLYGLENMTQELKHLLSPQRAPERLIQLAEGNLNTLVTEMNELLTRATKVTADGEQTGQDAERTNTRAKSLGEFIKELARDAEAVNEKAIKLNETLGTRDEAFERNLEGLQKEIDQMIKELRRKNLETQKEIAEDELVAAEALLKKVKKLFGESRGENEEMEKDLREKLADYKNKVDDAWDLLREATDKIREANRLFAVNQKNMTALEKKKEAVESGKRQIENTLKEGNDILDEANRLADEINSIIDYVEDIQTKLPPMSEELNDKIDDLSQEIKDRKLAEKVSQAESHAAQLNDSSAVLDGILDEAKNISFNATAAFKAYSNIKDYIDEAEKVAKEAKDLAHEATKLATGPRGLLKEDAKGCLQKSFRILNEAKKLANDVKENEDHLNGLKTRIENADARNGDLLRTLNDTLGKLSAIPNDTAAKLQAVKDKARQANDTAKDVLAQITELHQNLDGLKKNYNKLADSVAKTNAVVKDPSKNKIIADADATVKNLEQEADRLIDKLKPIKELEDNLKKNISEIKELINQARKQANSIKVSVSSGGDCIRTYKPEIKKGSYNNIVVNVKTAVADNLLFYLGSAKFIDFLAIEMRKGKVSFLWDVGSGVGRVEYPDLTIDDSYWYRIVASRTGRNGTISVRALDGPKASIVPSTHHSTSPPGYTILDVDANAMLFVGGLTGKLKKADAVRVITFTGCMGETYFDNKPIGLWNFREKEGDCKGCTVSPQVEDSEGTIQFDGEGYALVSRPIRWYPNISTVMFKFRTFSSSALLMYLATRDLRDFMSVELTDGHIKVSYDLGSGMASVVSNQNHNDGKWKSFTLSRIQKQANISIVDIDTNQEENIATSSSGNNFGLDLKADDKIYFGGLPTLRNLSMKARPEVNLKKYSGCLKDIEISRTPYNILSSPDYVGVTKGCSLENVYTVSFPKPGFVELSPVPIDVGTEINLSFSTKNESGIILLGSGGTPAPPRRKRRQTGQAYYAILLNRGRLEVHLSTGARTMRKIVIRPEPNLFHDGREHSVHVERTRGIFTVQVDENRRYMQNLTVEQPIEVKKLFVGGAPPEFQPSPLRNIPPFEGCIWNLVINSVPMDFARPVSFKNADIGRCAHQKLREDEDGAAPAEIVIQPEPVPTPAFPTPTPVLTHGPCAAESEPALLIGSKQFGLSRNSHIAIAFDDTKVKNRLTIELEVRTEAESGLLFYMARINHADFATVQLRNGLPYFSYDLGSGDTHTMIPTKINDGQWHKIKIMRSKQEGILYVDGASNRTISPKKADILDVVGMLYVGGLPINYTTRRIGPVTYSIDGCVRNLHMAEAPADLEQPTSSFHVGTCFANAQRGTYFDGTGFAKAVGGFKVGLDLLVEFEFRTTTTTGVLLGISSQKMDGMGIEMIDEKLMFHVDNGAGRFTAVYDAGVPGHLCDGQWHKVTANKIKHRIELTVDGNQVEAQSPNPASTSADTNDPVFVGGFPDDLKQFGLTTSIPFRGCIRSLKLTKGTGKPLEVNFAKALELRGVQPVSCPAN

SEQ ID NO: 14660 - protein, 280 aa, Homo sapiens
MAQPPPDVEGDDCLPAYRHLFCPDLLRDKVAFITGGGSGIGFRIAEIFMRHGCHTAARKLAGATGRRCLPLSMDVRAPPAVMAAVDQALKEFGRIDILINCAAGNFLCPAGALSFNAFKTVMDIDTSGTFNVSRVLYEKFFRDHGGVIVNITATLGNRGQALQVHAGSAKAAVDAMTRHLAVEWGPQNIRVNSLAPGPISGTEGLRRLGGPQASLSTKVTASPLQRLGNKTEIAHSVLYLASPLASYVTGAVLVADGGAWLTFPNGVKGLPDFASFSAKL

SEQ ID NO: 14661 - protein, 1287 aa, Homo sapiens
DSINNLQAELNKIFALRKQLEQDVLSYQNLRKTLEEQISEIRRREEESFSLYSDQTSYLSICLEENNRFQVEHFSQEELKKKVSDLIQLVKELYTDNQHLKKTIFDLSCMGFQGNGFPDRLASTEQTEIMKDLSKGGCKNGYLRHTESKISDCDGAHAPGCLEEGAFINLLAPLFNEKATLLLESRPDLLKVVRELLLGQLFLTEQEVSGEHLDGKTEKTPKQKGELVHFVQTNSFSKPHDELKLSCEAQLVKAGEVPKVGLKDASVQTVATEGDLLRFKHEATREAWEEKPINTALSAEHRPENLHGVPGWQAALLSLPGITNREAKKSRLPILIKPSRSLGNMYRLPATQEVVTQLQSQILELQGELKEFKTCNKQLHQKLILAEAVMEGRPTPDKTLLNAQPPVGAAYQDSPGEQKGIKTTSSVWRDKEMDSDQQRSYEIDSEICPPDDLASLPSCKENPEDVLSPTSVATYLSSKSQPSAKVSVMGTDQSESINTSNETEYLKQKIHDLETELEGYQNFIFQLQKHSQCSEAIITVLCGTEGAQDGLSKPKNGSDGEEMTFSSLHQVRYVKHVKILGPLAPEMIDSRVLENLKQQLEEQEYKLQKEQNLNMQLFSEIHNLQNKFRDLSPPRYDSLVQSQARELSLQRQQIKDGHGICVISRQHMNTMIKAFEELLQASDVDYCVAEGFQEQLNQCAELLEKLEKLFLNGKSVGVEMNTQNELMERIEEDNLTYQHLLPESPEPSASHALSDYETSEKSFFSRDQKQDNETEKTSVMVNSFSQDLLMEHIQEIRTLRKRLEESIKTNEKLRKQLERQGSEFVQGSTSIFASGSELHSSLTSEIHFLRKQNQALNAMLIKGSRDKQKENDKLRESLSRKTVSLEHLQREYASVKEENERLQKEGSEKERHNQQLIQEVRCSGQELSRVQEEVKLRQQLLSQNDKLLQSLRVELKAYEKLDEEHRRLREASGEGWKGQDPFRDLHSLLMEIQALRLQLERSIETSSTLQSRLKEQLARGAEKAQEGALTLAVQAVSIPEVPLQPDKHDGDKYPMESDNSFDLFDSSQAVTPKSVSETPPLSGNDTDSLSCDSGSSATSTPCVSRLVTGHHLWASKNGRHVLGLIEDYEALLKQISQGQRLLAEMDIQTQEAPSSTSQELGTKGPHPAPLSKFVSSVSTAKLTLEEAYRRLKLLWRVSLPEDGQCPLHCEQIGEMKAEVTKLHKKLFEQEKKLQNTMKLLQLSKRQEKVIFDQLVVTHKILRKARGNLELRPGGAHPGTCSPSRPGS

SEQ ID NO: 14662 - protein, 1255 aa, Homo sapiens
MLDPSSSEEESDEGLEEESRDVLVAAGSSQRAPPAPTREGRRDAPGRAGGGGAARSVSPSPSVLSEGRDEPQRQLDDEQERRIRLQLYVFVVRCIAYPFNAKQPTDMARRQQKLNKQQLQLLKERFQAFLNGETQIVADEAFCNAVRSYYEVFLKSDRVARMVQSGGCSANDFREVFKKNIEKRVRSLPEIDGLSKETVLSSWIAKYDAIYRGEEDLCKQPNRMALSAVSELILSKEQLYEMFQQILGIKKLEHQLLYNACQLDNADEQAAQIRRELDGRLQLADKMAKERKFPKFIAKDMENMYIEELRSSVNLLMANLESLPVSKGGPEFKLQKLKRSQNSAFLDIGDENEIQLSKSDVVLSFTLEIVIMEVQGLKSVAPNRIVYCTMEVEGEKLQTDQAEASRPQWGTQGDFTTTHPRPVVKVKLFTESTGVLALEDKELGRVILYPTSNSSKSAELHRMVVPKNSQDSDLKIKLAVRMDKPAHMKHSGYLYALGQKVWKRWKKRYFVLVQVSQYTFAMCSYREKKSEPQELMQLEGYTVDYTDPHPGLQGGCMFFNAVKEGDTVIFASDDEQDRILWVQAMYRATGQSYKPVPAIQTQKLNPKGGTLHADAQLYADRFQKHGMDEFISANPCKLDHAFLFRILQRQTLDHRLNDSYSCLGWFSPGQVFVLDEYCARYGVRGCHRHLCYLAELMEHSENGAVIDPTLLHYSFAFCASHVHGNRPDGIGTVSVEEKERFEEIKERLSSLLENQISHFRYCFPFGRPEGALKATLSLLERVLMKDIATPIPAEEVKKVVRKCLEKAALINYTRLTEYAKIEETMNQASPARKLEEILHLAELCIEVLQQNEEHHAEAFAWWPDLLAEHAEKFWALFTVDMDTALEAQPQDSWDSFPLFQLLNNFLRNDTLLCNGKFHKHLQEIFVPLVVRYVDLMESSIAQSIHRGFEQETWQPVNNGSATSEDLFWKLDALQMFVFDLHWPEQEFAHHLEQRLKLMASDMLEACVKRTRTAFELKLQKASKTTDLRIPASVCTMFNVLVDAKKQSTKLCALDGGQEFGSQWQQYHSKIDDLIDNSVKEIISLLVSKFVSVLEGVLSKLSRYDEGTFFSSILSFTVKAAAKYVDVPKPGMDLADTYIMFVRQNQDILREKVNEEMYIEKLFDQWYSSSMKVICVWLTDRLDLQLHIYQLKTLIKIVKKTYRDFRLQGVLEGTLNSKTYDTVHRRLTVEEATASVSEGGGLQGITMKDSDEEEEG

SEQ ID NO: 14663 - protein, 659 aa, Homo sapiens
MSSQPAGNQTSPGATEDYSYGSWYIDEPQGGEELQPEGEVPSCHTSIPPGLYHACLASLSILVLLLLAMLVRRRQLWPDCVRGRPGLPSPVDFLAGDRPRAVPAAVFMVLLSSLCLLLPDEDALPFLTLASAPSQGAWKILGLFYYAALYYPLAACATAGHTAAHLLGSTLSWAHLGVQVWQRAECPQVPKIYKYYSLLASLPLLLGLGFLSLWYPVQLVRSFSRRTGAGSKGLQSSYSEEYLRNLLCRKKLGSSYHTSKHGFLSWARVCLRHCIYTPQPGFHLPLKLVLSATLTGTAIYQVALLLLVGVVPTIQKVRAGVTTDVSYLLAGFGIVLSEDKQEVVELVKHHLWALEVCYISALVLSCLLTFLVLMRSLVTHRTNLRALHRGAALDLSPLHRSPHPSRQAIFCWMSFSAYQTAFICLGLLVQQIIFFLGTTALAFLVLMPVLHGRNLLLFRSLESSWPFWLTLALAVILQNMAAHWVFLETHDGHPQLTNRRVLYAATFLLFPLNVLVGAMVATWRVLLSALYNAIHLGQMDLSLLPPRAATLDPGYYTYRNFLKIEVSQSHPAMTAFCSLLLQAQSLLPRTMAAPQDSLRPGEEDEGMQLLQTKDSMAKGARPGASRGRARWGLAYTLLHNPTLQVFRKTALLGANGAQP

SEQ ID NO: 14664 - protein, 260 aa, Homo sapiens
RVMAPRALLLLLSGGLALTETWACSHSMRYFDTAVSRPGRGEPRFISVGYVDDTQFVRFDSDAASPRGEPRAPWVEQEGPEYWDRETQKYKRQAQADRVSLRNLRGYYNQSEDGSHTLQRMSGCDLGPDGRLLRGYDQSAYDGKDYIALNEDLRSWTAADTAAQITQRKLEAARAAEQLRAYLEGTCVEWLRRYLENGKETLQRAEPPKTHVTHHPLSDHEASRRWNLPEVGSCGGAFWTRAEIHVPYAARGAARAPHPE

SEQ ID NO: 14665 - protein, 1098 aa, Homo sapiens
MTSEEKKERPISMINEASNYNVTSDYAVHPMSPVGRTSRASKKVHNFGKRSNSIKRNPNAPVVRRGWLYKQDSTGMKLWKKRWFVLSDLCLFYYRDEKEEGILGSILLPSFQIALLTSEDHINRKYAFKAAHPNMRTYYFCTDTGKEMELWMKAMLDAALVQTEPVKRVDKITSENAPTKETNNIPNHRVLIKPEIQNNQKNKEMSKIEEKKALEAEKYGFQKDGQDRPLTKINSVKLNSLPSEYESGSACPAQTVHYRPINLSSSENKIVNVSLADLRGGNRPNTGPLYTEADRVIQRTNSMQQLEQWIKIQKGRGHEEETRGVISYQTLPRNMPSHRAQIMARYPEGYRTLPRNSKTRPESICSVTPSTHDKTLGPGAEEKRRSMRDDTMWQLYEWQQRQFYNKQSTLPRHSTLSSPKTMVNISDQTMHSIPTSPSHGSIAAYQGYSPQRTYRSEVSSPIQRGDVTIDRRHRAHHPKHVYVPDRRSVPAGLTLQSVSPQSLQGKTMKENEPIITMVHTMIENSALRPQLYQQLSQDEGRGTLYKYRPEEVDIDAKLSRLCEQDKVVHALEEKLQQLHKEKYTLEQALLSASQEIEMHADNPAAIQTVVLQRDDLQNGLLSTCRELSRATAELERAWREYDKLEYDVTVTRNQMQEQLDHLGEVQTESAGIQRAQIQKELWRIQDVMEGLSKHKQQRGTTEIGMIGSKPFSTVKYKNEEEEVVPPRPPLPRSYDFTEQPPIIPPLPSDSSSLLCYSRGPVHLPEEKKMYQVQGYPRNGSHCGPDYRLYKSEPELTTVAEVDESNGEEKSEPVSEIETSVVKGSHFPVGVVPPRAKSPTPESSTIASYVTLRKTKKMMDLRTERPRSAVEQLCLAESTRPRMTVEEQMERIRRHQQACLREKKKGLNVIGASDQSPLQSPSNLRDNPFRTTQTRRRDDKELDTAIRENDVKPDHETPATEIVQLKETEPQNVDFSKELKKTENISYEMLFEPEPNGVNSVEMMDKERNKDKMPEDVTFSPQDETQTANHKPEEHPEENTKNSVDEQEETVISYESTPEVSRGNQTMAVKSLSPSPESSASPVPSTQPQLTEGSHFMCV

SEQ ID NO: 14666 - protein, 214 aa, Homo sapiens
MCGIWALFGSDDCLSVQCLSAMKIAHRGPDAFRFENVNGYTNCCFGFHRLAVVDPLFGMQPIRVKKYPYLWLCYNGEIYNHKKMQQHFEFEYQTKVDGEIILHLYDKGGIEQTICMLDGVFAFVLLDTANKKVFLGRDTYGVRPLFKAMTEDGFLAVCSEAKGLVTLKHSATPFLKVEPFLPGHYEVLDLKPNGKVASVEMVKYHHCRDVPLHA

SEQ ID NO: 14667 - protein, 854 aa, Homo sapiens
MAAAAAEEGMEPRALQYEQTLMYGRYTQDLGAFAKEEAARIRLGGPEPWKGPPSSRAAPELLEYGRSRCARCRAQQWMSRGLNTSILLQYLAWVTYPVVLITFSAGFTQILAPQAVGSGIPEMKTILRGVVLKEYLTLKTFIAKVIGLTCALGSGMPLGKEGPFVHIASMCAALLSKFLSLFGGIYENESRNTEMLAAACAVGVGCCFAAPIGGVLFSIEVTSTFFAVRNYWRGFFAATFSAFIFRVLAVWNRDEETITALFKTRFRLDFPFDLQELPAFAVIGIASGFGGALFVYLNRKIVQVMRKQKTINRFLMRKRLLFPALVTLLISTLTFPPGFGQFMAGQLSQKETLVTLFDNRTWVRQGLVEELEPPSTSQAWNPPRANVFLTLVIFILMKFWMSALATTIPVPCGAFMPVFVIGAAFGRLVGESMAAWFPDGIHTDSSTYRIVPGGYAVVGAAALAGAVTHTVSTAVIVFELTGQIAHILPVMIAVILANAVAQSLQPSLYDSIIRIKKLPYLPELGWGRHQQYRVRVEDIMVRDVPHVALSCTFRDLRLALHRTKGRMLALVESPESMILLGSIERSQVVALLGAQLSPARRRQHMQERRATQTSPLSDQEGPPTPEASVCFQVNTEDSAFPAARGETHKPLKPALKRGPSVTRNLGESPTGSAESAGIALRSLFCGSPPPEAASEKLESCEKRKLKRVRISLASDADLEGEMSPEEILEWEEQQLDEPVNFSDCKIDPAPFQLVERTSLHKTHTIFSLLGVDHAYVTSIGRLIGIVTLKELRKAIEGSVTAQGVKVRPPLASFRDSATSSSDTETTEVHALWGPHSRHGLPREGSPSDSDDKCQ

SEQ ID NO: 14668 - protein, 225 aa, Homo sapiens
MASGCKIGPSILNSDLANLGAECLRMLDSGADYLHLDVMDGHFVPNITFGHPVVESLRKQLGQDPFFDMHMMVSKPEQWVKPMAVAGANQYTFHLEATENPGALIKDIRENGMKVGLAIKPGTSVEYLAPWANQIDMALVMTVEPGFGGQKFMEDMMPKVHWLRTQFPSLDIEVDGGVGPDTVHKCAEIGVQWRDLCSLQSLPAGFKRFSCLSLLSSWDYRQELT

SEQ ID NO: 14669 - protein, 312 aa, Homo sapiens
MPMDTSVYESPYSDPEELKDKKLFLKRDNLLIADIELGCGNFGSVRQGVYRMRKKQIDVAIKVLKQGTEKADTEEMMREAQIMHQLDNPYIVRLIGVCQAEALMLVMEMAGGGPLHKFLVGKREEIPVSNVAELLHQVSMGMKYLEEKNFVHRDLAARNVLLVNRHYAKISDFGLSKALGADDSYYTARSAGKWPLKWYAPECINFRKFSSRSDVWSYGVTMWEALSYGQKPYKKMKGPEVMAFIEQGKRMECPPECPPELYALMSDCWIYKWEDRPDFLTVEQRMRACYYSLASKVEGPPGSTQKAEAACA

SEQ ID NO: 14670 - protein, 326 aa, Homo sapiens
MGPLPAPSCTQRITWKGLLLTASLLNFWNPPTTAEVTIEAQPPKVSEGKDVLLLVHNLPQNLPGYFWYKGEMTDLYHYIISYIVDGKIIIYGPAYSGRETVYSNASLLIQNVTRKDAGTYTLHIIKRGDETREEIRHFTFTLYSKLPIPYITINNLNPRENKDVLAFTCEPKSENYTYIWWLNGQSLPVSPGVKRPIENRILILPSVTRNETGPYQCEIRDRYGGLRSNPVILNVLYGPDLPRIYPSFTYYRSGENLDLSCFTESNPPAEYFWTINGKFQQSGQKLFIPQITRNHSGLYACSVHNSATGKEISKSMTVKVSDWILP

SEQ ID NO: 14671 - protein, 510 aa, Homo sapiens
MCSHFAQDVWPEHSIKDSFQKVILRTYGKYGHENLQLRKDHKSVDACKVYKGGYNGLNQCLTTTDSKIFQCDKYVKVFHKFPNVNRNKIRHTGKKPFKCKNRGKSFCMLSQLTQHKKIHTREYSYKCEECGKAFNWSSTLTKHKIIHTGEKPYKCEECGKAFNRSSNLTKHKIIHTGEKPYKCEECGKAFNRSSTLTKHKRIHTEEKPYKCEECGKAFNQFSILNKHKRIHMEDKPYKCEECGKAFRVFSILKKHKIIHTGEKPYKCEECGKAFNQFSNLTKHKIIHTGEKPYKCDECGKAFNQSSTLTKHKRIHTGEKPYKCEECGKAFKQSSTLTEHKIIHTGEKPYKCEKCGKAFSWSSAFTKHKRNHMEDKPYKCEECGKAFSVFSTLTKHKIIHTREKPYKCEECGKAFNQSSIFTKHKIIHTEGKSYKCEKCGNAFNQSSNLTARKIIYTGEKPYKYEECDKAFNKFSTLITHQIIYTGEKPCKHECGRAFNKSSNYTKEKLQT

SEQ ID NO: 14672 - protein, 395 aa, Homo sapiens
MPRYCAAICCKNRRGRNNKDRKLSFYPFPLHDKERLEKWLKNMKRDSWVPSKYQFLCSDHFTPDSLDIRWGIRYLKQTAVPTIFSLPEDNQGKDPSKKKSQKKNLEDEKEVCPKAKSEESFVLNETKKNIVNTDVPHQHPELLHSSSLVKPPAPKTGSIQNNMLTLNLVKQHTGKPESTLETSVNQDTGRGGFHTCFENLNSTTITLTTSNSESIHQSLETQEVLEVTTSHLANPNFTSNSMEIKSAQENPFLFSTINQTVEELNTNKESVIAIFVPAENSKPSVNSFISAQKETTEMEDTDIEDSLYKDVDYGTEVLQIEHSYCRQDINKEHLWQKVSKLHSKITLLELKEQQTLGRLKSLEALIRQLKQENWLSEENVKIIENHFTTYEVTMI

SEQ ID NO: 14673 - protein, 1206 aa, Homo sapiens
PLDDEYDKAMAPQQGLLDKIKDEPDNAQEYSHGQQQKTQEGELKISAVFSVSGSPLAPQLTTGFQPSLASSGMNKMLPSVPATAVRVSCSGCKKILQKGQTAYQRKGSTQLFCSTLCLTGYTVPPARPPPPLTKKTCSSCSKDILNPKDVISAQFENTTTSKDFCSQSCLSTYELKKKPIVTINTNSISTKCSMCQKNAVIRHEVNYQNVVHKLCSDACFSKFRSANNLTMNCCENCGGYCYSGSGQCHMLQIEGQSKKFCSSSCITAYKQNLFNKPTGMNSSVVPLSQGQVIVSIPTGSTVSAGGGSTSAVSPTSISSSAAAGLQRLAAQSQHVGFARSVVKLKCQHCNRLFATKPELLDYKGKMFQFCGKNCSDEYKKINNVMAMCEYCKIEKIVKETVRFSGADKSFCSEGCKLLYKHDLAKRWGNHCKMCSYCLQTSPKLVQNNLGGKVEEFCCEECMSKYTVLFYQMAKCDACKRQGKLSESLKWRGEMKHFCNLLCILMFCNQQSVCDPPSQNNAANISMVQAASAGPPSLRKDSTPVIANVVSLASAPAAQPTVNSNSVLQGAVPTVTAKIIGDASTQTDALKLPPSQPPRLLKNKALLCKPITQTKATSCKPHTQNKECQTDTPSQPQIIVVPVPVPVFVPIPLHLYTQYAPVPFGIPVPMPVPMLIPSSMDSEDKVTESIEDIKEKLPTHPFEADLLEMAEMIAEDEEKKTLSQGESQTSEHELFLDTKIFEKDQGSTYSGDLESEAVSTPHSWEEELNHYALKSNAVQEADSELKQFSKGETEQDLEADFPSDSFDPLNKGQGIQARSRTRRRHRDGFPQPRRRGRKKSIVAVEPRSLIQGAFQGCSVSGMTLKYMYGVNAWKNWVQWKNAKEEQGDLKCGGVEQASSSPRSDPLGSTQDHALSQESSEPGCRVRSIKLKEDILSCTFAELSLGLCQFIQEVRRPNGEKYDPDSILYLCLGIQQYLFENGRIDNIFTEPYSRFMIELTKLLKIWEPTILPNGYMFSRIEEEHLWECKQLGAYSPIVLLNTLLFFNTKYFQLKNVTEHLKLSFAHVMRRTRTLKYSTKMTYLRFFPPLQKQESEPDKLTVGKRKRNEDDEVPVGVEMAENTDNPLRCPVRLYEFYLSKCSESVKQRNDVFYLQPERSCVPNSPMWYSTFPIDPGTLDTMLTRILMVREVHEELAKAKSEDSDVELSD

SEQ ID NO: 14674 - protein, 59 aa, Homo sapiens
MELDMAMEPDRKAAVSHWQQQSYLDSGIHSGATTTAPSLSGKGNPEEEDVDTSQVLYEW

SEQ ID NO: 14675 - protein, 264 aa, Homo sapiens
MQKASHKNKKERGVSNKVKTSVHNLSKTQQTKLTVGSLGLGLIIIQHGPYLQITHLIRKGAAANDGKLQPGDVLISVGHANVLGYTLREFLQLLQHITIGTVLQIKVYRDFINIPEEWQEIYDLIPEAKFPVTSTPKKIELAKDESFTSSDDNENVDLDKRLQYYRYPWSTVHHPARRPISISRDWHGYKKKNHTISVGKDINCDVMIHRDDKKEVRAPSPYWIMVKQDNESSSSSTSSTSDAFWLEDCAQVEEGKAQLVSKVG

SEQ ID NO: 14676 - protein, 433 aa, Homo sapiens
MGKRLDQPQMYPQYTYYYPHYLQTKQSYAPAPHPMAPPSPSTNSSSNNSSNNSSGEQLSKTNLYIRGLPPGTTDQDLIKLCQPYGKIVSTKAILDKNTNQCKGYGFVDFDSPAAAQKAVASLKANGVQAQMAKQQEQDPTNLYISNLPISMDEQELENMLKPFGHVISTRILRDANGVSRGVGFARMESTEKCEVVIQHFNGKYLKTPPGIPAPSEPLLCKFADGGQKKRQNQSKYTQNGRPWPREGEVLRGRTVPRQNREAGMALTYDPTAAIQNGFYSSPYSIATNRMIPQTSITPFIAASPVSTYQVQSTSWMPHPPYVMQPTGAVITPTMDHPMSMQPANMMGPLTQQMNHLSLGTTGTYMTAAAPMQGTYIPQYTPVPPTAVSIEGVVADTSPQTVAPSSQDTSGQQQQIAVDTSNEHAPAYSYQQSK

SEQ ID NO: 14677 - protein, 1679 aa, Homo sapiens
YHHMETEEEDDTNDEDFNVEIRQFSSCSHRFSKVFSSIDRITQNSAEEKEDSVDKTKSTTLPSTETLSWSSEYSEMQQLSTSNSSDTESNRHKLSSGLLPKLAISTEGEQDEAASCPGDPHEEPGKPALPPEECAQEEPEVTTPASTISSSTLSDMFAVSPLGSPMSPHSLSSDPSSSRDSSPSRDSSAASASPHQPIVIHSSGKNYGFTIRAIRVYVGDSDIYTVHHIVWNVEEGSPACQAGLKAGDLITHINGEPVHGLVHTEVIELLLKSGNKVSITTTPFENTSIKTGPARRNSYKSRMVRRSKKSKKKESLERRRSLFKKLAKQPSPLLHTSRSFSCLNRSLSSGESLPGSPTHSLSPRSPTPSYRSTPDFPSGTNSSQSSSPSSSAPNSPAGSGHIRPSTLHGLAPKLGGQRYRSGRRKSAGNIPLSPLARTPSPTPQPTSPQRSPSPLLGHSLGNSKIAQAFPSKMHSPPTIVRHIVRPKSAEPPRSPLLKRVQSEEKLSPSYGSDKKHLCSRKHSLEVTQEEVQREQSQREAPLQSLDENVCDVPPLSRARPVEQGCLKRPVSRKVGRQESVDDLDRDKLKAKVVVKKADGFPEKQESHQKSHGPGSDLENFALFKLEEREKKVYPKAVERSSTFENKASMQEAPPLGSLLKDALHKQASVRASEGAMSDGRVPAEHRQGGGDFRRAPAPGTLQDGLCHSLDRGISGKGEGTEKSSQAKELLRCEKLDSKLANIDYLRKKMSLEDKEDNLCPVLKPKMTAGSHECLPGNPVRPTGGQQEPPPASESRAFVSSTHAAQMSAVSFVPLKALTGRVDSGTEKPGLVAPESPVRKSPSEYKLEGRSVSCLKPIEGTLDIALLSGPQASKTELPSPESAQSPSPSGDVRASVPPVLPSSSGKKNDTTSARELSPSSLKMNKSYLLEPWFLPPSRGLQNSPAVSLPDPEFKRDRKGPHPTARSPGTVMESNPQQREGSSPKHQDHTTDPKLLTCLGQNLHSPDLARPRCPLPPEASPSREKPGLRESSERGPPTARSERSAARADTCREPSMELCFPETAKTSDNSKNLLSVGRTHPDFYTQTQAMEKAWAPGGKTNHKDGPGEARPPPRDNSSLHSAGIPCEKELGKVRRGVEPKPEALLARRSLQPPGIESEKSEKLSSFPSLQKDGAKEPERKEQPLQRHPSSIPPPPLTAKDLSSPAARQHCSSPSHASGREPGAKPSTAEPSSSPQDPPKPVAAHSESSSHKPRPGPDPGPPKTKHPDRSLSSQKPSVGATKGKEPATQSLGGSSREGKGHSKSGPDVFPATPGSQNKASDGIGQGEGGPSVPLHTDRAPLDAKPQPTSGGRPLEVLEKPVHLPRPGHPGPSEPADQKLSAVGEKQTLSPKHPKPSTVKDCPTLCKQTDNRQTDKSPSQPAANTDRRAEGKKCTEALYAPAEGDKLEAGLSFVHSENRLKGAERPAAGVGKGFPEARGKGPGPQKPPTEADKPNGMKRSPSATGQSSFRSTALPEKSLSCSSSFPETRAGVREASAASSDTSSAKAAGGMLELPAPSNRDHRKAQPAGEGRTHMTKSDSLPSFRVSTLPLESHHPDPNTMGGASHRDRALSVTATVGETKGKDPAPAQPPPARKQNVGRDVTKPSPAPNTDRPISLSNEKDFVVRQRRGKESLRSSPHKKAL

SEQ ID NO: 14678 - protein, 1606 aa, Homo sapiens
MSSTQGNGEHWKSLESVGISRKELAMAEALQMEYDALSRLRHDKEENRAKQNADPSLISWDEPGVDFYSKPAGRRTDLKLLRGLSGSDPTLNYNSLSPQEGPPNHSTSQGPQPGSDPWPKGSLSGDYLYIFDGSDGGVSSSPGPGDIEGSCKKLSPPPLPPRASIWDTPPLPPRKGSPSSSKISQPSDINTFSLVEQLPGKLLEHRILEEEEVLGGGGQGRLLGSVDYDGINDAITRLNLKSTYDAEMLRDATRGWKEGRGPLDFSKDTSGKPVARSKTMPPQVPPRTYASRYGNRKNATPGKNRRISAAPVGSRPHTVANGHELFEVSEERDEEVAAFCHMLDILRSGSDIQDYFLTGYVWSAVTPSPEHLGDEVNLKVTVLCDRLQEALTFTCNCSSTVDLLIYQTLCYTHDDLRNVDVGDFVLKPCGLEEFLQNKHALGSHEYIQYCRKFDIDIRLQLMEQKVVRSDLARTVNDDQSPSTLNYLVHLQERPVKQTISRQALSLLFDTYHNEVDAFLLADGDFPLKADRVVQSVKAICNALAAVETPEITSALNQLPPCPSRMQPKIQKDPSVLAVRENREKVVEALTAAILDLVELYCNTFNADFQTAVPGSRKHDLVQEACHFARSLAFTVYATHRIPIIWATSYEDFYLSCSLSHGGKELCSPLQTRRAHFSKYLFHLIVWDQQICFPVQVNRLPRETLLCATLYALPIPPPGSSSEANKQRRVPEALGWVTTPLFNFRQVLTCGRKLLGLWPATQENPSARWSAPNFHQPDSVILQIDFPTSAFDIKFTSPPGDKFSPRYEFGSLREEDQRKLKDIMQKESLYWLTDADKKRLWEKRYYCHSEWTHMNHQDALGLLHATFPDQEVRRMAVQWIGSLSDAELLDYLPQLVQALKYECYLDSPLVRFLLKRAVSDLRVTHYFFWLLKDGLKDSQFSIRYQYLLAALLCCCGKGLREEFNRQCWLVNALAKLAQQVREAAPSARQGILRTGLEEVKQFFALNGSCRLPLSPSLLVKGIVPRDCSYFNSNAVPLKLSFQNVDPLGENIRVIFKCGDDLRQDMLTLQMIRIMSKIWVQEGLDMRMVIFRCFSTGRGRGMVEMIPNAETLRKIQVEHGVTGSFKDRPLADWLQKHNPGEDEYEKAVENFIYSCAGCCVATYVLGICDRHNDNIMLKTTGHMFHIDFGRFLGHAQMFGNIKRDRAPFVFTSDMAYVINGGDKPSSRFHDFVDLCCQAYNLIRKHTHLFLNLLGLMLSCGIPELSDLEDLKYVYDALRPQDTEANATTYFTRLIESSLGSVATKLNFFIHNLAQMKFTGSDDRLTLSFASRTHTLKSSGRISDVFLCRHEKIFHPNKGYIYVVKVMRENTHEATYIQRTFEEFQELHNKLRLLFPSSHLPSFPSRFVIGRSRGEAVAERRREELNGYIWHLIHAPPEVAECDLVYTFFHPLPRDEKAMGTSPAPKSSDGTWARPVGKVGGEVKLSISYKNNKLFIMVMHIRGLQLLQDGNDPDPYVKIYLLPDPQKTTKRKTKVARKTCNPTYNEMLVYDGIPKGDLQQRELQLSVLSEQGFWENVLLGEVNIRLRELDLAQEKTGWFALGSRSHGTL

SEQ ID NO: 14679 - protein, 1274 aa, Homo sapiens
TKFDEVQKSGNMIQSANDKNFDDEDSVDGNRPSSASSTSSKAPPSSRRNVGMGTTRRLGSSTLGSKSSAAKEGAGAVDEEDFIKAFDDVPVVQIYSSRDLEESINKIREILSDDKHDWEQRVNALKKIRSLLLAGAAEYDNFFQHLRLLDGAFKLSAKDLRSQVVREACITLGHLSSVLGNKFDHGAEAIMPTIFNLIPNSAKIMATSGVVAVRLIIRHTHIPRLIPVITSNCTSKSVAVRRRCFEFLDLLLQEWQTHSLERHISVLAETIKKGIHDADSEARIEARKCYWGFHSHFSREAEHLYHTLESSYQKALQSHLKNSDSIVSLPQSDRSSSSSQESLNRPLSAKRSPTGSTTSRASTVSTKSVSTTGSLQRSRSDIDVNAAASAKSKVSSSSGTTPFSSAAALPPGSYASLGRIRTRRQSSGSATNVASTPDNRGRSRAKVVSQSQRSRSANPAGAGSRSSSPGKLLGSGYGGLTGGSSRGPPVTPSSEKRSKIPRSQGCSRETSPNRIGLDRFGLGQPGRIPGSVNAMRVLSTSTDLEAAVADALLLGDSRSKKKPVRRRYEPYGMYSDDDANSDASSVCSERSYGSRNGGIPHYLRQTEDVAEVLNHCASSNWSERKEGLLGLQNLLKSQRTLSRVELKRLCEIFTRMFADPHSKIADSEAECEDKEGNLFPSEVSCTRVFSMFLETLVDFIIIHKDDLQDWLFVLLTQLLKKMGADLLGSVQAKVQKALDVTRDSFPFDQQFNILMRFIVDQTQTPNLKVKVAILKYIESLARQMDPTDFVNSSETRLAVSRIITWTTEPKSSDVRKAAQIVLISLFELNTPEFTMLLGALPKTFQDGATKLLHNHLKNSSNTSVGSPSNTIGRTPSRHTSSRTSPLTSPTNCSHGGLSPSMLDYDTENLNSEEIYSSLRGVTEAIEKFSFRSQEDLNEPIKRDGKKECDIVSRDGGAASPATEGRGGSEVEGGRTALDNKTSLLNTQPPRAFPGPRARDYNPYPYSDAINTYDKTALKEAVFDDDMEQLRDVPIDHSDLVADLLKELSNHNERVEERKGALLELLKITREDSLGVWEEHFKTILLLLLETLGDKDHSIRALALRVLREILRNQPARFKNYAELTIMKTLEAHKDSHKEVVRAAEEAASTLASSIHPEQCIKVLCPIIQTADYPINLAAIKMQTKVVERIAKESLLQLLVDIIPGLLQGYDNTESSVRKASVFCLVAIYSVIGEDLKPHLAQLTGSKMKLLNLYIKRAQTTNSNSSSSSDVSTHS

SEQ ID NO: 14680 - protein, 305 aa, Homo sapiens
MTMEKGMSSGEGLPSRSSQVSAGKITAKELETKQSYKEKRGGFVLVHAGAGYHSESKAKEYKHVCKRACQKDSPFTNAGMGSNLNLLGEIECDASIMDGKSLNFGAVGALSGIKNPVSVANRLLCEGQKGKLSAGRIPPCFLVGEGAYRWAVDHGIPSCPPNIMTTRFSLAAFKRNKRKLELAERVDTDFMQLKKRRQSSEKENDSGTLDTVGAVVVDHEGNVAAAVSSGGLALKHPGRVGQAALYGCGCWAENTGAHNPYSTAVSTSGCGEHLVRTILARECSHALQAEDAHQALLETMQNKFI

SEQ ID NO: 14681 - protein, 711 aa, Homo sapiens
MAVYRLCVTTGPYLRAGTLDNISVTLVGTCGESPKQRLDRMGRDFAPGSVQKYKVRCTAELGELLLLRVHKERYAFFRKDSWYCSRICVTEPDGSVSHFPCYQWIEGYCTVELRPGTARTICQDSLPLLLDHRTRELRARQECYRWKIYAPGFPCMVDVNSFQEMESDKKFALTKTTTCVDQGDSSGNRYLPGFPMKIDIPSLMYMEPNVRYSATKTISLLFNAIPASLGMKLRGLLDRKGSWKKLDDMQNIFWCHKTFTTKYVTEHWCEDHFFGYQYLNGVNPVMLHCISSLPSKLPVTNDMVAPLLGQDTCLQTELERGNIFLADYWILAEAPTHCLNGRQQYVAAPLCLLWLSPQGALVPLAIQLSQTPGPDSPIFLPTDSEWDWLLAKTWVRNSEFLVHENNTHFLCTHLLCEAFAMATLRQLPLCHPIYKLLLPHTRYTLQVNTIARATLLNPEGLVDQVTSIGRQGLIYLMSTGLAHFTYTNFCLPDSLRARGVLAIPNYHYRDDGLKIWAAIESFVSEIVGYYYPSDASVQQDSELQAWTGEIFAQAFLGRESSGFPSRLCTPGEMVKFLTAIIFNCSAQHAAVNSGQHDFGAWMPNAPSSMRQPPPQTKGTTTLKTYLDTLPEVNISCNNLLLFWLVSQEPKDQRPLGTYPDEHFTEEAPRRSIAAFQSRLAQISRDIQERNQGLALPYTYLDPPLIENSVSI

SEQ ID NO: 14682 - protein, 112 aa, Homo sapiens
MGSSGLGKAATLDELLCTCIEMFDDNGELDNSYLPRIVLLMHRWYLSSTELAEKLLCMYRNATGESCNEFRLKICYFMRYWILKFPAEFNLDLGLIRMTEEFREVASQLGYE

SEQ ID NO: 14683 - protein, 789 aa, Homo sapiens
MAAAPVAAGSGAGRGRRSAATVAAWGGWGGRPRPGNILLQLRQGQLTGRGLVRAVQFTETFLTERDKQSKWSGIPQLLLKLHTTSHLHSDFVECQNILKEISPLLSMEAMAFVTEERKLTQETTYPNTYIFDLFGGVDLLVEILMRPTISIRGQKLKISDEMSKDCLSILYNTCVCTEGVTKRLAEKNDFVIFLFTLMTSKKTFLQTATLIEDILGVKKEMIRLDEVPNLSSLVSNFDQQQLANFCRILAVTISEMDTGNDDKHTLLAKNAQQKKSLSLGPSAAEINQAALLSIPGFVERLCKLATRKVSESTGTASFLQELEEWYTWLDNALVLDALMRVANEESEHNQGASEENGLPHTSARTQLPQSMKIMHEIMYKLEVLYVLCVLLMGRQRNQVHRMIAEFKLIPGLNNLFDKLIWRKHSASALVLHGHNQNCDCSPDITLKIQFLRLLQSFSDHHENKYLLLNNQELNELSAISLKANIPEVEAVLNTDRSLVCDGKRGLLTRLLQVMKKEPAESSFRFWQARAVESFLRGTTSYADQMFLLKRGLLEHILYCIVDSECKSRDVLQSYFDLLGELMKFNVDAFKRFNKYINTDAKFQVFLKQINSSLVDSNMLVRCVTLSLDRFENQVDMKVAEVLSECRLLAYISQVPTQMSFLFRLINIIHVQTLTQENVSCLNTSLVILMLARRKERLPLYLRLLQRMEHSKKYPGFLLNNFHNLLRFWQQHYLHKDKDSTCLENSSCISFSYWKETVSILLNPDRQSPSALVSYIEEPYMDIDRDFTEE

SEQ ID NO: 14684 - protein, 326 aa, Homo sapiens
MAAAAAAAAATNGTGGSSGMEVDAAVPSVMACGVTGSVSVALHPLVILNISDHWIRMRSQEGRPVQVIGALIGKQEGRNIEVMNSFELLSHTVEEKIIIDKEYYYTKEEQFKQVFKELEFLGWYTTGGPPDPSDIHVHKQVCEIIESPLFLKLNPMTKHTDLPVSVFESVIDIINGEATMLFAELTYTLATEEAERIGVDHVARMTATGSGENSTVAEHLIAQHSAIKMLHSRVKLILEYVKASEAGEVPFNHEILREAYALCHCLPVLSTDKFKTDFYDQCNDVGLMAYLGTITKTCNTMNQFVNKFNVLYDRQGIGRRMRGLFF

SEQ ID NO: 14685 - protein, 296 aa, Homo sapiens
MERLEEVPLEVLRQRESKWLDMLNNWDKWMAKKHKKIRLRCQKGIPPSLRGRAWQYLSGGKVKLQQNPGKFDELDMSPGDPKWLDVIERDLHRQFPFHEMFVSRGGHGQQDLFRVLKAYTLYRPEEGYCQAQAPIAAVLLMHMPAEQAFWCLVQICEKYLPGYYSEKLEAIQLDGEILFSLLQKVSPVAHKHLSRQKIDPLLYMTEWFMCAFSRTLPWSSVLRVWDMFFCEGVKIIFRVGLVLLKHALGSPEKVKACQGQYETIERLRSLSPKIMQEAFLVQEGQLGGTCVTSFYT

SEQ ID NO: 14686 - protein, 126 aa, Homo sapiens
MKKKLVVLGLLAVVLVLVIVGLCLWLPSASKEPDNHVYTRAAVAADAKQCSKIGRDALRDGGSAVDAAIAALLCVGLMNAHSMGIGGGLFLTIYNSTTRKAEVINAREVAPRLAFATMFNSSEQSQ

SEQ ID NO: 14687 - protein, 1400 aa, Homo sapiens
MAGIIKKQILKHLSRFTKNLSPDKINLSTLKGEGQLTNLELDEEVLQNVLELPTWLAITRVYCNRASIRIQWTKLKTHPICLCLDKVEVEMKTCEDPRPPNGQSPIALASGQSEYGFAEKVVEGMFIIVNSITIKIHSKAFHASFELWQLQGYSVNPNWQQSDLRLTRITDPCRGEVLTFKEITWQTLRIEADATDNGDQDPVTTPLRLITNQGRIQIALKRRTKDCNVISSKLMFLLDDLLWVLTDSQLKAMMKYAESLSEAMEKSAHQRKSLAPEPVQITPPAPSAQQSWAQAFGGSQGNSNSSSSRLSQYFEKFDVKESSYHLLISRLDLHICDDSQSREPGVSANRLMGGAMQLTFRKMAFDYYPFHWAGDSCKHWVRHCEAMETRGQWAQKLVMEFQSKMEKWHEETGLKPPWHLGVDSLFRRKADSLSSPRKNPLERSPSQGRQPAFQPPAWNRLRSSCMVVRVDDLDIHQVSTAGQPSKKPSTLLSCSRKLHNLPTQVSAIHIEFTEYYFPDNQELPVPCPNLYIQLNGLTFTMDPVSLLWGNLFCLDLYRSLEQFKAIYKLEDSSQKDEHLDIRLDAFWLKVSFPLEKRERAELHRPQALVFSASGMIATNTRHAPHCSCSDLQSLFRGFAAAEFFHSNYDHFPKVPGGFSLLHMLFLHHAFQMDSCLPQPNTLPPQRPKASWDLWSVHFTQISLDFEGTENFKGHTLNFVAPFPLSIWACLPLRWQQAQARKLLLASEGRLKPSASFGSPVQSEALAPDSMSHPRSKTEHDLKSLSGLTEVMEILKEGSSGMDNKGPLTELEDVADVHMLVHSPAHVRVRLDHYQYLALLRLKEVLQRLQEQLTKDTESMTGSPLQNQTACIGVLFPSAEVALLMHPAPGAVDADSAGSDSTSLVDSELSPSEDRELKSDASSDQGPASPEKVLEESSIENQDVSQERPHSNGELQDSGPLAQQLAGKGHEAVESLQAKKLSRTQASSSPAALKPPAGRETAVNGQGELIPLKNIEGELSSAIHMTKDATKEALHATMDLTKEAVSLTKDAFSLGRDRMTSTMHKMLSLPPAKEPMAKTDEGVAAPVSGGAARLRFFSMKRTVSQQSFDGVSLDSSGPEDRISVDSDGSDSFVMLLESESGPESVPPGSLSNVSDNAGVQGSPLVNNYGQGSPAANSSVSPSGEDLIFHPVSVLVLKVNEVSFGIEVRGEDLTVALQAEELTLQQLGTVGLWQFLHGQCPGTCFQESSTLKTGHIRPAVGLRFEVGPGAAVHSPLASQNGFLHLLLHGCDLELLTSVLSGLGPFLEDEEIPVVVPMQIELLNSSITLKDDIPPIYPTSPGPIPITLAMEHVVLKRSDDGVFHIGAAAQDKPSAEVLKSEKRQPPKEQVFLVPTGEVFEQQT

SEQ ID NO: 14688 - protein, 639 aa, Homo sapiens
MAMRELVEAECGGANPLMKLAGHFTQDKALRQEGLRPGPWPPGAPASEAASKPLGVASEDELVAEFLQDQNAPLVSRAPQTFKMDDLLAEMQQIEQSNFRQAPQRAPGVADLALSENWAQEFLAAGDAVDVTQDYNETDWSQEFISEVTDPLSVSPARWAEEYLEQSEEKLWLGEPEGTATDRWYDEYHPEEDLQHTASDFVAKVDDPKLANSEFLKFVRQIGEGQVSLESGAGSGRAQAEQWAAEFIQQQGTSDAWVDQFTRPVNTSALDMEFERAKSAIESDVDFWDKLQAELEEMAKRDAEAHPWLSDYDDLTSATYDKGYQFEEENPLRDHPQPFEEGLRRLQEGDLPNAVLLFEAAVQQDPKHMEAWQYLGTTQAENEQELLAISALRRCLELKPDNQTALMALAVSFTNESLQRQACETLRDWLRYTPAYAHLVTPAEEGAGGAGLGPSKRILGSLLSDSLFLEVKELFLAAVRLDPTSIDPDVQCGLGVLFNLSGEYDKAVDCFTAALSVRPNDYLLWNKLGATLANGNQSEEAVAAYRRALELQPGYIRSRYNLGISCINLGAHREAVEHFLEALNMQRKSRGPRGEGGAMSENIWSTLRLALSMLGQSDAYGAADARDLSTLLTMFGLPQ

SEQ ID NO: 14689 - protein, 157 aa, Homo sapiens
MAQESVMFSDVSVDFSQEEWECLNDDQRDLYRDVMLENYSNLVSMAGHSISKPNVISYLEQGKEPWLADRELTRGQWPVLESRCETKKLFLKKEIYEIESTQWEIMEKLTRRDFQCSSFRDDWECNRQFKKELGSQGGHFNQLVFTHEDLPTLSHHP

SEQ ID NO: 14690 - protein, 449 aa, Homo sapiens
MALDILAMAPLYQAPAINRIGPKTDPSKRPADPLKPLVLSRTKLTTIEAKRIMSILDEAIYKVELVTLLSYVASNREDMEGMLGEDVMRAVREHEDLCQVLLENVRCLKEKERQLQEQKEAEEEGWLRDRLLSIELQKSSLSPLMQQIKDSTKNVLRLLLSNPQAARLLQMQTQGRSAEAQNFIDSLIELRGFLFEKLLTSPMEARDKAQFLQDISRQNSNNQQIIDTLEKELAERMKNRNAEVEKENFVIQELKNHLHQVLKFSENSLVRTKQEAEKQQKADFRASQARVAKIQQEILQLQSQFYNLVMENREAEQALRKKKYKVETEIENWIQKYDTEMGEKQEELEDLDAVHREEKISLEELRRRHKVLVGEFAQIREEREINSKKRMEAEQEMVRMVRAATLIQALWKGYLVRSLLRSKKKRGKGKAKDKEKGKQKGKEKGKGKK

SEQ ID NO: 14691 - protein, 224 aa, Homo sapiens
RHLAPNPTYPHLYPPYLIRGYPDTAALENRQTIINDYITSQQMHHNAATAMAQRADMLRGLSPRESSLALNYAAGPRGTPATAMDRLAYLPTAPQPFSSRHSSSPLSPGGPTHLTKPTTTSSSERERDRDRERDRDREREKSILTSTTTVEHAPIWRPGTEQSSGSSGGGGGSSSRPASHSHAHQHSPISPRTQDALQQRPSVLHNTGMKGIITAVEPSTPTVL

SEQ ID NO: 14692 - protein, 802 aa, Homo sapiens
MPILKNLGVSDPKVPRAGTLPLRSSRNPFEEVSGLEEEEAGELGSLPNGTSCRRRATLEKLAGLAPFRLGWAPGRRAGSPGDGQPRSFLGRVLVPGIRRSSADFGLLARLHGTRAHGDEEAAGEAARRLAFLRLGRGSKPQRASLAERVVPAGEAAPEPPPKVPEPPKMKEPLSVLEILSLIQQRELARADEHILELEAEELAPSRGGAPGPPKAEGAGGGRRARDVALLYEALQRELWALVRETLAGPGPGACAGAGAVAQLGQVLVQEEAADGRRGPGAARKLRARWAEAVARAARERLEAAAPGAPGGLAGQLEALRARLLEDMAVVRGRLAPAYPAGLGAFGVYLRGYHGALAEWLGASARRRLPLADRYALLHWHNQVYPREVLGLVDMAALENGELGPLLSPGTLRGLEDECVTDVKAQTRAALLRVLQEDEEHWGSLEDQPSSLAQDVCELLEEHTERAPRISQEFGERMAHCCLGGLAEFLQSFQQRVERFHENPAVREMLPDTYISKTIALVNCGPPLRALAERLARVGPPESEPAREASASALDHVTRLCHRVVANLLFQELQPHFNKLMRRKWLSSPEALDGIVGTLGAQALALRRMQDEPYQALVAELHRRALVEYVRPLLRGRLRCSSARTRSRVAGRLREDAAQLQRLFRRLESQASWLDAVVPHLAEVMQLEDTPSIQVEVGVLVRDYPDIRQKHVAALLDIRGLRNTAARQEILAVARDLELSEEGALSPPRDRAFFADIPVPRPSFCLSLPLFLGRLPLSRLARPSLACLPRPRPPSLARPRAQR

SEQ ID NO: 14693 - protein, 386 aa, Homo sapiens
MKLCSLAVLVPIVLFCEQHVFAFQSGQVLAALPRTSRQVQVLQNLTTTYEIVLWQPVTADLIVKKKQVHFFVNASDVDNVKAHLNVSGIPCSVLLADVEDLIQQQISNDTVSPRASASYYEQYHSLNEIYSWIEFITERHPDMLTKIHIGSSFEKYPLYVLKVSGKEQAAKNAIWIDCGIHAREWISPAFCLWFIGHNRMWRKNRSFYANNHCIGTDLNRNFASKHWCEEGASSSSCSETYCGLYPESEPEVKAVASFLRRNINQIKAYISMHSYSQHIVFPYSYTRSKSKDHEELSLVASEAVRAIEKISKNTRYTHGHGSETLYLAPGGGDDWIYDLGIKYSFTIELRDTGTYGFLLPERYIKPTCREAFAAVSKIAWHVIRNV

SEQ ID NO: 14694 - protein, 377 aa, Homo sapiens
MADFLPSRSVLSVCFPGCLLTSGEAEQQRKSKEIDKCLSREKTYVKRLVKILLLGAGESGKSTFLKQMRIIHGQDFDQRAREEFRPTIYSNVIKGMRVLVDAREKLHIPWGDNSNQQHGDKMMSFDTRAPMAAQGMVETRVFLQYLPAIRALWADSGIQNAYDRRREFQLGESVKYFLDNLDKLGEPDYIPSQQDILLARRPTKGIHEYDFEIKNVPFKMVDVGGQRSERKRWFECFDSVTSILFLVSSSEFDQVLMEDRLTNRLTESLNIFETIVNNRVFSNVSIILFLNKTDLLEEKVQIVSIKDYFLEFEGDPHCLRDVQKFLVECFRNKRRDQQQKPLYHHFTTAINTENIRLVFRDVKDTILHDNLKQLMLQ

SEQ ID NO: 14695 - protein, 440 aa, Homo sapiens
MIIPSLEELDSLKYSDLQNLAKSLGLRANLRATKLLKALKGYIKHEARKGNENQDESQTSASSCDETEIQISNQEEAERQPLGHVTKTRRRCKTVRVDPDSQQNHSEIKISNPTEFQNHEKQESQDLRATAKVPSPPDEHQEAENAVSSGNRDSKVPSEGKKSLYTDESSKPGKNKRTAITTPNFKKLHEAHFKEMESIDQYIERKKKHFEEHNSMNELKQPINKGGVRTPVPPRGRLSVASTPISQRRSQGRSCGPASQSTLGLKGSLKRSAISAAKTGVRFSAATKDNEHKRSLTKTPARKSAHVTVSGGTPKGEAVLGTHKLKTITGNSAAVITPFKLTTEATQTPVSNKKPVFDLKASLSRPLNYEPHKGKLKPWGQSKENNYLNQHVNRINFYKKTYKQPHLQTKEEQRKKREQERKEKKAKVLGMRRGLILAED

SEQ ID NO: 14696 - protein, 1309 aa, Homo sapiens
MREPLPGSASWGTPGPPSAGTMSQLQLWLQFEALNKDSSYFEDFSNISIFSSSVDSLSDIVDTPDFLPADSLNQVSTIWDDNPAPSTHDKLFQLSRPFAGFEDFLPSHSTPLLVSYQEQSVQSQPEEEDEAEEEEAEELGHTETYADYVPSKSKIGKQHPDRVVETSTLSSVPPPDITYTLALPSDSGALSALQLEAITYACQQHEVLLPSGQRAGFLIGDGAGVGKGRTVAGVILENHLRGRKKALWFSVSNDLKYDAERDLRDIEATGIAVHALSKIKYGDTTTSEGVLFATYSALIGESQAGGQHRTRLRQILDWCGEAFEGVIVFDECHKAKNAGSTKMGKAVLDLQNKLPLARVVYASATGASEPRNMIYMSRLGIWGEGTPFRNFEEFLHAIEKRGVGAMEIVAMDMKVSGMYIARQLSFSGVTFRIEEIPLAPAFECVYNRAALLWAEALNVFQQAADWIGLESRKSLWGQFWSAHQRFFKYLCIAAKVRRLVELAREELARDKCVVIGLQSTGEARTREVLGENDGHLNCFVSAAEGVFLSLIQKHFPSTKRKRDRGAGSKRKRRPRGRGAKAPRLACETAGVIRISDDSSTESDPGLDSDFNSSPESLVDDDVVIVDAVGLPSDDRGPLCLLQRDPHGPGVLERVERLKQDLLDKVRRLGRELPVNTLDELIDQLGGPQRVAEMTGRKGRVVSRPDGTVAFESRAEQGLSIDHVNLREKQRFMSGEKLVAIISEASSSGVSLQADRRVQNQRRRVHMTLELPWSADRAIQQFGRTHRSNQVSAPEYVFLISELAGERRFASIVAKRLESLGALTHGDRRATESRDLSKYNFENKYGTRALHCVLTTILSQTENKVPVPQGYPGGVPTFFRDMKQGLLSVGIGGRESRNGCLDVEKDCSITKFLNRILGLEVHKQNALFQYFSDTFDHLIEMDKREGKYDMGILDLAPGIEEIYEESQQVFLAPGHPQDGQVVFYKISVDRGLKWEDAFAKSLALTGPYDGFYLSYKVRGNKPSCLLAEQNRGQFFTVYKPNIGRQSQLEALDSLRRKFHRVTAEEAKEPWESGYALSLTHCSHSAWNRHCRLAQEGKDCLQGLRLRHHYMLCGALLRVWGRIAAVMADVSSSSYLQIVRLKTKDRKKQVGIKIPEGCVRRVLQELRLMDADVKRRQAPALGCPAPPAPRPLALPCGPGEVLDLTYSPPAEAFPPPPHFSFPAPLSLDAGPGVVPLGTPDAQADPAALAHQGCDINFKEVLEDMLRSLHAGPPSEGALGEGAGAGGAAGGGPERQSVIQFSPPFPGAQAPL

SEQ ID NO: 14697 - protein, 232 aa, Homo sapiens
LSLLYKSSVHGGSIEDMVERCSRQGCTITMAYIDYNMIVAFMLGNYINLHESSTEPNDSLWFSLQKKNDTTEIETLLLNTAPKIIDEQLVCRLSKTDIFIICRDNKIYLDKMITRNLKLRFYGHRQYLECEVFRVEGIKDNLDDIKRIIKAREHRNRLLADIRDYRPYADLVSEIRILLVGPVGSGKSSFFNSVKSIFHGHVTGQAVVGSDITSITERGNPNIQLNAKSNGK

SEQ ID NO: 14698 - protein, 252 aa, Homo sapiens
MLSSCVRPVPTTVRFVDSLICNSSRSFMDLKALLSSLNDFASLSFAESWDNVGLLVEPSPPHTVNTLFLTNDLTEEVMEEVLQKKADLILSYHPPIFRPMKRITWNTWKERLVIRALENRVGIYSPHTAYDAAPQGVNNWLAKGLGACTSRPIHPSKAPNYPTEGNHRVEFNVNYTQDLDKVMSAVKGIDGVSVTSFSARTGNEEQTRINLNCTQKALMQVVDFLSRNKQLYQKHQDNTFYKSAGCQLKFVT

SEQ ID NO: 14699 - protein, 734 aa, Homo sapiens
MPGSATALRHERLKKTNARPIPLGLFTINEEDEQQKNGNSRRPKAPDSYKVQDKKNASSRPASAISGQNNNHSGNKPDPPPVLRVDDRQRLARERREEREKQLAAREIVWLEREERARQHYEKHLEERKKRLEEQRQKEERRRAAVEEKRRQRLEEDKERHEAVVRRTMERSQKPKQKHNRWSWGGSLHGSPSIHSAARRLQLSPWESSVVNRLLTPTHSFLARSKSTAALSGEAASCSPIIMPYKAAHSRNSMDRPKLFVTPPEGSSRRRIIHGTASYKKERERENVLFLTSGTRRAVSPSNPKARQPARSRLWLPSKSLPHLPGTPRPTSSLPPGSVKAAPAQVRPPSPGNIRPVKREVKVEPEKKDPEKEPQKVANEPSLKGRAPLVKVEEATVEERTPAEPEVGPAAPAMAPAPASAPAPASAPAPAPVPTPAMVSAPSSTVNASASVKTSAGTTDPEEATRLLAEKRRLAREQREKEERERREQEELERQKREELAQRVAEERTTRREEESRRLEAEQAREKEEQLQRQAEERALREREEAERAQRQKEEEARVREEAERVRQEREKHFQREEQERLERKKRLEEIMKRTRRTEATDKKTSDQRNGDIAKGALTGGTEVSALPCTTNAPGNGKPVGSPHVVTSHQSKVTVESTPDLEKQPNENGVSVQNENFEEIINLPIGSKPSRLDVTNSESPEIPLNPILAFDDEGTLGPLPQVDGVQTQQTAEVI

SEQ ID NO: 14700 - protein, 116 aa, Homo sapiens
MEEPTAVEGQVQLPSPHQGSLRKAVAAALALDGESTMGHRKKKRKESRPESIIIYRSDNEKTDEEPGESEGGDQPKEEEGDDFLDYPVDDDMWNLPLDSRYVTLTGTITRGKKKGQ

SEQ ID NO: 14701 - protein, 374 aa, Homo sapiens
MAAQRGMPSSAVRVLEEALGMGLTAAGDARDTADAVAAEGAYYLEQVTITEASEDDYEYEEIPDDNFSIPEGEEDLAKAIQMAQEQATDTEILERKTVLPSKHAVPEVIEDFLCNFLIKMGMTRTLDCFQSEWYELIQKGVTELRTVGNVPDVYTQIMLLENENKNLKKDLKHYKQAADKAREDLLKIQKERDFHRMHHKRIVQEKNKLINDLKGLKLHYASYEPTIRVLHEKHHTLLKEKMLTSLERDKVVGQISGLQETLKKLQRGHSYHGPQIKVDHSREKENAPEGPTQKGLREAREQNKCKTKMKGNTKVMRRREELWPFREPRPRSSTSQCCDTLFGAVQFQMFPSIQTPLNSHPDLGAHSRSCLECI

SEQ ID NO: 14702 - protein, 139 aa, Homo sapiens
MDAIHIGMSSTPLVKHTAGAGLKANRPRVMSKSGHSNVRIDKVDGIYLLYLQDLWTTVIDMKWRYKLTLFAATFVMTWFLFGVIYYAIAFIHGDLEPGEPISNHTPCIMKVDSLTGAFLFSLESQTTIGYGVRSITEEC

SEQ ID NO: 14703 - protein, 2400 aa, Homo sapiens
MHLHQVLTGAVNPGDNCYSVGSVGDVPFTAYGSGCDIVILANDFECVQIIPGAKHGNIQVSCVECSNQQGRIAASYGNAVCIFEPLGINSHKRNCQLKCQWLKTGQFFLSSVTYNLAWDPQDNRLLTATDSIQLWAPPGDDILEEEEEIDNTVPPVLNDWKCVWQCKTSVSVHLMEWSPDGEYFATAGKDDCLLKVWYPMTGWKSSIIPQDHHEVKRRQSSTQFSFVYLAHPRAVTGFSWRKTSKYMPRGSVCNVLLTSCHDGVCRLWAETLLPEDCLLGEQICETTTSSIASSLSHAGRHKDRIQHALETIHHLKNLRKGQRRSSVLVTHAELMPDQTAMHEVQRHISHHANALCHFHIAASINPATDIPNVLVGTAFNVDDGNGGFVVHWLNNKEFHFTSSTEVFMHQLRKLSDKQVDHENDDADREDEEHSQEDRERGLHMKLDHDLSLDRESEAGTGSSEHEDGEREGSPRTYSRLSVPMPLPTVLLDRKIETLLTEWNKNPDMLFTIHPVDGTFLVWHVKYLDEYNPGIFRQVQVSFSSRIPVAFPSGDASSLSKNIMMYACINATKDSHHTLLHQEGMSVGSPHGSQPHSRSHSTHMNILAPTVMMISKHIDGSLNQWAVTFADKSAFTTVLTVSHKFRYCGHRFHLNDLACHSVLPLLLTSSHHNALLTPELDCQWDSDNKLSRLMDPVKHIKGSSKQPLRNAATRTFHDPNAIYSELILWRVDPIGPLSYTGGVSELARINSLHTSAFSNVAWLPTLIPSYCLGTYCNSASACFVASDGKNLRLYQAVVDARKLLDELSDPESSKLIGEVFNIVSQQSTARPGCIIELDAITNQCGSNTQLLHVFQEDFIIGYKPHKEDMEKKETEIFFQPSQGYRPPPFSEKFFLVVIEKDSNNNSILHMWHLHLKSVQACLGRDTLDECGLRYLLAMRLHTCLLTSLPPLYRVQLLHQGVSTCHFAWAFHSEAEEELINMIPAIQRGDPQWSELRAMGIGWWVRNINTLRRCIEKVAKASFQRNNDALDAALFYLSMKKKAVVWGLFRSQHDEKMTTFFSHNFNEDRWRKAALKNAFSLLGKQRFEQSAAFFLLAGSLKDAIEVCLEKMEDIQLAMVIARLYESEFETSSTYISILNQKILGCQKDGSGFSCKRLHPDPFLRSLAYWVMKDYTRALDTLLEQTPKEDDEHQVIIKSCNPVAFSFYNYLRTHPLLIRRNLASPEGTLATLGLKTEKNFVDKINLIERKLFFTTANAHFKVGCPVLALEVLSKIPKVTKTSALSAKKDQPDFISHRMDDVPSHSKALSDGNGSSGIEWSNVTSSQYDWSQPIVKVDEEPLNLDWGEDHDSALDEEEDDAVGLVMKSTDAREKDKQSDQKASDPNMLLTPQEEDDPEGDTEVDVIAEQLKFRACLKILMTELRTLATGYEVDGGKLRFQLYNWLEKEIAALHEICNHESVIKEYSSKTYSKVESDLLDQEEMVDKPDIGSYERHQIERRRLQAKREHAERRKSWLQKNQDLLRVFLSYCSLHGAQGGGLASVRMELKFLLQESQQETTVKQLQSPLPLPTTLPLLSASIASTKTVIANPVLYLNNHIHDILYTIVQMKTPPHPSIEDVKVHTLHSLAASLSASIYQALCDSHSYSQTEGNQFTGMAYQGLLLSDRRRLRTESIEEHATPNSSPAQWPGVSSLINLLSSAQDEDQPKLNILLCEAVVAVYLSLLIHALATNSSSELFRLAAHPLNNRMWAAVFGGGVKLVVKPRRQSENISAPPVLSEDIDKHRRRFNMRMLVPGRPVKDATPPPVPAERPSYKEKFIPPELSMWDYFVAKPFLPLSDSGVIYDSDESIHSDEEDDAFFSDTQIQEHQDPNSYSWALLHLTMVKLALHNVKNFFPIAGLEFSELPVTSPLGIAVIKNLENWEQILQEKMDQFEGPPPNYINTYPTDLSVGAGPAILRNKAMLEPENTPFKSRDSSAFPVKRLWHFLVKQEVLQETFIRYIFTKKRKQSEVEADLGYPGGKAKVIHKESDMIMAFSVNKANCNEIVLASTHDVQELDVTSLLACQSYIWIGEEYDRESKSSDDVDYRGSTTTLYQPSATSYSASQVHPPSSLPWLGTGQTSTGASVLMKRNLHNVKRMTSHPVHQYYLTGAQDGSVRMFEWTRPQQLVCFRQAGNARVTRLYFNSQGNKCGVADGEGFLSIWQVNQTASNPKPYMSWQCHSKATSDFAFITSSSLVATSGHSNDNRNVCLWDTLISPGNSLIHGFTCHDHGATVLQYAPKQQLLISGGRKGHVCIFDIRQRQLIHTFQAHDSAIKALALDPYEEYFTTGSAEGNIKVWRLTGHGLIHSFKSEHAKQSIFRNIGAGVMQIDIIQGNRLFSCGADGTLKTRVLPNAFNIPNRILDIL

SEQ ID NO: 14704 - protein, 172 aa, Homo sapiens
MAQRLGEWARGPSDATGLYRAVLLRSAAMYSEIQRERADIGGLMARPEYREWNPELIKPKKLLNPVKASRSHQELHRELLMNHRRGLGVDSKPELQRVLEHRRRNQLIKKKKEELEAKRLQCPFEQELLRRQQRLNQLEKPPEKEEDHAPEFIKVRENLRRIATLTSEEREL

SEQ ID NO: 14705 - protein, 248 aa, Homo sapiens
MFLAKALLEGADRGLGEALGGLFGGGGQRREGGGRNIGGIVGGIVNFISEAAAAQYTPEPPPTQQHFTSVEASESEEVRRFRQQFTQLAGPDMEVGATDLMNILNKVLSKHKDLKTDGFSLDTCRSIVSVMDSDTTGKLGFEEFKYLWNNIKKWQCVYKQYDRDHSGSLGSSQLRGALQAAGFQLNEQLYQMIVRRYANEDGDMDFNNFISCLVRLDAMFRAFKSLDRDRDGLIQVSIKEWLQLTMYS

SEQ ID NO: 14706 - protein, 5497 aa, Homo sapiens
MAGYLSPAAYLYVEEQEYLQAYEDVLERYKDERDKVQKKTFTKWINQHLMKVRKHVNDLYEDLRDGHNLISLLEVLSGDTLPREKGRMRFHRLQNVQIALDYLKRRQVKLVNIRNDDITDGNPKLTLGLIWTIILHFQISDIHVTGESEDMSAKERLLLWTQQATEGYAGIRCENFTTCWRDGKLFNAIIHKYRPDLIDMNTVAVQSNLANLEHAFYVAEKIGVIRLLDPEDVDVSSPDEKSVITYVSSLYDAFPKVPEGGEGIGANDVEVKWIEYQNMVNYLIQWIRHHVTTMSERTFPNNPVELKALYNQYLQFKETEIPPKETEKSKIKRLYKLLEIWIEFGRIKLLQGYHPNDIEKEWGKLIIAMLEREKALRPEVERLEMLQQIANRVQRDSVICEDKLILAGNALQSDSKRLESGVQFQNEAEIAGYILECENLLRQHVIDVQILIDGKYYQADQLVQRVAKLRDEIMALRNECSSVYSKGRILTTEQTKLMISGITQSLNSGFAQTLHPSLTSGLTQSLTPSLTSSSMTSGLSSGMTSRLTPSVTPAYTPGFPSGLVPNFSSGVEPNSLQTLKLMQIRKPLLKSSLLDQNLTEEEINMKFVQDLLNWVDEMQVQLDRTEWGSDLPSVESHLENHKNVHRAIEEFESSLKEAKISEIQMTAPLKLTYAEKLHRLESQYAKLLNTSRNQERHLDTLHNFVSRATNELIWLNEKEEEEVAYDWSERNTNIARKKDYHAELMRELDQKEENIKSVQEIAEQLLLENHPARLTIEAYRAAMQTQWSWILQLCQCVEQHIKENTAYFEFFNDAKEATDYLRNLKDAIQRKYSCDRSSSIHKLEDLVQESMEEKEELLQYKSTIANLMGKAKTIIQLKPRNSDCPLKTSIPIKAICDYRQIEITIYKDDECVLANNSHRAKWKVISPTGNEAMVPSVCFTVPPPNKEAVDLANRIEQQYQNVLTLWHESHINMKSVVSWHYLINEIDRIRASNVASIKTMLPGEHQQVLSNLQSRFEDFLEDSQESQVFSGSDITQLEKEVNVCKQYYQELLKSAEREEQEESVYNLYISEVRNIRLRLENCEDRLIRQIRTPLERDDLHESVFRITEQEKLKKELERLKDDLGTITNKCEEFFSQAAASSSVPTLRSELNVVLQNMNQVYSMSSTYIDKLKTVNLVLKNTQAAEALVKLYETKLCEEEAVIADKNNIENLISTLKQWRSEVDEKRQVFHALEDELQKAKAISDEMFKTYKERDLDFDWHKEKADQLVERWQNVHVQIDNRLRDLEGIGKSLKYYRDTYHPLDDWIQQVETTQRKIQENQPENSKTLATQLNQQKMLVSEIEMKQSKMDECQKYAEQYSATVKDYELQTMTYRAMVDSQQKSPVKRRRMQSSADLIIQEFMDLRTRYTALVTLMTQYIKFAGDSLKRLEEEEKSLEEEKKEHVEKAKELQKWVSNISKTLKDAEKAGKPPFSKQKISSEEISTKKEQLSEALQTIQLFLAKHGDKMTDEERNELEKQVKTLQESYNLLFSESLKQLQESQTSGDVKVEEKIVAERQQEYKEKLQGICDLLTQTENRLIGHQEAFMIGDGTVELKKYQSKQEELQKDMQGSAQALAEVVKNTENFLKENGEKLSQEDKALIEQKLNEAKIKCEQLNLKAEQSKKELDKVVTTAIKEETEKVAAVKQLEESKTKIENLLDWLSNVDKDSERAGTKHKQVIEQNGTHFQEGDGKSAIGEEDEVNGNLLETDVDGQVGTTQENLNQQYQKVKAQHEKIISQHQAVIIATQSAQVLLEKQGQYLSPEEKEKLQKNMKELKVHYETALAESEKKMKLTHSLQEELEKFDADYTEFEHWLQQSEQELENLEAGADDINGLMTKLKRQKSFSEDVISHKGDLRYITISGNRVLEAAKSCSKRDGGKVDTSATHREVQRKLDHATDRFRSLYSKCNVLGNNLKDLVDKYQHYEDASCGLLAGLQACEATASKHLSEPIAVDPKNLQRQLEETKALQGQISSQQVAVEKLKKTAEVLLDARGSLLPAKNDIQKTLDDIVGRYEDLSKSVNERNEKLQITLTRSLSVQDGLDEMLDWMGNVESSLKEQGQVPLNSTALQDIISKNIMLEQDIAGRQSSINAMNEKVKKFMETTDPSTASSLQAKMKDLSARFSEASHKHKETLAKMEELKTKVELFENLSEKLQTFLETKTQALTEVDVPGKDVTELSQYMQESTSEFLEHKKHLEVLHSLLKEISSHGLPSDKALVLEKTNNLSKKFKEMEDTIKEKKEAVTSCQEQLDAFQVLVKSLKSWIKETTKKVPIVQPSFGAEDLGKSLEDTKKLQEKWSLKTPEIQKVNNSGISLCNLISAVTTPAKAIAAVKSGGAVLNGEGTATNTEEFWANKGLTSIKKDMTDISHGYEDLGLLLKDKIAELNTKLSKLQKAQEESSAMMQWLQKMNKTATKWQQTPAPTDTEAVKTQVEQNKSFEAELKQNVNKVQELKDKLTELLEENPDTPEAPRWKQMLTEIDSKWQELNQLTIDRQQKLEESSNNLTQFQTVEAQLKQWLVEKELMVSVLGPLSIDPNMLNTQRQQVQILLQEFATRKPQYEQLTAAGQGILSRPGEDPSLRGIVKEQLAAVTQKWDSLTGQLSDRCDWIDQAIVKSTQYQSLLRSLSDKLSDLDNKLSSSLAVSTHPDAMNQQLETAQKMKQEIQQEKKQIKVAQALCEDLSALVKEEYLKAELSRQLEGILKSFKDVEQKAENHVQHLQSACASSHQFQQMSRDFQAWLDTKKEEQNKSHPISAKLDVLESLIKDHKDFSKTLTAQSHMYEKTIAEGENLLLKTQGSEKAALQLQLNTIKTNWDTFNKQVKERENKLKESLEKALKYKEQVETLWPWIDKCQNNLEEIKFCLDPAEGENSIAKLKSLQKEMDQHFGMVELLNNTANSLLSVCEIDKEVVTDENKSLIQKVDMVTEQLHSKKFCLENMTQKFKEFQEVSKESKRQLQCAKEQLDIHDSLGSQAYSNKYLTMLQTQQKSLQALKHQVDLAKRLAQDLVVEASDSKGTSDVLLQVETIAQEHSTLSQQVDEKCSFLETKLQGIGHFQNTIREMFSQFAEFDDELDSMAPVGRDAETLQKQKETIKAFLKKLEALMASNDNANKTCKMMLATEETSPDLVGIKRDLEALSKQCNKLLDRAQAREEQVEGTIKRLEEFYSKLKEFSILLQKAEEHEESQGPVGMETETINQQLNMFKVFQKEEIEPLQGKQQDVNWLGQGLIQSAAKSTSTQGLEHDLDDVNARWKTLNKKVAQRAAQLQEALLHCGRFQDALESLLSWMVDTEELVANQKPPSAEFKVVKAQIQEQKLLQRLLDDRKSTVEVIKREGEKIATTAEPADKVKILKQLSLLDSRWEALLNKAETRNRQLEGISVVAQQFHETLEPLNEWLTTIEKRLVNCEPIGTQASKLEEQIAQHKALEDDIINHNKHLHQAVSIGQSLKVLSSREDKDMVQSKLDFSQVWYIEIQEKSHSRSELLQQALCNAKIFGEDEVELMNWLNEVHDKLSKLSVQDYSTEGLWKQQSELRVLQEDILLRKQNVDQALLNGLELLKQTTGDEVLIIQDKLEAIKARYKDITKLSTDVAKTLEQALQLARRLHSTHEELCTWLDKVEVELLSYETQVLKGEEASQAQMRPKELKKEAKNNKALLDSLNEVSSALLELVPWRAREGLEKMVAEDNERYRLVSDTITQKVEEIDAAILRSQQFDQAADAELSWITETEKKLMSLGDIRLEQDQTSAQLQVQKTFTMEILRHKDIIDDLVKSGHKIMTACSEEEKQSMKKKLDKVLKNYDTICQINSERYLQLERAQSLVNQFWETYEELWPWLTETQSIISQLPAPALEYETLRQQQEEHRQLRELIAEHKPHIDKMNKTGPQLLELSPGEGFSIQEKYVAADTLYSQIKEDVKKRAVALDEAISQSTQFHDKIDQILESLERIVERLRQPPSISAEVEKIKEQISENKNVSVDMEKLQPLYETLKQRGEEMIARSGGTDKDISAKAVQDKLDQMVFIWENIHTLVEEREAKLLDVMELAEKFWCDHMSLIVTIKDTQDFIRDLEDPGIDPSVVKQQQEAAETIREEIDGLQEELDIVINLGSELIAACGEPDKPIVKKSIDELNSAWDSLNKAWKDRIDKLEEAMQAAVQYQDGLQAVFDWVDIAGGKLASMSPIGTDLETVKQQIEELKQFKSEAYQQQIEMERLNHQAELLLKKVTEESDKHTVQDPLMELKLIWDSLEERIINRQHKLEGALLALGQFQHALDELLAWLTHTEGLLSEQKPVGGDPKAIEIELAKHHVLQNDVLAHQSTVEAVNKAGNDLIESSAGEEASNLQNKLEVLNQRWQNVLEKTEQRKQQLDGALRQAKGFHGEIEDLQQWLTDTERHLLASKPLGGLPETAKEQLNVHMEVCAAFEAKEETYKSLMQKGQQMLARCPKSAETNIDQDINNLKEKWESVETKLNERKTKLEEALNLAMEFHNSLQDFINWLTQAEQTLNVASRPSLILDTVLFQIDEHKVFANEVNSHREQIIELDKTGTHLKYFSQKQDVVLIKNLLISVQSRWEKVVQRLVERGRSLDDARKRAKQFHEAWSKLMEWLEESEKSLDSELEIANDPDKIKTQLAQHKEFQKSLGAKHSVYDTTNRTGRSLKEKTSLADDNLKLDDMLSELRDKWDTICGKSVERQNKLEEALLFSGQFTDALQALIDWLYRVEPQLAEDQPVHGDIDLVMNLIDNHKAFQKELGKRTSSVQALKRSARELIEGSRDDSSWVKVQMQELSTRWETVCALSISKQTRLEAALRQAEEFHSVVHALLEWLAEAEQTLRFHGVLPDDEDALRTLIDQHKEFMKKLEEKRAELNKATTMGDTVLAICHPDSITTIKHWITIIRARFEEVLAWAKQHQQRLASALAGLIAKQELLEALLAWLQWAETTLTDKDKEVIPQEIEEVKALIAEHQTFMEEMTRKQPDVDKVTKTYKRRAADPSSLQSHIPVLDKGRAGRKRFPASSLYPSGSQTQIETKNPRVNLLVSKWQQVWLLALERRRKLNDALDRLEELREFANFDFDIWRKKYMRWMNHKKSRVMDFFRRIDKDQDGKITRQEFIDGILSSKFPTSRLEMSAVADIFDRDGDGYIDYYEFVAALHPNKDAYKPITDADKIEDEVTRQVAKCKCAKRFQVEQIGDNKYRFFLGNQFGDSQQLRLVRILRSTVMVRVGGGWMALDEFLVKNDPCRAKGRTNMELREKFILADGASQGMAAFRPRGRRSRPSSRGASPNRSTSVSSQAAQAASPQVPATTTPKILHPLTRNYGKPWLTNSKMSTPCKAAECSDFPVPSAEGTPIQGSKLRLPGYLSGKGFHSGEDSGLITTAAARVRTQFADSKKTPSRPGSRAGSKAGSRASSRRGSDASDFDISEIQSVCSDVETVPQTHRPTPRAGSRPSTAKPSKIPTPQRKSPASKLDKSSKR

SEQ ID NO: 14707 - protein, 2344 aa, Homo sapiens
MIPWSIFLLHVLLFSLQEYICASSILMGTSKNGFNENRQKRALLAAQFEATSPRYFFHDAINWGESKIKGSCPYECLNGAFCSKTGTCDCQIFQALGTRCQIIPNMGNGRDGICKTWGQYHFETFDGIYYYFPGNCSYIFAKDCGDLEPRYTVWVHNSPKCLGSVYSCYRSISLFFSNQEEIRIYGHEIKKNGISLTLPQTIGQIFIEKLADYILVKTTFGFSLAWDGISGIYLKLSEDHKGKSCGLCGNYNDIQSDDFIILQEDYTEDIAMFANSWSVQTPDDTKCVLTPSDFPNPCSSGMPAFEAIFFKCQILLQFPFLSCHEYIDPYLYIASCVNDLCKTDDDETYCRAATEYARACSHAGYPIQDWRDDFPACTDKCDDSFVHRDCISCCPPTCTFEKQCLGSNLHCLDGCYCPDGLVMDNGTCISLENCPCGFHGLAYSVGSKIEQECTECVCVGGVWNCTEQDCPVQCSVVGDSHFTTFDGRHYSFIGMCQYILVKGTGKDKFTITLQKAPCEQNLGLVCLQSITLILEDDFNKQVTLGRGGQILTSPNQGFNLNGIVEIQTLSSLFILLKTTFGLKILFAIDGERIYIQLTSAWKRRTLGLCGTFNGNIRDDFLSPSGMIEGTPQLHANAWRVSSTCFAPVHVPVVDPCNINQQNIGYAAHCDVIHQELFAPCHIYISPGLYYQLCRHDACKCGSSCLCNALAHYAYLCGQHGVPIDFRTQISFCAVVCQKGMLYHHCSSFCLHSCISLSSPEQCSDDCAEGCNCPEGKFYEDTLNFCVPIFHCRCHYRGSVYQPGELIPTPSGLCQCSNGTVKCDELATPSAVHICPEGKEYFDCRFPDPELPAGGVNCETTCANLAMNFTCTPSSPCISGCVCAPGMAEHRGKCYVPESCPCIWKDWEYLSGEVIATPCYTCVCRRGMFNCTYYPCPAVCTIYGDRHYYSFDGLEYDYISDCQVFLIKSADDSDISVIAQNKKCFDNDIVCSKSVLISVGDTEIYLNDTPYKQKQSGFFLENKSTYQLWKAGYYIVVYFPEKDITILWDRKTTIHIKVGPQWKNKLSGLCGNFDKCTSNDMTTSNNLEVRNARVFGDSWALGQCESPDETIKPCEAHQNKFPYAKKECSILYSDIFASCRNVIDVTSFAKNCHEDTCNCNLGGDCECLCTSIAAYAYKCCQEGISIHWRSSTVCSLDCEYYNEGLGEGPYMLASYGQSGLVLGANMTSRSVFCLPRSSVHTSLFFYFMITPGLFKEKVSSLALVSLESAERPNYFLYVHDNDTLSLELWEANSAFHRRATFFHHQGLWIPGYSAFELYSKKGFFIIFTDSSVKASKYDDSEEFKHSSSFSIEEIQAAVPYRKMCEWRYEPCATPCFKTCSDPEALACKFLPPVEGCLPYCPKNMILDEVTLKCVYPRDCIPVIPTEPTLMPPAKPTVPMFTVWEMITPSDITVFDMLTPTTGLECEPQKFDPVYDCSQYICLNMEWQLYNWSLNCPKDVEMPDCGFRGRPVQVNSDICCPEWECPCRCSMLSELSIITFDGNNAALYSMASYILVRIPGEIIVAHIEKCSMNQNGNSLKKLAPSGRISGLCFKKLNVTTPIHKIIVNRLARKVEVDSIVVPLPFSSQELSIEDSGSMYVITTPAGLIIKWSHLTGIIDIHFGFRFNLSSYTEGLCGICNEDPDDDLRMQNGTIITNMEDIGLFIESWEIEKSFEVTMRRPVRNCTEHDCSQCIDLLNRRIFIPCHDKVSPEDFCEKMWINYTYFWNYECDALSAYVALCNKFDICIQWRTPDYCSLSCPEGKEYQPCVRPCEARTCLNQWFYGHTSCLNLREDCVCKVGTILHRPHSAQCIPEKECACTDSEDQPRTAGEIWNGGIDECTLYKCLENGSIIPIEPDCDEEPTPVCEREAEVVMGIIDKWTCCSKEVCGCDTTLCETSIPTCTNSQKLIVGHSPLSCCPQYKCECDPLKCPSISTPECREDQFMIQVRQEEPCCFSPFCVCESCTKPVPLCHDGEFLTVDLNSTHFCCPQYYCVCEPNLCPMPLLNCAEDMNLVKENVSGQCCPTWHCECNCENLIMPTCEVGEFTAIDHNFQSDCGCIQYLCEKDDVCVFQEVSVLNPGQSMIKYLEEDFCYAIECLEEKDNHTGFHTLNFTLVNCSKKCDVHQVYTPSPSDYGCCGTCKNVSCKFHMENGTSVVYAVGSTWHYNCTTYECVKTDEGAIILNYTMVCPPFNETECKMNEGIVKLYNEGCCKICKREERICQKVIIKSVIRKQDCMSQSPINVASCDGKCPSATIYNINIESHLRFCKCCRENGVRNLSVPLYCSGNGTEIMYTLQEPIDCTCQWN

SEQ ID NO: 14708 - protein, 1173 aa, Homo sapiens
MPEPTKKEENEVPAPAPPPEEPSKEKEAGTTPAKDWTLVETPPGEEQAKQNANSQLSILFIEKPQGGTVKVGEDITFIAKVKAEDLLRKPTIKWFKGKWMDLASKAGKHLQLKETFERHSRVYTFEMQIIKAKDNFAGNYRCEVTYKDKFDSCSFDLEVHESTGTTPNIDIRSAFKRSGEGQEDAGELDFSGLLKRREVKQQEEEPQVDVWELLKNAKPSEYEKIAFQYGITDLRGMLKRLKRMRREEKKSAAFAKILDPAYQVDKGGRVRFVVELADPKLEVKWYKNGQEIRPSTKYIFEHKGCQRILFINNCQMTDDSEYYVTAGDEKCSTELFVREPPIMVTKQLEDTTAYCGERVELECEVSEDDANVKWFKNGEEIIPGPKSRYRIRVEGKKHILIIEGATKADAAEYSVMTTGGQSSAKLSVDLKPLKILTPLTDQTVNLGKEICLKCEISENIPGKWTKNGLPVQESDRLKVVHKGRIHKLVIANALTEDEGDYVFAPDAYNVTLPAKVHVIDPPKIILDGLDADNTVTVIAGNKLRLEIPISGEPPPKAMWSRGDKAIMEGSGRIRTESYPDSSTLVIDIAERDDSGVYHINLKNEAGEAHASIKVKVVDFPDPPVAPTVTEVGDDWCIMNWEPPAYDGGSPILGYFIERKKKQSSRWMRLNFDLCKETTFEPKKMIEGVAYEVRIFAVNAIGISKPSMPSRPFVPLAVTSPPTLLTVDSVTDTTVTMRWRPPDHIGAAGLDGYVLEYCFEGSTSAKQSDENGEAAYDLPAEDWIVANKDLIDKTKFTITGLPTDAKIFVRVKAVNAAGASEPKYYSQPILVKEIIEPPKIRIPRHLKQTYIRRVGEAVNLVIPFQGKPRPELTWKKDGAEIDKNQINIRNSETDTIIFIRKAERSHSGKYDLQVKVDKFVETASIDIQIIDRPGPPQIVKIEDVWGENVALTWTPPKDDGNAAITGYTIQKADKKSMEWFTVIEHYHRTSATITELVIGNEYYFRVFSENMCGLSEDATMTKESAVIARDGKIYKNPVYEDFDFSEAPMFTQPLVNTYAIAGYNATLNCSVRGNPKPKITWMKNKVAIVDDPRYRMFSNQGVCTLEIRKPSPYDGGTYCCKAVNDLGTVEIECKLEVKVIYQGVNTPGQPVFLEGQQQVGSPSADSSCKAYLQT

SEQ ID NO: 14709 - protein, 296 aa, Homo sapiens
QASRPTRSPSGSGSRSRSSSSDSISSSSSTSSDSDSSSSSSDDSPARSVQSAAVPAPTSQLLSSLEKDEPRKSFGIKVQNLPVRSTDTSLKDGLFHEFKKFGKVTSVQIHGTSEERYGLVFFRQQEDQEKALTASKGKLFFGMQIEVTAWIGPETESENEFRPLDERIDEFHPKATRTLFIGNLEKTTTYHDLRNIFQRFGEIVDIDIKKVNGVPQYAFLQYCDIASVCKAIKKMDGEYLGNNRLKLGFGKSMPTNCVWLDGLSSNVSDQYLTRHFCRYGPVVKVVFDRLKGMALV

SEQ ID NO: 14710 - protein, 590 aa, Homo sapiens
MMAEQVKCASAGVSSGAGSGPVVNAELEVKKLQELVRKLEKQNEQLRSRAASAAAAPHLLLLPPPPPAAPPPAGLQPLGPRSPPAATATAAASGGLGLGLALGAGGGGGSGSGSGGGSSPAFPGTFCLPSPAPSLLCSLAQPPEAPFVYFKPAAGFFGAGGGGPEPGGAGTPPGAAAAPPSPPPTLLDEVELLDLESVAAWRDEDDYTWLYIGSSKTFTSSEKSLTPLQWCRHVLDNPTPEMEAARRSLCFRLEQGYTSRGSPLSPQSSIDSELSTSELEDDSISMGYKLQDLTDVQIMARLQEESLRQDYASTSASVSRHSSSVSLSSGKKGTCSDQEYDQYSLEDEEEFDHLPPPQPRLPRCSPFQRGIPHSQTFSSIRECRRSPSSQYFPSNNYQQQQYYSPQAQTPDQQPNRTNGDKLRRSMPNLARMPSTTAISSNISSPVTVRNSQSFDSSLHGAGNGISRIQSCIPSPGQLQHRVHSVGHFPVSIRQPLKATAYVSPTVQGSSNMPLSNGLQLYSNTGIPTPNKAAASGIMGRSALPRPSLAINGSNLPRSKIAQPVRSFLQPPKPLSSLSTLRDGNWRDGCY

SEQ ID NO: 14711 - protein, 301 aa, Homo sapiens
MARHGLPLLPLLSLLVGAWLKLGNGQATSMVQLQGGRFLMGTNSPDSRDGDGPVREATVKPFAIDIFPVTNKDFRDFVREKKYRTEAEMFGWSFVFEDFVSDELRNKATQPMKSVLWWLPVEKAFWRQPAGPGSGIRERLEHPVLHVSWNDARAYCAWRGKRLPTEEEWEFAARGGLKGQVYPWGNWFQPNRTNLWQGKFPKGDKAEDGFHGVSPVNAFPAQNNYGLYDLLGNVWEWTASPYQAAEQDMRVLRGASWIDTADGSANHRARVTTRMGNTPDSASDNLGFRCAADAGRPPGEL

SEQ ID NO: 14712 - protein, 698 aa, Homo sapiens
MSKNPSGKNRETVPIKDNFELEVLQAQYKELKEKMKVMEEEVLIKNGEIKILRDSLHQTESVLEEQRRSHFLLEQEKTQALSDKEKEFSKKLQSLQSELQFKDAEMNELRTKLQTSERANKLAAPSVSHVSPRKNPSVVIKPEACSPQFGKTSFPTKESFSANMSLPHPCQTESGYKPLVGREDSKPHSLRGDSIKQEEAQKSFVDSWRQRSNTQGSILINLLLKQPLIPGSSLSLCHLLSSSSESPAGTPLQPPGFGSTLAGMSGLRTTGSYDGSFSLSALREAQNLAFTGLNLVARNECSRDGDPAEGGRRAFPLCQLPGAVHFLPLVQFFIGLHCQALQDLAAAKRSGAPGDSPTHSSCVSSGVETNPEDSVCILEGFSVTALSILQHLVCHSGAVVSLLLSGVGADSAAGEGNRSLVHRLSDGDMTSALRGVADDQGQHPLLKMLLHLLAFSSAATGHLQASVLTQCLKVLVKLAENTSCDFLPRFQCVFQVLPKCLSPETPLPSVLLAVELLSLLADHDQLAPQLCSHSEGCLLLLLYMYITSRPDRVALETQWLQLEQEVVWLLAKLGVQSPLPPVTGSNCQCNVEVVRALTVMLHRQWLTVRRAGGPPRTDQQRRTVRCLRDTVLLLHGLSQKDKLFMMHCVEVLHQFDQVMPGVSMLIRGLPDVTDCEEAALDDLCAAETDVEDPEVECG

SEQ ID NO: 14713 - protein, 474 aa, Homo sapiens
MERSGQRVTTWDCDQGKHSDSDYREDGMDLGSDAGSSSSSSRASSQSNSTKVTPCSECKSSSSPGGSLDLVSALEDYEEPFPVYQKKVIDEWAPEEDGEEEEEEDERDQRGYRDDRSPAREPGDVSARTRSGGGGGRSATTAMPPPVPNGNLHQHDPQDLRHNGNVVVAGRPSCSRGPRRAIQKPQPAGGRRSGRGPAAGGLCLQPPDGGTCVPEEPPVPPMDWEALEKHLAGLQFREQEAQKNERESIRQKLALGSFFDDGPGIYTSCSKSGKPSLSSRLQSGMNLQICFVNDSGSDKDSDADDSKTETSLDTPLSPMSKQSSSYSDRDTTEEESESLDDMDFLTRQKKLQAEAKMALAMAKPMAKMQVEVEKQNRKKSPVADLLPHMPHISECLMKRSLKPTDLRDMTIGQLQVIVNDLHSQIESLNEELVQLLLIRDELHTEQDAMLVDIEDLTRHAESQQKHMAEKMPAK

SEQ ID NO: 14714 - protein, 316 aa, Homo sapiens
MRAHAGHKRSECGGEWRETPRKQKQHGKASISPSSGARRTVTPTRKRPYECKVCGKAFNSPNLFQIHQRTHTGKRSYKCREIVRAFTVSSFFRKHGKMHTGEKRYECKYCGKPIDYPSLFQIHVRTHTGEKPYKCKQCGKAFISAGYLRTHEIRSHALEKSHQCQECGKKLSCSSSLHRHERTHSGGKLYECQKCAKVFRCPTSLQAHERAHTGERPYECNKCGKTFNYPSCFRRHKKTHSGEKPYECTRCGKAFGWCSSLRRHEMTHTGEKPFDCKQCGKVFTFSNYLRLHERTHLAGRSQCFGRRQGDHLSPGV

SEQ ID NO: 14715 - protein, 287 aa, Homo sapiens
AVTEASLLRQCPLLLPQNRSKTVYEGFISAQGRDFHLRIVLPEDLQLKNARLLCSWQLRTILSGYHRIVQQRMQHSPDLMSFMMELKMLLEVALKNRQELYALPPPPQFYSSLIEEIGTLGWDKLVYADTCFSTIKLKAEDASGREHLITLKLKAKYPAESPDYFVDFPVPFCASWTPQVTDQAKMDVKIAVLPSSLISIYSQFLAAIESLKAFWDVMDEIDEKTWVLEPEKPPRSATARRIALGNNVSINIEVDPRHPTMLPECFFLGADHVVKPLGIKLSRNIHL

SEQ ID NO: 14716 - protein, 527 aa, Homo sapiens
MGTARIAPGLALLLCCPVLSSAYALVDADDVMTKEEQIFLLHRAQAQCEKRLKEVLQRPASIMESDKGWTSASTSGKPRKDKASGKLYPESEEDKEAPTGSRYRGRPCLPEWDHILCWPLGAPGEVVAVPCPDYIYDFNHKGHAYRRCDRNGSWELVPGHNRTWANYSECVKFLTNETREREVFDRLGMIYTVGYSVSLASLTVAVLILAYFRRLHCTRNYIHMHLFLSFMLRAVSIFVKDAVLYSGATLDEAERLTEEELRAIAQAPPPPATAAAGYAGCRVAVTFFLYFLATNYYWILVEGLYLHSLIFMAFFSEKKYLWGFTVFGWGLPAVFVAVWVSVRATLANTGCWDLSSGNKKWIIQVPILASIVLNFILFINIVRVLATKLRETNAGRCDTRQQYRKLLKSTLVLMPLFGVHYIVFMATPYTEVSGTLWQVQMHYEMLFNSFQGFFVAIIYCFCNGEVQAEIKKSWSRWTLALDFKRKARSGSSSYSYGPMVSHTSVTNVGPRVGLGLPLSPRLLPTAT

SEQ ID NO: 14717 - protein, 1453 aa, Homo sapiens
RSMMSSYERSMMSYERSMMSPMAERSMMSAYERSMMSAYERSMMSPMAERSMMSAYERSMMSAYERSMMSPMADRSMMSMGADRSMMSSYSAADRSMMSSYSAADRSMMSSYTADRSMMSMAADSYTDSYTDTYTEAYMVPPLPPEEPPTMPPLPPEEPPMTPPLPPEEPPEGPALPTEQSALTAENTWPTEVPSSPSEESVSQPEPPVSQSEISEPSAVPTDYSVSASDPSVLVSEAAVTVPEPPPEPESSITLTPVESAVVAEEHEVVPERPVTCMVSETPAMSAEPTVLASEPPVMSETAETFDSMRASGHVASEVSTSLLVPAVTTPVLAESILEPPAMAAPESSAMAVLESSAVTVLESSTVTVLESSTVTVLEPSVVTVPEPPVVAEPDYVTIPVPVVSALEPSVPVLEPAVSVLQPSMIVSEPSVSVQESTVTVSEPAVTVSEQTQVIPTEVAIESTPMILESSIMSSHVMKGINLSSGDQNLAPEIGMQEIALHSGEEPHAEEHLKGDFYESEHGINIDLNINNHLIAKEMEHNTVCAAGTSPVGEIGEEKILPTSETKQRTVLDTYPGVSEADAGETLSSTGPFALEPDATGTSKGIEFTTASTLSLVNKYDVDLSLTTQDTEHDMVISTSPSGGSEADIEGPLPAKDIHLDLPSNNNLVSKDTEEPLPVKESDQTLAALLSPKESSGGEKEVPPPPKETLPDSGFSANIEDINEADLVRPLLPKDMERLTSLRAGIEGPLLASDVGRDRSAASPVVSSMPERASESSSEEKDDYEIFVKVKDTHEKSKKNKNRDKGEKEKKRDSSLRSRSKRSKSSEHKSRKRTSESRSRARKRSSKSKSHRSQTRSRSRSRRRRRSSRSRSKSRGRRSVSKEKRKRSPKHRSKSRERKRKRSSSRDNRKTVRARSRTPSRRSRSHTPSRRRRSRSVGRRRSFSISPSRRSRTPSRRSRTPSRRSRTPSRRSRTPSRRSRTPSRRSRTPSRRRRSRSVVRRRSFSISPVRLRRSRTPLRRRFSRSPIRRKRSRSSERGRSPKRLTDLDKAQLLEIAKANAAAMCAKAGVPLPPNLKPAPPPTIEEKVAKKSGGATIEELTEKCKQIAQSKEDDDVIVNKPHVSDEEEEEPPFYHHPFKLSEPKPIFFNLNIAAAKPTPPKSQVTLTKEFPVSSGSQHRKKEADSVYGEWVPVEKNGEENKDDDNVFSSNLPSEPVDISTAMSERALAQKRLSENAFDLEAMSMLNRAQERIDAWAQLNSIPGQFTGSTGVQVLTQEQLANTGAQAWIKKDQFLRAAPVTGGMGAVLMRKMGWREGEGLGKNKEGNKEPILVDFKTDRKGLVAVGERAQKRSGNFSAAMKDLSGKHPVSALMEICNKRRWQPPEFLLVHDSGPDHRKHFLFRVLINGSAYQPSFASPNKKHAKATAATVVLQAMGLVPKDLMANATCFRSASRR

SEQ ID NO: 14718 - protein, 642 aa, Homo sapiens
MVHGSVTFRDVAIDFSQEEWECLQPDQRTLYRDVMLENYSHLISLAGSSISKPDVITLLEQEKEPWMVVRKETSRRYPDLELKYGPEKVSPENDTSEVNLPKQVIKQISTTLGIEAFYFRNDSEYRQFEGLQGYQEGNINQKMISYEKLPTHTPHASLICNTHKPYECKECGKYFSRSANLIQHQSIHTGEKPFECKECGKAFRLHIQFTRHQKFHTGEKPFECNECGKAFSLLTLLNRHKNIHTGEKLFECKECGKSFNRSSNLVQHQSIHSGVKPYECKECGKGFNRGAHLIQHQKIHSNEKPFVCKECGMAFRYHYQLIEHCQIHTGEKPFECKECGKAFTLLTKLVRHQKIHTGEKPFECRECGKAFSLLNQLNRHKNIHTGEKPFECKECGKSFNRSSNLVQHQSIHAGIKPYECKECGKGFNRGAHLIQHQKIHSNEKPFVCRECEMAFRYHCQLIEHSRIHTGDKPFECQDCGKAFNRGSSLVQHQSIHTGEKPYECKECGKAFRLYLQLSQHQKTHTGEKPFECKECGKFFRRGSNLNQHRSIHTGKKPFECKECGKAFRLHMHLIRHQKLHTGEKPFECKECGKAFRLHMQLIRHQKLHTGEKPFECKECGKVFSLPTQLNRHKNIHTGEKAS

SEQ ID NO: 14719 - protein, 175 aa, Homo sapiens
MPTAQWSVEDEEEAVHEQCQHERDRQLQAQDEEGGGHVPERPKQEMLLSLKPSEAPELDEDEGFGDWSQRPEQRQQHEGAQGALDSGEPPQCRSPEGEQEDRPGLHAYEKEDSDEVHLEELSLSKEGPGPEDTVQDNLGAAGAEEEQEEHQKCQQPRTPSPLVLEGTIEQSSPPL

SEQ ID NO: 14720 - protein, 139 aa, Homo sapiens
MSDKSELKAELERKKQRLAQIREEKKRKEEERKKKETDQKKEAVAPVQEESDLEKKRREAEALLQSMGLTPESPIVFSEYWVPPPMSPSSKSVSTPSEAGSQDSGDGAVGSRTLHWDTDPSVLQLHSDSDLGRGPIKLG

SEQ ID NO: 14721 - protein, 174 aa, Homo sapiens
MGVTPHHVCRPPGNVSQVVFHNHSNWSLEDTGALLSSGQKDYVTVQLQNGEIWELSRCSRNKRENTSSLGYEYTGSKKEFPCVDGYIYDQNTWKSTAVTQWNLVCDRKWLAMLIQPLFMFGVLLGSVTFGYFSDRLGRRVVLWATSSSMFLFGIAAAFAVDYYTFMAARFFLAM

SEQ ID NO: 14722 - protein, 378 aa, Homo sapiens
MIIPSLEELDSLKYSDLQNLAKSLGLRANLRDESQTSASSCDETEIQISNQEEAERQPLGHVTKTRRRCKTVRVDPDSQQNHSEIKISNPTEFQNHEKQESQDLRATAKVPSPPDEHQEAENAVSSGNRDSKVPSEGKKSLYTDESSKPGKNKRTAITTPNFKKLHEAHFKEMESIDQYIERKKKHFEEHNSMNELKQPINKGGVRTPVPPRGRLSVASTPISQRRSQGRSCGPASQSTLGLKGSLKRSAISAAKTGVRFSAATKDNEHKRSLTKTPARKSAHVTVSGGTPKGEAVLGTHKLKTITGNSAAGKLKPWGQSKENNYLNQHVNRINFYKKTYKQPHLQTKEEQRKKREQERKEKKAKVLGMRRGLILAED

SEQ ID NO: 14723 - protein, 780 aa, Homo sapiens
MSEAVRVPSPATPLVVAAPAPEERKGKESEREKLPPIVSAGAGATAGLDRGAKGQISTFSSFISAVSPKKEAAENRSSPAHLVFPNIKNVREPPPICLDVRQKQRTSMDASSSEMKAPVLPEPILPIQPKTVKDFQEDVEKVKSSGDWKAVHDFYLTTFDSFPELNAAFKKDATASFNTIEDSGINAKFVNAVYDTLLNTPQDVQKTVLKGIINSLLREWKGPRTKDDLRAYFILLQNPQFNNTSTYVIYAHLLRQIATLVEADHHFLVHWFKKQYSRLSQKRFKQLVERLLQFISLRLFPAKPEEFPPITKCSWWIPSAAKVLALLNTANNLVHPPLIPYTDFYNSTLDHIDLMEEYHTWQNFGNSHRFSFCQYPFVISVAAKKIIIQRDSEQQMINIARQSLVDKVSRRQRPDMNILFLNMKVRRTHLVSDSLDELTRKRADLKKKLKVTFVGEAGLDMGGLTKEWFLLLIRQIFHPDYGMFTYHKDSHCHWFSSFKCDNYSEFRLVGILMGLAVYNSITLDIRFPPCCYKKLLSPPIIPSDQNIPVGICNVTVDDLCQIMPELAHGLSELLSHEGNVEEDFYSTFQVFQEEFGIIKSYNLKPGGDKISVTNQNRKEYVQLYTDFLLNKSIYKQFAAFYYGFHSVCASNALMLLRPEEVEILVCGSPDLDMHALQRSTQYDGYAKTDLTIKYFWDVVLGFPLDLQKKLLHFTTGSDRVPVGGMADLNFKISKNETSTNCLPVAHTCFNQLCLPPYKSKKDLKQKLIIGISNSEGFGLE

SEQ ID NO: 14724 - protein, 279 aa, Homo sapiens
RGGLELGDAGAAGQLVLTNPWNIMIKHRQVQRRGRRSQMTTSFTDPAISMDLLRAVLQPSINEEIQTVFNKYMKAKLLFSDGEKVIPRLTHELPGIKRGRQAEEECAHRGSPLPKKRKGRPPGHILSSDRAAAGMVWKPKSCEPIRREGPKWDPARLNESTTFVLGSRANKALGMGGTRGRIYIKHPHLFKYAADPQDKHWLAEQHHMRATGGKMAYLLIEEDIRDLAASDDYRGCLDLKLEELKSFVLPSWMVEKMRKYMETLRTENEHRAVEAPPQT

SEQ ID NO: 14725 - protein, 80 aa, Homo sapiens
MDDDIAALVVDNGSGMCKAGFAGDDAPRAVFPSIVGRPRHQGVMVGMGQKDSYVGDEAQSKRGILTLKYPIEHGIVTNWD

SEQ ID NO: 14726 - protein, 235 aa, Homo sapiens
MEVMNLMEQPIKVTEWQQTYTYDSGIHSGANTCVPSVSSKGIMEEDEACGRQYTLKKTTTYTQGVPPSQGDLEYQMSTTARAKRVREAMCPGVSGEDSSLLLATQVEGQATNLQRLAEPSQLLKSAIVHLINYQDDAELATRALPELTKLLNDEDPVVVTKAAMIVNQLSKKEASRRALMGSPQLVAAVVRTMQNTSDLDTARCTTSILHNLSHHREGLLAIFKSGGIPALVRML

SEQ ID NO: 14727 - protein, 835 aa, Homo sapiens
MWPHSAGARPWASTLTGKDPRVMACWCLDGLPSGLAEPWRELWRWRSRPLHCVPPFSPLARSSRDHRNLRRRGNIDGWRQNLEPSNNVEMFPPSGHQDVSERRLDTQRPQVTMWERDVSSDRQEPGRRGRSWGLEGSQALSQQAEVIVRQLQELRRLEEEVRLLRETSLQQKMRLEAQAMELEALARAEKAGRAEAEGLRAALAGAEVVRKNLEEGSQRELEEVQRLHQEQLSSLTQAHEEALSSLTSKAEGLEKSLSSLETRRAGEAKELAEAQREAELLRKQLSKTQEDLEAQVTLVENLRKYVGEQVPSEVHSQTWELERQKLLETMQHLQEDRDSLHATAELLQVRVQSLTHILALQEEELTRKVQPSDSLEPEFTRKCQSLLNRWREKVFALMVQLKAQELEHSDSVKQLKGQVASLQEKVTSQSQEQAILQRSLQDKAAEVEVERMGAKGLQLELSRAQEARRRWQQQTASAEEQLRLVVNAVSSSQIWLETTMAKVEGAAAQLPSLNNRLSYAVRKVHTIRGLIARKLALAQLRQESCPLPPPVTDVSLELQQLREERNRLDAELQLSARLIQQEVGRAREQGEAERQQLSKVAQQLEQELQQTQESLASLGLQLEVARQGQQESTEEAASLRQELTQQQELYGQALQEKVAEVETRLREQLSDTERRLNEARREHAKAVVSLRQIQRRAAQEKERSQELRRLQEEARKEEGQRLARRLQELERDKNLMLATLQQEGLLSRYKQQRLLTVLPSLLDKKKSVVSSPRPPECSASAPVAAAVPTRESIKGSLSVLLDDLQDLSEAISKEEAVCQGDNLDRCSSSNPQMSS

SEQ ID NO: 14728 - protein, 770 aa, Homo sapiens
MKQLPAATVRLLSSSQIITSVVSVVKELIENSLDAGATSVDVKLENYGFDKIEVRDNGEGIKAVDAPVMAMKYYTSKINSHEDLENLTTYGFRGEALGSICCIAEVLITTRTAADNFSTQYVLDGSGHILSQKPSHLGQGTTVTALRLFKNLPVRKQFYSTAKKCKDEIKKIQDLLMSFGILKPDLRIVFVHNKAVIWQKSRVSDHKMALMSVLGTAVMNNMESFQYHSEESQIYLSGFLPKCDADHSFTSLSTPERSFIFINSRPVHQKDILKLIRHHYNLKCLKESTRLYPVFFLKIDVPTADVDVNLTPDKSQVLLQNKESVLIALENLMTTCYGPLPSTNSYENNKTDVSAADIVLSKTAETDVLFNKVESSGKNYSNVDTSVIPFQNDMHNDESGKNTDDCLNHQISIGDFGYGHCSSEISNIDKNTKNAFQDISMSNVSWENSQTEYSKTCFISSVKHTQSENGNKDHIDESGENEEEAGLENSSEISADEWSRGNILKNSVGENIEPVKILVPEKSLPCKVSNNNYPIPEQMNLNEDSCNKKSNVIDNKSGKVTAYDLLSNRVIKKPMSASALFVQDHRPQFLIENPKTSLEDATLQIEELWKTLSEEEKLNLFNGSHYLDVLYKMTADDQRYSGSTYLSDPRLTANGFKIKLIPGVSITENYLEIEGMANCLPFYGVADLKEILNAILNRNAKEVYECRPRKVISYLEGEAVRLSRQLPMYLSKEDIQDIIYRMKHQFGNEIKECVHGRPFFHHLTYLPETT

SEQ ID NO: 14729 - protein, 723 aa, Homo sapiens
MGLADASGPRDTQALLSATQAMDLRRRDYHMERPLLNQEHLEELGRWGSAPRTHQWRTWLQCSRARAYALLLQHLPVLVWLPRYPVRDWLLGDLLSGLSVAIMQLPQGLAYALLAGLPPVFGLYSSFYPVFIYFLFGTSRHISVATPGPLPLLTAPGRPTGGAGPDPLRLRGHLPVRTSCPRLYHSCSCAGLRLTAQVCVWPPSEQPLWATVPHLLLEVCWKLPQSKVGTVVTAAVAGVVLVVVKLLNDKLQQQLPMPIPGELLTLIGATGISYGMGLKHRFEVDVVGNIPAGLVPPVAPNTQLFSKLVGSAFTIAVVGFAIAISLGKIFALRHGYRVDSNQELVALGLSNLIGGIFQCFPVSCSMSRSLVQESTGGNSQVAGAISSLFILLIIVKLGELFHDLPKAVLAAIIIVNLKGMLRQLSDMRSLWKANRADLLIWLVTFTATILLNLDLGLVVAVIFSLLLVVVRTQMPHYSVLGQVPDTDIYRDVAEYSEAKEVRGVKVFRSSATVYFANAEFYSDALKQRCGVDVDFLISQKKKLLKKQEQLKLKQLQKEEKLRKQAASPKGASVSINVNTSLEDMRSNNVEDCKMMQVSSGDKMEDATANGQEDSKAPDGSTLKALGLPQPDFHSLILDLGALSFVDTVCLKSLKNIFHDFREIEVEVYMAACHSPVVSQLEAGHFFDASITKKHLFASVHDAVTFALQHPRPVPDSPVSVTRL

SEQ ID NO: 14730 - protein, 112 aa, Homo sapiens
MLPPQKKPWESMAKGLVLGALFTSFLLLVYSYAVPPLHAGLASTRTPEAAASCSPPALEPEAVIRANGSAGECQPRRNIVFLKTHKTASSTLLNILFRFGQKHRLKFAFPNG

SEQ ID NO: 14731 - protein, 313 aa, Homo sapiens
MALLCYNRGCGQRFDPETNSDDACTYHPGVPVFHDALKGCTKGRHNSEKPPEPVKPEVKTTEKKELCELKPKFQEHIIQAPKPVEAIKRPSPDEPMTNLELKISASLKQALDKLKLSSGNEENKKEEDNDEIKIGTSCKNGGCSKTYQGLESLEEVCVYHSGVPIFHEGMKYWSCCRRKTSDFNTFLAQEGCTKGKHMWTKKDAGKKVVPCRHDWHQTGGEVTISVYAKNSLPELSRVEANSTLLNVHIVFEGEKEFDQNVKLWGVIDVKRSYVTMTATKIEITMRKAEPMQWASLELPAAKKQEKQKDATTD

SEQ ID NO: 14732 - protein, 1027 aa, Homo sapiens
MRVSHTFPVVDCTAACCDLSSCDLAWWFEGRCYLVSCPHKENCEPKKMGPIRSYLTFVLRPVQRPAQLLDYGDMMLNRGSPSGIWGDSPEDIRKDLTFLGKDWGLEEMSEYSDDYRELEKDLLQPSGKQEPRGSAEYTDWGLLPGSEGAFNSSVGDSPAVPAETQQDPELHYLNESASTPAPKLPERSVLLPLPTTPSSGEVLEKEKASQLQEQSSNSSGKEVLMPSHSLPPASLELSSVTVEKSPVLTVTPGSTEHSIPTPPTSAAPSESTPSELPISPTTAPRTVKELTVSAGDNLIITLPDNEVELKAFVAPAPPVETTYNYEWNLISHPTDYQGEIKQGHKQTLNLSQLSVGLYVFKVTVSSENAFGEGFVNVTVKPARRVNLPPVAVVSPQLQELTLPLTSALIDGSQSTDDTEIVSYHWEEINGPFIEEKTSVDSPVLRLSNLDPGNYSFRLTVTDSDGATNSTTAALIVNNAVDYPPVANAGPNHTITLPQNSITLNGNQSSDDHQIVLYEWSLGPGSEGKHVVMQGVQTPYLHLSAMQEGDYTFQLKVTDSSRQQSTAVVTVIVQPENNRPPVAVAGPDKELIFPVESATLDGSSSSDDHGIVFYHWEHVRGPSAVEMENIDKAIATVTGLQVGTYHFRLTVKDQQGLSSTSTLTVAVKKENNSPPRARAGGRHVLVLPNNSITLDGSRSTDDQRIVSYLWIRDGQSPAAGDVIDGSDHSVALQLTNLVEGVYTFHLRVTDSQGASDTDTATVEVQPDPRKSGLVELTLQVGVGQLTEQRKDTLVRQLAVLLNVLDSDIKVQKIRAHSDLSTVIVFYVQSRPPFKVLKAAEVARNLHMRLSKEKADFLLFKVLRVDTAGCLLKCSGHGHCDPLTKRCICSHLWMENLIQRYIWDGESNCEWSIFYVTVLAFTLIVLTGGFTWLCICCCKRQKRTKIRKKTKYTILDNMDEQERMELRPKYGIKHRSTEHNSSLMVSESEFDSDQDTIFSREKMERGNPKVSMNGSIRNGASFSYCSKDR

SEQ ID NO: 14733 - protein, 535 aa, Homo sapiens
MMDDDTELRTDGNSLLKAVWLGRLRLTRLLLEGGAYINESNDKGETALMVACITKHVDQQSISKSKMVKYLLDNRADPNIQDKSGKTALIHACIRRAGGEVVSLLLENGADPSLEDRTGASALVYAINADDKDALKHLLDACKAKGKEVIIITTDKSSSGTKTTKQYLNVPPSPKVEDRHSPPLCASPSDIELKALGLDSPLTEKEDDFFSLQAGHPSSCNTSKAVNEPGSPTRKVSNLKRARLPQLKRLQSEPWGLIAPSVLAASTRQDETHGASTDNEVIKSISDISFPKRGPLSRTNSIDSKDPTLFHTVTEQVLKIPVSSAPASWKAAYEKGQAPHPRLARRGTLPVDQEKCGMGPSGPSALKEPASLKWLENDLYDLDIQPGPDPPNSISLESGKGPLDRKKLNSSHLSLFHGSRESLDTVPSTSPSSARRRPPHLLERRGSGTLLLDRISHTRPGFLPPLNVNLNPPIPDIRSSSKPSCSLASGLKSMVPVAPSSPKRVDLRSKKKLLRRHSMQIEQMKQLSDFEEIMT

SEQ ID NO: 14734 - protein, 71 aa, Homo sapiens
MAFVATQGATVVDQTTLMKKYLQFVAALTDVNTPDETKLKMMQEVSENFENVTSSPQYSTFLEHIIPRFLT

SEQ ID NO: 14735 - protein, 130 aa, Homo sapiens
MPLRDKYCQTDHHHHGCCEPVYILEPGDPPLLQQPLQTSKSGIQQIIECFRSGTKQLKHILLKDVDTIFECKLCRSLFRGLPNLITHKKFYCPPSLQMDDNLPDVNDKQSQAINDLLEAIYPSVDKREYI

SEQ ID NO: 14736 - protein, 381 aa, Homo sapiens
MSCLHPRQTWKGAALVHRKAWWMGRSLDGRLQVSHRKGLPHVIYCRLWRWPDLHSHHELRAMELCEFAFNMKKDEVCVNPYHYQRVETPVLPPVLVPRHTEIPAEFPPLDDYSHSIPENTNFPAGIEPQSNIPETPPPGYLSEDGETSDHQMNHSMDAGSPNLSPNPMSPAHNNLDLQPVTYCEPAFWCSISYYELNQRVGETFHASQPSMTVDGFTDPSNSERFCLGLLSNVNRNAAVELTRRHIGRGVRLYYIGGEVFAECLSDSAIFVQSPNCNQRYGWHPATVCKIPPGCNLKIFNNQEFAALLAQSVNQGFEAVYQLTRMCTIRMSFVKGWGAEYRRQTVTSTPCWIELHLNGPLQWLDKVLTQMGSPSIRCSSVS

SEQ ID NO: 14737 - protein, 253 aa, Homo sapiens
MNTVGPYHNRQETYKYFSLPFCVGSKKSISHYHETLGEALQGVELEFSGLDIKFKDDVMPATYCEIDLDKEKRDAFVYAIKNHYWYQMYIDDLPIWGIVGEADENGEDYYLWTYKKLEIGFNGNRIVDVNLTSEGKVKLVPNTKIQMSYSVKWKKSDVKFEDRFDKYLDPSFFQHRIHWFSIFNSFMMVIFLVGLVSMILMRTLRKDYARYSKEEEMDDMDRDLGDEYGWKQVHGDVFRPSSHPLIFSSLIGS

SEQ ID NO: 14738 - protein, 122 aa, Homo sapiens
MNPREEKVKIITEEFIENDEDADMGRQNKNSKVRRQPRKKQKPTPFSRACWQILPHLSAGVPLLGWEHPVQGKSFQATNCCPQGNGVRKIPPWQPPGACAGGAQDPPPEYDSPERPTERAGC

SEQ ID NO: 14739 - protein, 1167 aa, Homo sapiens
MKVNRETKRLYVGGLSQDISEADLQNQFSRFGEVSDVEIITRKDDQGNPQKVFAYINISVAEADLKKCMSVLNKTKWKGGTLQIQLAKESFLHRLAQEREAAKAKKEESTTGNANLLEKTGGVDFHMKAVPGTEVPGHKNWVVSKFGRVLPVLHLKNQHKRKIIKYDPSKYCHNLKKIGEDFSNTIPISSLTWELEGGNDPMSKKRRGEFSDFHGPPKKIIKVQKDESSTGSLAMSTRPRRVIERPPLTQQQAAQKRTCDSITPSKSSPVPVSDTQKLKNLPFKTSGLETAKKRNSISDDDTDSEDELRMMIAKEENLQRTTQPSINESESDPFEVVRDDFKSGVHKLHSLIGLGIKNRVSCHDSDDDIMRNDREYDSGDTDEIIAMKKNVAKVKNSTEFSQMEKSTKKTSFKNRENCELSDHCIKLQKRKSNVESALSHGLKSLNRKSPSHSSSSEDADSASELADSEGGEEYNAMMKNCLRVNLTLADLEQLAGSDLKVPNEDTKSDGPETTTQCKFDRGSKSPKTPTGLRRGRQCIRPAEIVASLLEGEENTCGKQKPKENNLKPKFQAFKGVGCLYEKESMKKSLKDSVASNNKDQNSMKHEDPSIISMEDGSPYVNGSLGEVTPCQHAKKANGPNYIQPQKRQTTFESQDRKAVSPSSSEKRSKNPISRPLEGKKSLSLSAKTHNIGFDKDSCHSTTKTEASQEERSDSSGLTSLKKSPKVSSKDTREIKTDFSLSISNSSDVSAKDKHAEDNEKRLAALEARQKAKEVQKKLVHNALANLDGHPEDKPTHIIFGSDSECETEETSTQEQSHPGEEWVKESMGKTSGKLFDSSDDDESDSEDDSNRFKIKPQFEGRAGQKLMDLQSHFGTDDRFRMDSRFLETDSEEEQEEVNEKKTAEEEELAEEKKKALNVVQSVLQINLSNSTNRGSVAAKKFKDIIHYDPTKQDHATYERKRDDKPKESKAKRKKKREEAEKLPEVSKEMYYNIAMDLKEIFQTTKYTSEKEEGTPWNEDCGKEKPEEIQDPAALTSDAEQPSGFTFSFFDSDTKDIKEETYRVETVKPGKIVWQEDPRLQDSSSEEEDVTEETDHRNSSPGEASLLEKETTRFFFFSKNDERLQGSDLFWRGVGSNMSRNSWEARTTNLRMDCRKKHKDAKRKMKPK

SEQ ID NO: 14740 - protein, 88 aa, Homo sapiens
MGETEKRIETHRIRCLSKLKMFLLAITCAFVSKTLSGSYMNSMLTQIERQFNIPTSLVGFINGSFEIGNLLLIIFVSYFGTKLHRPIM

SEQ ID NO: 14741 - protein, 1419 aa, Homo sapiens
MSGGASATGPRRGPPGLEDTTSKKKQKDRANQESKDGDPRKETGSRYVAQAGLEPLASGDPSASASHAAGITGSRHRTRLFFPSSSGSASTPQEEQTKEGACEDPHDLLATPTPELLLDWRQSAEEVIVKLRVGVGPLQLEDVDAAFTDTDCVVRFAGGQQWGGVFYAEIKSSCAKVQTRKGSLLHLTLPKKVPMLTWPSLLKKPLGTQELVPGLRCQENGQELSPIALEPGPEPHRAKQEARNQKRAQGRGEVGAGAGPGAQAGPSAKRAVHLCRGPEGDGSRDDPGPRGDAPPFVADPATQVEADEQLCIPPLNSQTCLLGSEENLAPLAGEKAVPPGNDPVSPAMVRSRNPGKDDCAKEEMAVAADAATLVDEPESMVNLAFVKNDSYEKGPDSVVVHVYVKEICRDTSRVLFREQDFTLIFQTRDGNFLRLHPGCGPHTTFRWQVKLRNLIEPEQCTFCFTASRIDICLRKRQSQRWGGLEAPAARVGGAKVAVPTGPTPLDSTPPGGAPHPLTGQEEARAVEKDKSKARSEDTGLDSVATRTPMEHVTPKPETHLASPKPTCMVPPMPHSPVSGDSVEEEEEEEKKVCLPGFTGLVNLGNTCFMNSVIQSLSNTRELRDFFHDRSFEAEINYNNPLGTGGRLAIGFAVLLRALWKGTHHAFQPSKLKAIVASKASQFTGYAQHDAQEFMAFLLDGLHEDLNRIQNKPYTETVDSDGRPDEVVAEEAWQRHKMRNDSFIVDLFQGQYKSKLVCPVCAKVSITFDPFLYLPVPLPQKQKVLPVFYFAREPHSKPIKFLVSVSKENSTASEVLDSLSQSVHVKPENLRLAEVIKNRFHRVFLPSHSLDTVSPSDTLLCFELLSSELAKERVVVLEVQQRPQVPSVPISKCAACQRKQQSEDEKLKRCTRCYRVGYCNQLCQKTHWPDHKGLCRPENIGYPFLVSVPASRLTYARLAQLLEGYARYSVSVFQPPFQPGRMALESQSPGCTTLLSTGSLEAGDSERDPIQPPELQLVTPMAEGDTGLPRVWAAPDRGPVPSTSGISSEMLASGPIEVGSLPAGERVSRPEAAVPGYQHPSEAMNAHTPQFFIYKIDSSNREQRLEDKGDTPLELGDDCSLALVWRNNERLQEFVLVASKELECAEDPGSAGEAARAGHFTLDQCLNLFTRPEVLAPEEAWYCPQCKQHREASKQLLLWRLPNVLIVQLKRFSFRSFIWRDKINDLVEFPVRNLDLSKFCIGQKEEQLPSYDLYAVINHYGGMIGGHYTACARLPNDRSSQRSDVGWRLFDDSTVTTVDESQVVTRYAYVLFYRRRNSPVERPPRAGHSEHHPDLGPAAEAAASQASRIWQELEAEEEPVPEGSGPLGPWGPQDWVGPLPRGPTTPDEGCLRYFVLGTVAALVALVLNVFYPLVSQSRWR

SEQ ID NO: 14742 - protein, 1089 aa, Homo sapiens
MKNLLTEKCISSHNFHQKVIKQRMEKKVDSRFYYEQRLLRKVFEEWKEEWWVFQHEWKLCVRADCHYRVWWSTWRQRLGQVRVSRALHASALKHRALSLQVQAWSQWREQLLYVQKEKQKVVSAVKHHQHWQKRRFLKAWLEYLQVRRVKRQQNEMAERFHHVTVLQIYFCDWQQAWERRESLYAHHAQVEKLARKMALRRAFTHWKHYMLLCAEEAAQFEMAEEHHRHSQLYFCFRALKDNVTHAHLQQIRRNLAHQQHGVTLLHRFWNLWRSQIEQKKERELLPLLHAAWDHYRIALLCKCIELWLQYTQKRRYKQLLQARADGHFQQRALPAAFHTWNRLWRWRHQENVLSARATRFHRETLEKQVFSLWRQKMFQHRENRLAERMAILHAERQLLYRSWFMWHQQAAARHQEQEWQTVACAHHRHGRLKKAFCLWRESAQGLRTERTGRVRAAEFHMAQLLRWAWSQWRECLALRGAERQKLMRADLHHQHSVLHRALQAWVTYQGRVRSILREVAARESQHNRQLLRGALRRWKENTMARVDEAKKTFQASTHYRRTICSKVLVQWREAVSVQMYYRQQEDCAIWEAQKVLDRGCLRTWFQRWWDCSRRSAQQRLQLERAVQHHHRQLLLEGLARWKTHHLQCVRKRLLHRQSTQLLAQRLSRTCFRQWRQQLAARRQEQRATVRALWFWAFSLQAKVWATWLAFVLERRRKKARLQWALQAYQGQLLQEGATRLLRFAASMKASRQQLQAQQQVQAAHSLHRAVRRCATLWKQKVLGRGGKPQPLAAIAPSRKVTFEGPLLNRIAAGAGDGTLETKRPQASRPLGALGRLAAEEPHALELNTAHSARKQPRRPHFLLEPAQSQRPQKPQEHGLGMAQPAAPSLTRPFLAEAPTALVPHSPLPGALSSAPGPKQPPTASTGPELLLLPLSSFMPCGAAAPARVSAQRATPRDKPPVPSSLASVPDPHLLLPGDFSATRAGPGLSTAGSLDLEAELEEIQQQLLHYQTTKQNLWSCRRQASSLRRWLELNREEPGPEDQEVEQQVQKELEQVEMQIQLLAEELQAQRQPIGACVARIQALRQALC

SEQ ID NO: 14743 - protein, 939 aa, Homo sapiens
MRNVALRRAAGPVCAEAAERRVTSVPELFLTAVKLTHDDTGARYLHLAREDTNNLFSVQFRTTPMDSTGVPHILEHTVLCGSQKYPCRDPFFKMLNRSLSTFMNAFTASDYTLYPFSTQNPKDFQNLLSVYLDATFFPCLRELDFWQEGWRLEHENPSDPQTPLVFKGVVFNEMKGAFTDNERIFSQHLQNRLLPDHTYSVVSGGDPLCIPELTWEQLKQFHATHYHPSNARFFTYGNFPLEQHLKQIHEEALSKFQKIEPSTVVPAQTPWDKPREFQITCGPDSFATDPSKQTTISVSFLLPDITDTFEAFTLSLLSSLLTSGPNSPFYKALIESGLGTDFSPDVGYNGYTREAYFSVGLQGIAEKDIETVRSLIDRTIDEVVEKGFEDDRIEALLHKIEIQMKHQSTSFGLMLTSYIASCWNHDGDPVELLKLGNQLAKFRQCLQENPKFLQEKVKQYFKNNQHKLTLSMRPDDKYHEKQAQVEATKLKQKVEALSPGDRQQIYEKGLELRSQQSKPQDASCLPALKVSDIEPTIPVTELDVVLTAGDIPVQYCAQPTNGMVYFRAFSSLNTLPEELRPYVPLFCSVLTNPCFEEEEHFKVLVKMTAQELANGIPDSGHLYASIRAGRTLTPAGDLQETFSGMDQVRLMKRIAEMTDIKPILRKLPRIKKHLLNGDNMRCSVNATPQQMPQTEKAVEDFLRSIGRSKKERRPVRPHTVEKPVPSSSGGDAHVPHGSQVIRKLVMEPTFKPWQMKTHFLMPFPVNYVGECIRTVPYTDPDHASLKILARLMTAKFLHTEIREKGGAYGGGAKLSHNGIFTLYSYRDPNTIETLQSFGKAVDWAKSGKFTQQDIDEAKLSVFSTVDAPVAPSDKGMDHFLYGLSDEMKQAHREQLFAVSHDKLLAVSDRYLGTGKSTHGLAILGPENPKIAKDPSWIIQ

SEQ ID NO: 14744 - protein, 1106 aa, Homo sapiens
LKEKVPEEKVKPGPPKVPEKSVRLVVNYLRTQKAVVRVSPEVPLQNILPVICAKCEVSPEHVVLLRDNIAGEELELSKSLNELGIKELYAWDNRRETFRKSSLGNDETDKEKKKFLGFFKVNKRSNSKAEQLVLSGADSDEDTSRAAPGRGLNGCLTTPNSPSMHSRSLTLGPSLSLGSISGVSVKSEMKKRRAPPPPGSGPPVQDKASEKVSLGSQIDLQKKKRRAPAPPPPQPPPPSPLIPNRTEDKEENRKSTMVSLPLGSGSHCSPDGAPQVLSEAEETVSVGSCFASEDTTEDSGVMSSPSDIVSLDSQQDSMKYKDKWATDQEDCSDQDLAGTPDLGPQKSPLWEKNGSENSHLRTEKAVTASNDEEDLLIAGEFRKTLAELDEDLEEMEDSYETDTSSLTSSIHGASNHCPQDAMIPHGDTDAIPVTFIGEVSDDPVDSGLFSNRNNNAGSFDSEGVASRRDSLAPLQAEHSQPHEKAREEVPALHPASHDVGKGIRVALSNISKDGNLMETAPRVTSFASNLHTDNLNAKVKDKVYGCADGERTQATERVNSQPVNEKDSNDKNAALAPTSWHQRGQNPGKSYRLKHGLTTYKIIPPKSEMRCYDRDVSLSTGAIKIDELGNLVSPHATGIRIISLSSSVPEAESQPIGKVREFWRCNSVEKHLGRPSESSARGPPSTPVPTQTQNPESRLQADPKPISPQQKSAHHEGRNPLGEGRNQPPTMGMGHVRVPAAHTTEVTFLKPQRRTSSQYVASAIAKRIGAPKVHADVVRPHGYAEKGYAGKAPVLAAPPVTVKDDRTSSPHSETQGWKDGAQWPCVTPPNNHGEDLAVGAPPRGEVIGPHRKLSTQDRPAAIHRSSCFSLVQSSQRDRVSVGQSCGFSGKQSTSSQEASSASEPRRAPDGTDPPPPHTSDTQACSRELVNGSVRAPGHGEPSHPPGGSGTESHILLEREEKPSVFSTDGNETDSIWPPSIFGPKKKFKPVVQRPVPKDTSLHSALMEAIHSAGGKDRLRKTAEHTGEGRPAKLSYTEAEGERSALLAAIRGHSGTCSLRKALSAPRTASRFSTGTLSNTADARQALMDAIRSGTGAARLRKVPLLV

SEQ ID NO: 14745 - protein, 597 aa, Homo sapiens
MALNSPQPGPVESELGKQLLKTGWEGSPLPRSPTQDAAGVGPPASQGRGPAGEPMGPEAGSKAELPPTVSRPPLLRGLSWDSGPEEPGPRLQKVLAKLPLAEEEKRFAGKAGGKLAKAPGLKDFQIQVQPVRMQKLTKLREEHILMRNQNLVGLKLPDLSEAAEQEKGLPSELSPAIEEEESKSGLDVMPNISDVLLRKLRVHRSLPGSAPPLTEKEVENVFVQLSLAFRNDSYTLESRINQAERERNLTEENTEKELENFKASITSSASLWHHCEHRETYQKLLEDIAVLHRLAARLSSRAEVVGAVRQEKRMSKATEVMMQYVENLKRTYEKDHAELMEFKKLANQNSSRSCGPSEDGVPRTARSMSLTLGKNMPRRRVSVAVVPKFNALNLPGQTPSSSSIPSLPALSESPNGKGSLPVTSALPALLENGKTNGDPDCEASAPALTLSCLEELSQETKARMEEEAYSKGFQEGLKKTKELQDLKEEEEEQKSESPEEPEEVEETEEEEKGPRSSKLEELVHFLQVMYPKLCQHWQVIWMMAAVMLVLTVVLGLYNSYNSCAEQADGPLGRSTCSAAQRDSWWSSGLQHEQPTEQ

SEQ ID NO: 14746 - protein, 703 aa, Homo sapiens
MADGGAASQDESSAAAAAAADSRMNNPSETSKPSMESGDGNTGTQTNGLDFQKQPVPVGGAISTAQAQAFLGHLHQVQLAGTSLQAAAQSLNVQSKSNEESGDSQQPSQPSQQPSVQAAIPQTQLMLAGGQITGDLQQLQQLQQQNLNLQQFVLVHPTTNLQPAQFIISQTPQGQQGLLQAQNLLTQLPQQSQANLLQSQPSITLTSQPATPTRTIAATPIQTLPQSQSTPKRIDTPSLEEPSDLEELEQFAKTFKQRRIKLGFTQGDVGLAMGKLYGNDFSQTTISRFEALNLSFKNMCKLKPLLEKWLNDAENLSSDSSLSSPSALNSPGIEGLSRRRKKRTSIETNIRVALEKSFLENQKPTSEEITMIADQLNMEKEVIRVWFCNRRQKEKRINPPSSGGTSSSPIKAIFPSPTSLVATTPSLVTSSAATTLTVSPVLPLTSAAVTNLSVTGTSDTTSNNTATVISTAPPASSAVTSPSLSPSPSASASTSEASSASETSTTQTTSTPLSSPLGTSQVMVTASGLQTAAAAALQGAAQLPANASLAAMAAAAGLNPSLMAPSQFAAGGALLSLNPGTLSGALSPALMSNSTLATIQALASGGSLPITSLDATGNLVFANAGGAPNIVTAPLFLNPQNLSLLTSNPVSLVSAAAASAGNSAPVASLHATSTSAESIQNSLFTVASASGAASTTTTASKAQ

SEQ ID NO: 14747 - protein, 704 aa, Homo sapiens
MSEDSEKEDYSDRTISDEDESDEDMFMKFVSEDLHRCALLTADSFGDPFFPRTTQILLEYQLGRWVPRLREPRDLYGVSSSGPLSPTRWPYHCEVIDEKVQHIDWTPSCPEPVYIPTGLETEPLYPDSKEATVVYLAEDAYKEPCFVYSRVGGNRTPLKQPVDYRDNTLMFEARFESGNLQKVVKVAEYEYQLTVRPDLFTNKHTQWYYFQVTNMRAGIVYRFTIVNFTKPASLYSRGMRPLFYSEKEAKAHHIGWQRIGDQIKYYRNNPGQDGRHYFSLTWTFQFPHNKDTCYFAHCYPYTYTNLQEYLSGINNDPVRSKFCKIRVLCHTLARNMVYILTITTPLKNSDSRKRKAVILTARVHPGETNSSWIMKGFLDYILGNSSDAQLLRDTFVFKVVPMLNPDGVIVGNYRCSLAGRDLNRNYTSLLKESFPSVWYTRNMVHRLMEKREVILYCDLHGHSRKENIFMYGCDGSDRSKTLYLQQRIFPLMLSKNCPDKFSFSACKFNVQKSKEGTGRVVMWKMGIRNSFTMEATFCGSTLGNKRGTHFSTKDLESMGYHFCDSLLDYCDPDRTKYYRCLKELEEMERHITLEKVFEDSDTPVIDITLDVESSSRGSDSSESIDSLTYLLKLTSQKKHLKTKKERNSTIASHQNARGQEVYDRGHLLQRHTQSNSDVKDTRPNEPDDYMVDYFRRQLPNQGLV

SEQ ID NO: 14748 - protein, 249 aa, Homo sapiens
MFPRRRTERRLGDTGTRKKIAYRKAVPGGRKCGASLSWEKSSREYPDSWYRDITSNKKFFSLAATYRGAIVGMIVAEIKNRTKIHKEDGDILASNFSVDTQVAYILSLGVVKEFRKHGIGSLLLESLKDHISTTAQDHCKAIYLHVLTTNNTAINFYENRDFKQHHYLPYYYSIRGVLKDGFTYVLYINGGHPPWTILDYIQHLGSALASLSPCSIPHRVYRQAHSLLCSFLPWSGISSKSGIEYSRTM

SEQ ID NO: 14749 - protein, 406 aa, Homo sapiens
MSLVELLLWWNCFSRTGVAASLEVSESPGSIQVARGQPAVLPCTFTTSAALINLNVIWMVTPLSNANQPEQVILYQGGQMFDGAPRFHGRVGFTGTMPATNVSIFINNTQLSDTGTYQCLVNNLPDIGGRNIGVTGLTVLVPPSAPHCQIQGSQDIGSDVILLCSSEEGIPRPTYLWEKLDNTLKLPPTATQDQVQGTVTIRNISALSSAQPRNIGLIAGAIGTGAVIIIFCIALILGAFFYWRSKNKEEEEEEIPNEIREDDLPPKCSSAKAFHTEISSSDNNTLTSSNAYNSRYWSNNPKVHRNTESVSHFSDLGQSFSFHSGNANIPSIYANGTHLVPGQHKTLVVTANRGSSPQVMSRSNGSVSRKPRPPHTHSYTISHATLERIGAVPVMVPAQSRAGSLV

SEQ ID NO: 14750 - protein, 99 aa, Homo sapiens
MRGPSGPPGLLYVPHLLLCLLCLLPPPLQYAAGQSQMPKDQPLWALLEQYCHTIMTLTNLSVTPGAHSHSLSARGCGTRWTRHCSTACWRPTAAWRWLK

SEQ ID NO: 14751 - protein, 418 aa, Homo sapiens
MAQESVMFSDVSVDFSQEEWECLNDDQRDLYRDVMLENYSNLVSMGHSISKPNVISYLEQGKEPWLADRELTRGQWPVLESRCETKKLFLKKEIYEIESTQWEIMEKLTRRDFQCSSFRDDWECNRQFKKELGSQGGHFNQLVFTHEDLPTLSHHPSFTLQQIINSKKKFCASKEYRKTFRHGSQFATHEIIHTIEKPYECKECGKSFRHPSRLTHHQKIHTGKKPFECKECGKTFICGSDLTRHHRIHTGEKPYECKECGKAFSSGSNFTRHQRIHTGEKPYECKECGKAFSSGSNFTQHQRIHTGEKPYECKECGNAFSQSSQLIKHQRIHTGEKPYECKECEKAFRSGSDLTRHQRIHTGEKPYECKICGKAYSQSSQLISHHRIHTSEKPYEYRECGKNFNYDPQLIQHQNLYW

SEQ ID NO: 14752 - protein, 852 aa, Homo sapiens
MKRAAAKHLIERYYHQLTEGCGNEACTNEFCASCPTFLRMDNNAAAIKALELYKINAKLCDPHPSKKGASSAYLENSKGAPNNSCSEIKMNKKGARIDFKDVTYLTEEKVYEILELCREREDYSPLIRVIGRVFSSAEALVQSFRKVKQHTKEELKSLQAKDEDKDEDEKEKAACSAAAMEEDSEASSSRIGDSSQGDNNLQKLGPDDVSVDIDAIRRVYTRLLSNEKIETAFLNALVYLSPNVECDLTYHNVYSRDPNYLNLFIIVMENRNLHSPEYLEMALPLFCKAMSKLPLAAQGKLIRLWSKYNADQIRRMMETFQQLITYKVISNEFNSRNLVNDDDAIVAASKCLKMVYYANVVGGEVDTNHNEEDDEEPIPESSELTLQELLGEERRNKKGPRVDPLETELGVKTLDCRKPLIPFEEFINEPLNEVLEMDKDYTFFKVETENKFSFMTCPFILNAVTKNLGLYYDNRIRMYSERRITVLYSLVQGQQLNPYLRLKVRRDHIIDDALVRLEMIAMENPADLKKQLYVEFEGEQGVDEGGVSKEFFQLVVEEIFNPDIGMFTYDESTKLFWFNPSSFETEGQFTLIGIVLGLAIYNNCILDVHFPMVVYRKLMGKKGTFRDLGDSHPVLYQSLKDLLEYEGNVEDDMMITFQISQTDLFGNPMMYDLKENGDKIPITNENRKEFVNLYSDYILNKSVEKQFKAFRRGFHMVTNESPLKYLFRPEEIELLICGSRNLDFQALEETTEYDGGYTRDSVLIREFWEIVHSFTDEQKRLFLQFTTGTDRAPVGGLGKLKMIIAKNGPDTERLPTSHTCFNVLLLPEYSSKEKLKERLLKAITYAKGFGML

SEQ ID NO: 14753 - protein, 271 aa, Homo sapiens
MYRPRARAAPEGRVRGCAVPSTVLLLLAYLAYLALGTGVFWTLEGRAAQDSSRSFQRDKWELLQNFTCLDRPALDSLIRDVVQAYKNGASLLSNTTSMGRWELVGSFFFSVSTITTIGYGNLSPNTMAARLFCIFFALVGIPLNLVVLNRLGHLMQQGVNHWASRLGGTWQDPDKARWLAGSGALLSGLLLFLLLPPLLFSHMEGWSYTEGFYFAFITLSTVGFGDYVIASCLISDTRKPNRDWQTLERTSKSSGGLLKYRFLAGHGGSHL

SEQ ID NO: 14754 - protein, 491 aa, Homo sapiens
MDHTDNELQGTNSSGSLGGLDVRRRIPIKLISKQANKAKPAPRTQRTINRMPAKAPPGDEEGFDYNEEERYDCKGGELFANQRRFPGHLFWDFQINILGEKDDTPVHFCDKCGLPIKIYGRMIPCKHVFCYDCAILHEKKGDKMCPGCSDPVQRIEQCTRGSLFMCSIVQGCKRTYLSQRDLQAHINHRHMRAGKPVTRASLENVHPPIAPPPTEIPERFIMPPDKHHMSHIPPKQHIMMPPPPLQHVPHEHYNQPHEDIRAPPAELSMAPPPPRSVSQETFRISTRKHSNLITVPIQDDSNSGAREPPPPAPAPAHHHPEYQGQPVVSHPHHIMPPQQHYAPPPPPPPPISHPMPHPPQAAGTPHLVYSQAPPPPMTSAPPPITPPPGHIIAQMPPYMNHPPPGPPPPQHGGPPVTAPPPHHYNPNSLPQFTEDQGTLSPPFTQPGGMSPGIWPAPRGPPPPPRLQGPPSQTPLPGPHHPDQTRYRPYYQ

SEQ ID NO: 14755 - protein, 191 aa, Homo sapiens
MINQHLIRTRSTASRDERNTFSTDPVNFPNKAEGLEKKQIHGEICTDLFQRSLSPSSSAESSVKGDFYCNEKYSSGDDCTHQPSEETTSNMGEIKPSLGDTSSDELVQLHTGSKEVLDDNANPAHGNGTVQIPCPSSDQLMAGNLNKKHEGGAKNIEVKDLGCLRRDFHSDTSACLKESTEEGSSKEDYYG

SEQ ID NO: 14756 - protein, 474 aa, Homo sapiens
MSQQKCIVIFALVCCFAILVALIFSAVDIMGEDEDGLSEKNCQNKCRIALVENIPEGLNYSENAPFHLSLFQGWMNLLNMAKKSVDIVSSHWDLNHTHPSACQGQRLFEKLLQLTSQNIEIKLVSDVTADSKVLEALKLKGAEVTYMNMTAYNKGRLQSSFWIVDKQHVYIGSAGLDWQSLGQMKELGVIFYNCSCLVLDLQRIFALYSSLKFKSRVPQTWSKRLYGVYDNEKKLQLQLNETKSQAFVSNSPKLFCPKNRSFDIDAIYSVIDDAKQYVYIAVMDYLPISSTSTKRTYWPDLDAKIREALVLRSVRVRLLLSFWKETDPLTFNFISSLKAICTEIANCSLKVKFFDLERENACATKEQKNHTFPRLNRNKYMVTDGAAYIGNFDWVGNDFTQNAGTGLVINQADVRNNRSIIKQLKDVFERDWYSPYAKTLQPTKQPNCSSLFKLKPLSNKTATDDTGGKDPRNV

SEQ ID NO: 14757 - protein, 584 aa, Homo sapiens
MDLLPPKPKYNPLRNESLSSLEEGASGSTPPEELPSPSASSLGPILPPLPGDDSPTTLCSFFPRMSNLRLANPAGGRPGSKGEPGRAADDGEGIVGAAMPDSGPLPLLQDMNKLSGGGGRRTRVEGGQLGGEEWTRHGSFVNKPTRGWLHPNDKVMGPGVSYLVRYMGCVEVLQSMRALDFNTRTQVTREAISLVCEAVPGAKGATRRRKPCSRPLSSILGRSNLKFAGMPITLTVSTSSLNLMAADCKQIIANHHMQSISFASGGDPDTAEYVAYVAKDPVNQRACHILECPEGLAQDVISTIGQAFELRFKQYLRNPPKLVTPHDRMAGFDGSAWDEEEEEPPDHQYYNDFPGKEPPLGGVVDMRLREGAAPGAARPTAPNAQTPSHLGATLPVGQPVGGDPEVRKQMPPPPPCPAGRELFDDPSYVNVQNLDKARQAVGGAGPPNPAINGSAPRDLFDMKPFEDALRVPPPPQSVSMAEQLRGEPWFHGKLSRREAEALLQLNGDFLVRESTTTPGQYVLTGLQSGQPKHLLLVDPEGVVRTKDHRFESVSHLISYHMDNHLPIISAGSELCLQQPVERKL

SEQ ID NO: 14758 - protein, 6907 aa, Homo sapiens
MELYLGACSKPAKVAVTKTVASVLAADTQQCRDGVHKTHFAGVGPAQLLDLPLGVKLPVIPGSNAVFYTTNFGEKLFRPSYGFNLTDPYCRLLENQYKSLHDPHLKAYYKRKDILKRLKKGGYITSNNKVVCTLRELNKYRQYLTSLKLDFERNYIKEQRILAKQLHNIPENNQIPQHCDVAQVQNWLLKEGTESIKDQERLMRHRYLDMISRKLEQLERTAEEQRLFLMDREERRQREHTRRKLTLRRKIEEEWKTKEMLLLTRMAEDVKREERIEEQQHRNREESDRKKQDLLEKKMAYHLQKMQDTGFNGEDIGKNTFKYRGQDGTHASPKNKKKTSEDIMLVYPAGDQNTYKETHGHTANAAHQRQNSSNNFTKKNSASVVYQADVQDNGINQKRDGMVSKNSSIFDDRGGINISGQGSIISAQVSPTRNFSRVSQAFLDPSKEEKETNADWDGRPTKRSSYLCESGPQAHATDPGIFSSPVYTNMQQNLLQNCLQEKVTSEELNIIIQNVMTWVVATVTSILYPAITKYEKRLQNNTYPVSDDSILSSDSSSFCSTCSEDFTYRSYTSATTKTFQAEPCAFVVDTSVRRPTTPIKPPPAHVEKTVVGKTCHIKGQSIISKHKYNKTNLLYSYPKLRSCKSDSHLLASFETGTKKSKDATTETDSLGSSLHCDKTAKAMDEMKNLKNVFVNFKCYLKGETEVILESILREIMSDLTQAIPSLSSVTAEVFVEQCEREKEILLSNAHIPSVASEIVENMLEKLESAVEKKCVEMFSQDLSVDIKPSLAASDELLTSSNGKPLKNSMPHTLDPMCDIAEDMVHAILEKLMTLVSFKQNEFLHLKDTNKLSCQQHKTDPICMFLQRAGKNKSSLESDEASLIVNEEVQNLISNIFSQSSLVAYIEEAINAILGYIQTELNNERIIASEETVVLLQLLEDILFQLHQEPVNESFQKSRQPRISSPSDTKEKYRLTGTRLSNSPRSGRPFPPINVPGMVLYSDDENEEIDNIVKNVLDSTFKDEKVKSQEQIPNHWFTKGNTCFECKRNIKPPTKPGSRSKAAFHDWELKTEPPSTNHEDILKKKLSSNKDISTFSQDQKHQIEKASENIVTSILKEMLKDISSVPFGHLDSKTGSEASVLVSEKPQGLSHQEWIDQMFSVSEISTVAQEITDSVLNILHKASNYISNTTKSSISSSVHQISLHNSDTEHIVKEAPNKYPLKTWFDSEKKMKYLSLFDVDPEKPPWLKSGKSEPKPVDDINDKIIRTIFKRLKSFICPKLHMGFKSSLRSQLSKYTAKIVNIVLCAIQNELELHKENLNLREIDHTKSLTDKGFFANTDKKLESLVTSIDDDILASPLLTCIYDMLLSSENAHQRSISLSSRKPKSATDSVDVQSILPNRQDKKSFHKYLATPCTHHSVNGGNHIKENAKLQVLERIGETLHEMLSKLLGTHLHSQLSCSQQSREMTNKNQKMAAALQSNIQLISKAILDYILAKLCGVDMDTSFASCGLKAISESLDIDNPSFASIIEKMAKSTKIISSIVSRRVQEDNKEETKSKAKPVAPVSSKTPSTKEMHPNKLKAVASDILNMVFAKLEGFANGHLEILGAINDGNKKSNKIGWEYESTNISRDTHEASFLSALYMHAKKVSSAILKVIQTELNVTSSDLKTSVENPPPETQILKYVVKLILDAVSSDMFNEMESEGGGIETYRYRPTYGSLPGGAESDSFLEDDAYTAKKIIDERSPQREEVKTRSLKQWALEKTLNKIEVKLKEPHISPIAPIIRNILNEIFQSTLINQLNVLSLSHSNFNGMPHNVDEPTPQTSVQFMDKMMDPLLSEADITIVTDNIVRTVFHKLYSAAMTERNVRENRYKTITFSANVSSHEHTYKGKSSVTALDENPCTFQSRFSVADKETKVNLAEDIVQAILTNLETFATSKVKSLFYSQVNFTVPVALPIQQDHSTLSKALSAKDSYSDEQFSCCSVDHTKSGKTNLCQLSLSKLNTYALQVARRNLQGIKQELDKERENPFLTHDIGISESIASQIVNALLDIISRKGKCDKNSSDKEIDLDQQKGVIEKLLNETKYRKVLQLQIQDTIEGILCDIYEKTLFQNNLSFATPTLKCSIADKHSEENSEMFMEGANKIIPKLSVPKSDVILISNDIVNIVLHNLSSAATLVINAKNPTSARLPLTFCDTFPKIDCQQPLKGSKTERKTERFSYSRNQKSAYADDNQITVVEKEDTQKSATDSCEENANFITKTIFKRLESFATERIDSLITLAFQSKEKSFVIPELENCKQNDSIFYDSSQVESDVNVLKISATETILSQELTDFTFVGRREKLGSTIHLSQARLKTYADVIASAILKLIKNDLDLEIQKIYPYQNNILFQENIIVSEIVDSMLKMLDDKRSVKEICFNSKENSNFSQLALSNEILLGHKEKERSTKQSLFTKYPLEQNQMILENKRQIIVLEEIFMRNGESKNKEKGELLIAVEELLNKLYQRVREVTGHLPPLNETANFISNSKIKTSDTTQKNSFQSHINSVANDIVESVLGKMYLVVVTSLYENNKSRTEVEISDHNDSLLMKPLRFRETKQAGKISNSPRYAISQAYSYVDSQNISVMENTLLPYLPLQVKKDLIQMVLNKITNFVSLPLKVSPKDNPKPCFKAHLKTRSKITTLPKFTKKTHLGLSAAKAKSKTKLGPGEKTLKDSRSKTAIGLSHIMSAGDAKNLLDTKLPTSELKIYAKDIIINILETIVKEFGKVKQTKALPSDQIIAAGKIVNTVLQELYVTNNCNLAYPMKSSHLRLSQGNIGTGSLPKQQACFYLENVSSQLEHIFPREGIFKKLFDKWQTESNDKENEKCKLLMIAENVLTEISIKAKELEYSLSLLNLPPLENCESRFYNHFKGASTRAEDTKAQINMFGREIVEMLLEKLQLCFLSQIPTPDSEETLSNSKEHITAKSKYGFPNKHSLSSLPIYNTKTKDQISVGSSNQIVQEIVETVLNMLESFVDLQFKHISKYEFSEIVKMPIENLSSIQQKLLNKKMLPKLQPLKMFSDKSESNTINFKENIQNILLRVHSFHSQLLTYAVNIISDMLAVIKNKLDNEISQMEPSSISILKENIVASEIIGTLMDQCTYFNESLIQNLSRESLFQGAENAYTVNQVELATNMKMFTSKLKEGSLGINPSQVSKTGFVFCSDEDMKEKYRVSSDLPTSVRSSVEDTVKNSEPTKRPDSETMPSCSTRNKVQDHRPRESNFGSFDQTMKGNSYLPEGSFLQKLLRKASDSTEAALKQVLSFIEMGKGENLRVFHYENLKPVVEPNQIQTTISPLKICLAAENIVNTVLSSCGFPSQPHTNENREIMKPFFISKQSSLSEVSGGQKDNEKSLLRMQDKKINYIPEEENENLEASREDSSFLQKLKKKEYPKIETVKEVEAFTFADHEMGSNEVHLIARHVTTSVVTYLKNFETTVFSEEKMSVSTWSRKKYESKQFLRNIYDDSSIYQCCEHLTESVLYHLTSSISDGTKKGREKEKAWEIQEATFSKIISIHSQVFESRSISIGELALCISEIIIKILFNNKIIQADIAQKMVAIPTKYTYCPGIVSGGFDDLFQDLLVGVIHVLSKEIEVDYHFESNVRNKSFSMHRNNSVPLCNKINRQASPRDWQFSTQQIGQLFQKNKLSYLACKLNSLVGNLKTSESKEVVNKVFNIVSDLFSPDECLDTGMDSGKIQRTYFYSSNNEQPNSILTNNLQLSSKSVFLLNVVCEKLIRILLEECTSTAFPDKGSVSEETSAEECQLLKMLQSVEDGKSDYRKGGMDCECLQVDYMSDLLENVAEIDQDLLTSDSMLTIISHSLVKSLMDKLSHSIQQAPESLPFANKHLNYRTREIQSSFIKARKSELIELGQSKSSLELRSYDSNSLTVSLNNPSVVSSKIQAPFNKHCAVKSSSVSPFERQRTKEMDKVAIHNKLHQEGIYAGVYSATFLEGIISELFFNLSMSLWGKNKNITVSWLNEMNTLFVNNVVNEFNNAQVTVLRNAEERLCFPPVHTETVSKIVDSVYYDVLQQYELKVACGNNPVYDNASIAEQITNGILLEILDYKLPSCFKEHLIPHSYYPLKPEIILQKLQSNLTEFTSLPRSSSDYSTMLSHSFLEDVIRRLLSQLIPPPITCSSLGKKYLMSSDFNEMSTCIINKVMSAISKHKIWFTIYDNQYLYTGKNLQKMVDSVYCNILQMSDSLVSIQKSIVSRSPIMIDQIASFIIQEIIENHLQPFLSGEVLCHPRTPLDPVSTIVTQVLSEVIESHRPQKQSPLDIHLDSFVREIVARLLSKIFSPKHNTEIELKNMTQRIVNSINRHFNKAKIHILYDDKEQAFFSFNTDIVDELATSVYRNALKQHGLDLAVDKESEDSGIFVENITNLIVAAISDYLLHPLFSGDFSASTYSNSVAENIVQDILSNISKSTEPSQSVPLYNTLLPYTFLEDMIRVLLSKLFSSASSLVLNRDTQKDISRVNFNDIASNLVSDIRMKVSQHEIRFSKEEEETKFIYSEDDIQHLVDSVFANVVQTSGSQESAVQNITSSNDILIDRIAGFIIKHICQKHLQPFVSGKSLSSSDTYFDDERRQLFYTSVYSSTFLEDVISGVLRKIFHRVVGIVQTKSIRDSEDELFEKAEELIHLITGEFSKAQVSIIDNTEERLCLPPVERDVVKTIVDMVYSKVLQEYEMEVVPNKDFLNDTKTLAARITNIILAEIFDFQIHPDLIANLPFKSHSKLSANVLIQRVQYDISKSRFQRQASTMYTTMLSHSHLEKIVTQLTSQISPLNTSAEQSDTTKSDLSNTVIKLINEIMSIISKHEICIIKYGNKKQSMISAKDIQSMVDSIYADLSHSNIYQSITKDKKSISDIPVSKIASFIIKEIFNHHIQSFLSEDKTLLLAAVDQTYKLKAIDPKQRELSFIVNSSVFLEEVISELLCKILYAFSHNMLVTENPDRVKLKLTRIVTTLVNSIVLEFTTSEILVADNFDKNLCFSERYKEMVQKIVNSVYGKVLDQYKSLIQIHRVIQSDTICFGRKIYYLLLEEIYDYQVQSLVSGELESSSYSYPQADNIIRNVLNIITKDSHALPPYITVLPHSLLEDMVYRLLGHVFPSTHTENELKEKKFPPDDEFVEAASKLTDEIIKEISEHEIRLSMAEDNAESMQLEPIENLVDSICNNILKTSEFQAEVQKDADKKGCSFLSKLAGFIMKEIMYHHLQPFLHGEESSFSDLSDYDHVSELAKSGKEKTQPSLYSATFLEDIIIDLVHKFCSLLIITEDSKKNEMAELDIMGLALKLANSLIREFKKSDIKVLPNAEKMFSFPPIDKETVDKISNFVYEQFIEKCTSHDIQKGDESNIAIGMIAALTQKAISAFRIQPLFSGDWSSTFFSFLNPDNITQRVQHLPQNTFTQISRCAKENQLSLPDQSYKDTSSTPDCKNMMSTLEINRGTMNRKKSFKTKDTSVKKGDIQNPVLSSINAIMKSGMINLTSGLATGVTNKKEVDENKVGICTQKHSENVSKVTSTTTVKSKDTQEPNLSETFNNNEIEKKRNLIPTDKKGKDDEIYTHFSLIIDDTEYEKEVLGSDSEIGYKKKIDNARESSFKKDDKLFQLSSLKSKRNLGTTTDTLEIRIRTSSNEGRRDSPTQTCRDEEHHSDYEHVQNVIENIFEDVLELSSSPEPAYYSKLSYDQSPPGDNVLNVIQEISRDSAQSVTTKKVSSSTNKNISAKEKEEEEREKEKVREEIKSEPSKPDDPQNQRESKPGIFPAKFLEDVITEMVKQLIFSSIPETQIQDRCQNVSDKQNQAKLYDTAMKLINSLLKEFSDAQIKVFRPDKGNQFPGGKVSSVPKVPPRYKEPTTDEAPSSIKIKSADKMPPMHKMMRKPSSDKIPSIDKTLVNKVVHSSVCNILNDYGSQDSIWKNINSNGENLARRLTSAVINEIFQRQVNLIFCDEVSVSACLPLESKDVVKKVQKLAQTASKECQTSSPYTIILPHKFLENVISALFSKIFSTISSTKTKEPEDNLSTELNFLQMKLVSAVATEISQDKYMTIQYVETLQSDDDEIIQLVVQSVYNNLLPQFGSQEIIQNCVTSGCKILSENIVDLVLREVASNQLQSYFCGELTPHQCVEVENIVEKILKDVFQTTDVPLPKPSHADKLSYNIIEEIAVKFLSKLLSIFPKVHKERTKSLETDMQKITSKVLNSVQEFISKSKIKLVPPTKESPTVPVADNATIENIVNSIYTSVLKHSGSYTSVFKDLMGKSNVLSDTIGFLMVNAISNSEFQPQVEEEVSNSELVLEAVKIMEKVIKIIDELKSKEKSSSRKGLTLDAKLLEEVLALFLAKLIRLPSSSSKDEKNLSKTELNKIASQLSKLVTAEISRSSISLIASDPEEHCLNPENTERIYQVVDSVYSNILQQSGTNKEFYYDIKDTNTAFPKKVASLIIDGVSSFPLDTINSTISNADLSGELDVNRIVQKAQEHAFNVIPELEQEKLDQNLSEEESPIKIVPHVGKKPVKIDPKIISEHLAVISIKTQPLEKLKQECLKRTGHSIAELRRASISGRNYSLGSPDLEKRKTERRTSLDKTGRLDVKPLEAVARNSFQNIRKPDITKVELLKDVQSKNDLIVRLVAHDIDQVYLENYIKEERDSDEDEVVLTQTFAKEEGIKVFEDQVKEVKKPIQSKLSPKSTLSTSSLKKFLSLSKCCQTTASANIESTEAISNQVIESKETHVKRAVAELDMATPKTMPETASSSWEEKPQCKKEEKNLVTEPTHYFIHRIMSSSSYNQEDLISSTGEAEDCHSDPSAKILEESSQEQKPEHGNSVKFITIFERSKDVLGSANPSKEVISETPKPDVSKQGSKMLTKMSSTLSKVFSQCNTNISRSSSPAHQDEH

SEQ ID NO: 14759 - protein, 163 aa, Homo sapiens
MAKMEVKTSLLDNMIGVGDMVLLEPLNEETFINNLKKRFDHSEIYTYIGSVVISVNPYRSLPIYSPEKVEEYRNRNFYELSPHIFALSDEAYRSLRDQDKDQCILITGESGAGKTEASKLVMSYVAAVCGKGAEVNQVKEQLLQSNPVLEAFGNAKTVRNDNS

SEQ ID NO: 14760 - protein, 771 aa, Homo sapiens
MGRAGTGTGGEAVAAVVAGPLLLLLLARPPPASAGYSGKSEVGLVSEHFSQAPQRLSFYSWYGSARLFRFRVPPDAVLLRWLLQVSRESGAACTDAEITVHFRSGAPPVINPLGTSFPDDTAVQPSFQVGVPLSTTPRSNASVNVSHPAPGDWFVAAHLPPSSQKIELKGLAPTCAYVFQPELLVTRVVEISIMEPDVPLPQTLLSHPSYLKVFVPDYTRELLLELRDCVSNGSLGCPVRLTVGPVTLPSNFQKVLTCTGAPWPCRLLLPSPPWDRWLQVTAESLVGPLGTVAFSAVAALTACRPRSVTIQPLLQSSQNQSFNASSGLLSPSPDHQDLGRSGRVDRSPFCLTNYPVTREDMDVVSVHFQPLDRVSVRVCSDTPSVMRLRLNTGMDSGGSLTISLRANKTEMRNETVVVACVNAASPFLGFNTSLNCTTAFFQGYPLSLSAWSRRANLIIPYPETDNWYLSLQLMCPENAEDCEQAVVHVETTLYLVPCLNDCGPYGQCLLLRRHSYLYASCSCKAGWRGWSCTDNSTAQTVAQQRAATLLLTLSNLMFLAPIAVSVRRFFLVEASVYAYTMFFSTFYHACDQPGEAVLCILSYDTLQYCDFLGSGAAIWVTILCMARLKTVLKYVLFLLGTLVIAMSLQLDRRGMWNMLGPCLFAFVIMASMWAYRCGHRRQCYPTSWQRWAFYLLPGVSMASVGIAIYTSMMTSDNYYYTHSIWHILLAGSAALLLPPPDQPAEPWACSQKFPCHYQICKNDREELYAVT

SEQ ID NO: 14761 - protein, 953 aa, Homo sapiens
MSQLRLLPSRLGVQAARLLAAHDVPVFGWRSRSSGPPATFPSSKGGGGSSYMEEMYFAWLENPQSVHKIRGHHVAQLDPLGILDADLDSFVPSDLITTIDKLAFYDLQEADLDKEFQLPTTTFIGGSENTLSLREIIRRLENTYCQHIGLEFMFINDVEQCQWIRQKFETPGVMQFSSEEKRTLLARLVRSMRFEDFLARKWSSEKRFGLEGCEVMIPALKTIIDKSSEMGIENVILGMPHRGRLNVLANVIRKDLEQIFCQFDPKLEAADEGSGDVKYHLGMYHERINRVTNRNITLSLVANPSHLEAVDPVVQGKTKAEQFYRGDAQGKKVMSILVHGDAAFAGQGVVYETFHLSDLPSYTTNGTVHVVVNNQIGFTTDPRMARSSPYPTDVARVVNAPIFHVNADDPEAVIYVCSVAAEWRNTFNKDVVVDLVCYRRRGHNEMDEPMFTQPLMYKQIHRQVPVLKKYADKLIAEGTVTLQEFEEEIAKYDRICEEAYGRSKDKKILHIKHWLDSPWPGFFNVDGEPKSMTCPATGIPEDMLTHIGSVASSVPLEDFKIHTGLSRILRGRADMTKNRTVDWALAEYMAFGSLLKEGIHVRLSGQDVERGTFSHRHHVLHDQEVDRRTCVPMNHLWPDQAPYTVCNSSLSEYGVLGFELGYAMASPNALVLWEAQFGDFHNTAQCIIDQFISTGQAKWVRHNGIVLLLPHGMEGMGPEHSSARPERFLQMSNDDSDAYPAFTKDFEVSQLYDCNWIVVNCSTPANYFHVLRRQILLPFRKPLIIFTPKSLLRHPEAKSSFDQMVSGTSFQRVIPEDGAAARAPEQVQRLIFCTGKVYYDLVKERSSQDLEEKVAITRLEQISPFPFDLIKQEAEKYPGAELAWCQEEHKNMGYYDYISPRFMTILRRARPIWYVGRDPAAAPATGNRNTHLVSLKKFLDTAFNLQAFEGKTF

SEQ ID NO: 14762 - protein, 86 aa, Homo sapiens
MGKMVSVINTVDTSHEDMIHDAQMDYYGTRLATCSSDRSVKIFDVRNGGQILIADLRGHEGPVWQVAWAHPMYGNILASCSYDRKV

SEQ ID NO: 14763 - protein, 264 aa, Homo sapiens
MRPDRAEAPGPPAMAAGGPGAGSAAPVSSTSSLPLAALNMRVRRRLSLFLNVRTQVAADWTALAEEMDFEYLEIRQLETQADPTGRLLDAWQGRPGASVGRLLELLTKLGRDDVLLELGPSIGHMPERFDAFICYCPSDIQFVQEMIRQLEQTNYRLKLCVSDRDVLPGTCVWSIASELIEKRCRRMVVVVSDDYLQSKECDFQTKFALSLSPGAHQKRLIPIKYKAMKKEFPSILRFITVCDYTNPCTKSWFWTRLAKALSLP

SEQ ID NO: 14764 - protein, 134 aa, Homo sapiens
MAAHHRQNTAGRRKVQVSYVIRDEVEKYNRNGVNALQLDPALNRLFTAGRDSIIRIWSVNQHKQDPYIASMEHHTDWVNDIVLCCNGKTLISASSDTTVKVWNAHKGFCMSTLRTHKYVCSITGLRKGLSICQG

SEQ ID NO: 14765 - protein, 199 aa, Homo sapiens
MLPPQKKPWESMAKGLVLGALFTSFLLLVYSYAVPPLHAGLASTTPEAAASCSPPALEPEAVIRANGSAGECQPRRNIVFLKTHKTASSTLLNILFRFGQKHRLKFAFPNGRNDFDYPTFFARSLVQDYRPGACFNIICNHMRFHYDEVRGLVPTNAIFITVLRDPARLFESSFHYFGPVVPLTWKLSAGDKLTEFLQD

SEQ ID NO: 14766 - protein, 832 aa, Homo sapiens
MMEEEELEFVEELEAVLQLTPEVQLAIEQVFPSQDPLDRADFNAVEYINTLFPTEQSLANIDEVVNKIRLKIRRLDDNIRTVVRGQTNVGQDGRQALEEAQKAIQQLFGKIKDIKDKAEKSEQMVKEITRDIKQLDHAKRHLTTSITTLNHLHMLAGGVDSLEAMTRRRQYGEVANLLQGVMNVLEHFHKYMGIPQIRQLSERVKAAQTELGQQILADFEEAFPSQGTKRPGGPSNVLRDACLVANILDPRIKQEIIKKFIKQHLSEYLVLFQENQDVAWLDKIDRRYAWIKRQLVDYEEKYGRMFPREWCMAERIAVEFCHVTRAELAKIMRTRAKEIEVKLLLFAIQRTTNFEGFLAKRFSGCTLTDGTLKKLESPPPSTNPFLEDEPTPEMEELATEKGDLDQPKKPKAPDNPFHGIVSKCFEPHLYVYIESQDKNLGELIDRFVADFKAQGPPKPNTDEGGAVLPSCADLFVYYKKCMVQCSQLSTGEPMIALTTIFQKYLREYAWKILSGNLPKTTTSSGGLTISSLLKEKEGSEVAKFTLEELCLICNILSTAEYCLATTQQLEEKLKEKVDVSLIERINLTGEMDTFSTVISSSIQLLVQDLDAACDPALTAMSKMQWQNVEHVGDQSPYVTSVILHIKQNVPIIRDNLASTRKYFTQFCVKFANSFIPKFITHLFKCKPISMVGAEQLLLDTHSLKMVLLDLPSISSQVVRKAPASYTKIVVKGMTRAEMILKVVMAPHEPLVVFVDNYIKLLTDCNTETFQKILDMKGLKRSEQSSMLELLRQRLPAPPSGAESSGSLSLTAPTPEQESSRIRKLEKLIKKRL

SEQ ID NO: 14767 - protein, 977 aa, Homo sapiens
MPARRLLLLLTLLLPGLGIFGSTSTVTLPETLLFVSTLDGSLHAVSKRTGSIKWTLKEDPVLQVPTHVEEPAFLPDPNDGSLYTLGSKNNEGLTKLPFTIPELVQASPCRSSDGILYMGKKQDIWYVIDLLTGEKQQTLSSAFADSLCPSTSLLYLGRTEYTITMYDTKTRELRWNATYFDYAASLPEDDVDYKMSHFVSNGDGLVVTVDSESGDVLWIQNYASPVVAFYVWQREGLRKVMHINVAVETLRYLTFMSGEVGRITKWKYPFPKETEAKSKLTPTLYVGKYSTSLYASPSMVHEGVAVVPRGSTLPLLEGPQTDGVTIGDKGECVITPSTDVKFDPGLKSKNKLNYLRNYWLLIGHHETPLSASTKMLERFPNNLPKHRENVIPADSEKKSFEEVINLVDQTSENAPTTVSRDVEEKPAHAPARPEAPVDSMLKDMATIILSTFLLIGWVAFIITYPLSMHQQQQLQHQQFQKELEKIQLLQQQQQQLPFHPPGDTAQDGELLDTSGPYSESSGTSSPSTSPRASNHSLCSGSSASKAGSSPSLEQDDGDEETSVVIVGKISFCPKDVLGHGAEGTIVYRGMFDNRDVAVKRILPECFSFADREVQLLRESDEHPNVIRYFCTEKDRQFQYIAIELCAATLQEYVEQKDFAHLGLEPITLLQQTTSGLAHLHSLNIVHRDLKPHNILISMPNAHGKIKAMISDFGLCKKLAVGRHSFSRRSGVPGTEGWIAPEMLSEDCKENPTYTVDIFSAGCVFYYVISEGSHPFGKSLQRQANILLGACSLDCLHPEKHEDVIARELIEKMIAMDPQKRPSAKHVLKHPFFWSLEKQLQFFQDVSDRIEKESLDGPIVKQLERGGRAVVKMDWRENITVPLQTDLRKFRTYKGGSVRDLLRAMRNKKHHYRELPAEVRETLGSLPDDFVCYFTSRFPHLLAHTYRAMELCSHERLFQPYYFHEPPEPQPPVTPDAL

SEQ ID NO: 14768 - protein, 633 aa, Homo sapiens
MNLGDGLKLETELLDGKTKLILSPYEHKSKISVKMGNKAKIAKCPLRTKTGHILKSTQDTCIGSEKLLQKKPVGSETSQAKGEKNGMTFSSTKDLCKQCIDKDCLHIQKEISPATPNMQKTRNTVNTSLVGKQKPHKKHITAENMKSSLVCLTQDQLQQILMTVNQGNRSLSLTENGKEAKSQYSLYLNSISNQPKDENIMGLFKKTEMVSSVPAENKSVLNEHQETSKQCEQKIAIENEWKPADIFSTLGERECDRSSLEAKKAQWRKELDEQVALKKKEKEVSEKWNDPWKKSESDKIIWEKHQILDQSRGEEHDRWAMHFDSLKSYPGSQSQLFSQSTHKQPEYFCVSPDTQELADVSSVCTPTTGSQVEPSEEEHIAKPIKDVVMANSKKTNFLRSMTALLDPAQIEERDRRRQKQLEHQKAITAQVEEKRRKKQLEEEQRKKEEQEEELRLAQEREEMQKQYEEDILKQKQKEEIMTLKTNELFQTMQRAQELAQRLKQEQRIRELAQKGHDTSRLIKNLGVDTIQMEYNASNISNSRHDSDEISGKMNTYMNSTTSKKDTGVQTDDLNIGIFTNAESHCGSLMERDITNCSSPEISAELIGQFSTKKNKQELTQDKGASLEKENNRC

SEQ ID NO: 14769 - protein, 321 aa, Homo sapiens
MAIRVLLGFSIPEEDLGHLFEVYQQFVDNVFSLPVDLPFSGYRRGIQARQILQKGLEKAIREKLQCTQGKDYLDALDLLIESSKEHGKEMTMQELKDGTLELIFAAYATTASASTSLIMQLLKHPTVLEKLRDELRAHGILHSGGCPCEGTLRLDTLSGLRYLDCVIKEVMRLFTPISGGYRTVLQTFELDGFQIPKGWSVMYSIRDTHDTAPVFKDVNVFDPDRFSQARSEDKDGRFHYLPFGGGVRTCLGKHLAKLFLKVLAVELASTSRFELATRTFPRITLVPVLHPVDGLSVKFFGLDSNQNEILPETEAMLSATV

SEQ ID NO: 14770 - protein, 657 aa, Homo sapiens
MNMPVNKSPMINTCGGISSPYHEELWKLNFQHLSGERGHKSRPTFSITKEFILRFNQTQNSKEKEELLELARKIILRCKRKLGLKTLGSGRHVHLPAAWTEVIYLAQCKGEIQDESLNMLYASLDHASFDYDHLPALFFVAESVLYRLCCDASLKTYLYSVEIKLAKIGYLVFLRLFIFFLHGHLESFKQHLLRLQPYLYALSFSGASYHKYPNIFSNVQFILKASEIIGKRELRSESIFRPVEDKKRYENTDSDMGGYEINHLLWHCVAAWSCVQNNSPQLNNVLEHLVFHKTQLQKKCWLDSVLALLVLGEAAKLNMACLKALMDVVRDFVSSIMSVQNQEESCKVDDFSWAWNVVYIYTVILAEICLYAATSDLRKTALIGFCHCKSSQKNILYLDKSVPPELKETSILSLLEYFSSKMSENCDQVVWTGYYGLVYNLVKISWELQGDEEQDGLRNMIWQTLQKTKDYEEDVRIQNAINIAQAELNDPTDPFTRYSTNISSNVGEEVFSKYIGWRIANTLSKLFFPPIEAHFLPLKKPSIKKDQTKYPNKKLESVKKQVLHFTVREHPSVSEIPMFPYPDFFTKADKELAKIIDHHWQEELKIREKEDAICKAQELKDKKLAEKNHFQEVMKKREEKLHKQTKPYELPYRKEVI

SEQ ID NO: 14771 - protein, 962 aa, Homo sapiens [sequence omitted]

SEQ ID NO: 14772 - protein, 453 aa, Homo sapiens
MQGAQEASASEMLPLLLPLLWAGALAQERRFQLEGPESLTVQEGLCVLVPCRLPTTLPASYYGYGYWFLEGADVPVATNDPDEEVQEETRGRFHLLWDPRRKNCSLSIRDARRRDNAAYFFRLKSKWMKYGYTSSKLSVRVMALTHRPNISIPGTLESGHPSNLTCSVPWVCEQGTPPIFSWMSAAPTSLGPRTTQSSVLTITPRPQDHSTNLTCQVTFPGAGVTMERTIQLNVSYAPQKVAISIFQGNSAAFKILQNTSSLPVLEGQALRLLCDADGNPPAHLSWFQGFPALNATPISNTGVLELPQVGSAEEGDFTCRAQHPLGSLQISLSLFVHWKPEGRAGGVLGAVWGASITTLVFLCVCFIFRVKTRRKKAAQPVQNTDDVNPVMVSGSRGHQHQFQTGIVSDHPAEAGPISEDEQELHYAVLHFHKVQPQEPKVTDTEYSEIKIHK

SEQ ID NO: 14773 - protein, 294 aa, Homo sapiens
MDADEGQDMSQVSVIKEETNHSEMAEDLCKIGSERSLVLDRLASNVAKRKSSMPQKFLGDKGLSDTPYDSSASYEKENEMMKSHVMDQAINNAINYLGAESLRPLVQTPPGGSEVVPVISPMYQLHKPLAEGTPRSNHSAQDSAVENLLLLSKAKLVPSEREASPSNSCQDSTDTESNNEEQRSGLIYLTNHIAPHARNGLSLKEEHRAYDLLRAASENSQDALRVVSTSGEQMKVYKCEHCRVLFLDHVMYTIHMGCHGFRDPFECNMCGYHSQDRYEFSSHITRGEHRFHMS

SEQ ID NO: 14774 - protein, 4265 aa, Homo sapiens
MEQPNSKGYSLGRTPQGPECSSAPAVQVGTHRGLEYNPGKILPGSDYGLGNPPALDPKLPHLPLPPAPPTLSDLGQPRKSPLTGTDKKYPLMKQRGFYSDILSPGTLDQLGEVCRGPRMSQNLLRQADLDKFTPRVGSFEVPEDFQERMEQQCIGSTTRLLAQTDFPLQAYEPKMQVPFQVLPGQHPRKIEIERRKQQYLSLDIEQLLFSQGIDSNKLMPRHLDHQHPQTIEQGHDPIFPIYLPLKVFDNEDFDCRTPREWINMGLEPGSLDRKPVPGKALLPTDDFLGHEDPKSQKLKYKWCEVGVLDYDEEKKLYLVHKTDEKGLVRDEMGRPILNAGVTTEGRPPLQVCQYWVPRIQLLFCAEDPCMFAQRVVQANALRKNTEALLLYNLYVDCMPSDGQHVISEQSLSKIKQWALSTPRMRKGPSVLEHLSSLAREVSLDYERSMNKINFDHVVSSKPETFSYVTLPKKEEEQVPERGLVSVPKYHFWEQKEDFTFVSLLTRPEVITALSKVRAECNKVTAMSLFHSSLSKYSHLEEFEQIQSQTFSQVQMFLKDSWISSLKVAMRSSLRDMSKGWYNLYETNWEVYLMSKLRKLMELVKYMLQDTLRFLVQDSLASFSQFISDTCCSVLNCTDDMVWGDDLINSPYRPRKNPLFIMDLVLDSSGVHYSTPLEQFEASLLNLFDKGILATHAVPQLEKLVMEDIFISGDPLLESVGLHEPLVEELRATIASAVSKAMIPLQAYAKEYRKYLELNNNDIASFLKTYQTQGLLAQEVREVVLTHLREKEILDSSLPSSIIIGPFYINTDNVKQSLSKKRKALATSVLDILAKNLHKEVDSICEEFRSISRKIYEKPNSIEELAELREWMKGIPERLVGLEERIVKVMDDYQVMDEFLYNLSSDDFNDKWIASNWPSKILGQIELVQQQHVEDEEKFRKIQIMDQNNFQEKLEGLQLVVAGFSIHVEISRAHEIANEVRRVKKQLKDCQQLAMLYNNRERIFSLPITNYDKLSRMVKEFQPYLDLWTTASDWLRWSESWMNDPLSAIDAEQLEKNVVEAFKTMHKCVKQFKDMPACQEVALDIRARIEEFKPYIPLIQGLRNPGMRIRHWETLSNQININVRPKANLTFARCLEMNLQDHIESISKVAEVAGKEYAIEQALDKMEKEWSTILFNVLPYKATDTYILKSPDEASQLLDDHIVMTQNMSFSPYKKPFEQRINSWENKLKLTQEVLEEWLNCQRSWLYLEPIFSSEDINQQLPVESKRYQTMERIWKKIMKNAYENREVINVCSDLRMLDSLRDCNKILDLVQKGLSEYLETKRSAFPRFYFLSDDELLEILSQTKDPTAVQPHLRKCFENIARLLFQEDLEITHMYSAEGEEVQLCFSIYPSSNVEDWLREVERSMKASVHDIIEKAIRAYPTMPRTQWVLNWPGQVTIAGCQTYWTMEVAEALEAGNLRSQLFPQLCQQLSDLVALVRGKLSRMQRAVLSALIVIEVHAKDVVSKLIQENVVSVNDFQWISQLRYYWTNNDLYIRAVNAEFIYGYEYLGNSGRLVITPLTDRCYLTLTGALHLKFGGAPAGPAGTGKTETTKDLGKALAIQTVVFNCSDQLDFMAMGKFFKGLASAGAWACFDEFNRIDIEVLSVVAQQITTIQKAQQQRVERFMFEGVEIPLVPSCAVFITMNPGYAGRTELPDNLKALFRPVAMMVPDYAMITEISLYSFGFNEASVLAKKITTTFKLSSEQLSSQDHYDFGMRAVKTVISAAGNLKRENPSMNEELICLRAIRDVNVPKFLQEDLKLFSGIVSDLFPTIKEEDTDYGILDEAIREACRNSNLKDVEGFLTKCIQLYETTVVRHGLMLVGPTGSGKSTCYRVLAAAMTSLKGQPSISGGMYEAVNYYVLNPKSITMGQLYGEFDLLTHEWTDGIFSSFIRAGAITSDTNKKWYMFDGPVDAIWIENMNTVLDDNKKLCLSSGEIIKLTEAMTMMFEVQDLAVASPATVSRCGMVYLEPSILGLMPFIECWLRKLPPLLKPYEEHFKALFVSFLEESISFVRSSVKEVIASTNCNLTMSLLKLLDCFFKPFLPREGLKKIPSEKLSRIVELIEPWFIFSLIWSVGATGDSSGRTSFSHWLRLKMENEQLTLLFPEEGLVFDYRLEDAGISGTNDSEDEEEEYKQVAWVKWMDSSAPFTMVPDTNYCNIIVPTMDTVQMSHLLDMLLTNKKPVLCIGPTGTGKTLTISDKLLKNLALDYISHFLTFSARTSANQTQDFIDSKLDKRRKGVFGPPLGRNFIFFIDDLNMPALETYGAQPPIELLRQWMDHGGWYDRKIIGAFKNLVDINFVCAMGPPGGGRNTVTPRLMRHFNYLSFAEMDEVSKKRIFSTILGNWLDGLLGEKSYRERVPGAPHIAHFTEPLVEATIMVYATITSQLLPTPAKSHYTFNLRDLSKVFQGMLMADPAKVEDQVQLLRLWYHENCRVFRDRLVNEEDRSWFDQLLKRCMEQWEVTFNKVCPFQPILYGDFMSPGSDVKSYELITSESKMMQVIEEYIEDYNQINTAKLKLVLFMDAMSHICRISRTLRQALGNALLLGVGGSGRSSLTRLASHMAEYECFQIELSKNYGMSEWRDDVKKVLLKAGLQNLPITFLFSDTQIKNESFLEDINNVLNSGDIPNLYTADEQDQIVSTMRPYIQEQGLQPTKANLMAAYTGRVRSNIHMVLCMSPIGEVFRARLRQFPSLVNCCTIDWFNEWPAEALKSVATVFLNEIPELESSQEEIQGLIQVCVYIHQSVSKKCIEYLAELTRHNYVTPKSYLELLHIFSILIGQKKLELKTAKNRMKSGLDKLLRTSEDVAKMQEDLESMHPLLEEAAKDTMLTMEQIKVDTAIAEETRNSVQTEEIKANEKAKKAQAIADDAQKDLDEALPALDAALASLRNLNKNDVTEVRAMQRPPPGVKLVIEAVCIMKGIKPKKVPGEKPGTKVDDYWEPGKGLLQDPGHFLESLFKFDKDNIGDVVIKAIQPYIDNEEFQPATIAKVSKACTSICQWVRAMHKYHFVAKAVEPKRQALLEAQDDLGVTQRILDEAKQRLREVEDGIATMQAKYRECITKKEELELKCEQCEQRLGRAGKLINGLSDEKVRWQETVENLQYMLNNISGDVLVAAGFVAYLGPFTGQYRTVLYDSWVKQLRSHNVPHTSEPTLIGTLGNPVKIRSWQIAGLPNDTLSVENGVINQFSQRWTHFIDPQSQANKWIKNMEKDNGLDVFKLSDRDFLRSMENAIRFGKPCLLENVGEELDPALEPVLLKQTYKQQGNTVLKLGDTVIPYHEDFRMYITTKLPNPHYTPEISTKLTLINFTLSPSGLEDQLLGQVVAEERPDLEEAKNQLIISNAKMRQELKDIEDQILYRLSSSEGNPVDDMELIKVLEASKMKAAEIQAKVRIAEQTEKDIDLTRMEYIPVAIRTQILFFCVSDLANVDPMYQYSLEWFLNIFLSGIANSERADNLKKRISNINRYLTYSLYSNVCRSLFEKHKLMFAFLLCVRIMMNEGKINQSEWRYLLSGGSISIMTENPAPDWLSDRAWRDILALSNLPTFSSFSSDFVKHLSEFRVIFDSLEPHREPLPGIWDQYLDQFQKLLVLRCLRGDKVTNAMQDFVATNLEPRFIEPQTANLSVVFKDSNSTTPLIFVLSPGTDPAADLYKFAEEMKFSKKLSAISLGQGQGPRAEAMMRSSIERGKWVFFQNCHLAPSWMPALERLIEHINPDKVHRDFRLWLTSLPSNKFPVSILQNGSKMTIEPPRGVRANLLKSYSSLGEDFLNSCHKVMEFKSLLLSLCLFHGNALERRKFGPLGFNIPYEFTDGDLRICISQLKMFLDEYDDIPYKVLKYTAGEINYGGRVTDDWDRRCIMNILEDFYNPDVLSPEHSYSASGIYHQIPPTYDLHGYLSYIKSLPLNDMPEIFGLHDNANITFAQNETFALLGTIIQLQPKSSSAGSQGREEIVEDVTQNILLKVPEPINLQWVMAKYPVLYEESMNTVLVQEVIRYNRLLQVITQTLQDLLKALKGLVVMSSQLELMAASLYNNTVPELWSAKAYPSLKPLSSWVMDLLQRLDFLQAWIQDGIPAVFWISGFFFPQAFLTGTLQNFARKFVISIDTISFDFKVMFEAPSELTQRPQVGCYIHGLFLEGARWDPEAFQLAESQPKELYTEMAVIWLLPTPNRKAQDQDFYLCPIYKTLTRAGTLSTTGHSTNYVIAVEIPTHQPQRHWIKRGVALICALDY

SEQ ID NO: 14775 - protein, 896 aa, Homo sapiens
MSRVQTMNYVGQLAGQVFVTVKELYKGLNPATLSGCIDIIVIRQPNGNLQCSPFHVRFGKMGVLRSREKVVDIEINGESVDLHMKLGDNGEAFFVQETDNDQEVIPMHLATSPILSEGASRMECQLKRGSVDRMRGLDPSTPAQVIAPSETPSSSSVVKKRRKRRRKSQLDSLKRDDNMNTSEDEDMFPIEMSSDEAMELLESSRTLPNDIPPFQDDIPEENLSLAVIYPQSASYPNSDREWSPTPSPSGSRPSTPKSDSELVSKSTERTGQKNPEMLWLWGELPQAAKSSSPHKMKESSPLSSRKICDKSHFQAIHSESSDTFSDQSPTLVGGALLDQNKPQTEMQFVNEEDLETLGAAAPLLPMIEELKPPSASVVQTANKTDSPSRKRDKRSRHLGADGVYLDDLTDMDPEVAALYFPKNGDPSGLAKHASDNGARSANQSPQSVGSSGVDSGVESTSDGLRDLPSIAISLCGGLSDHREITKDAFLEQAVSYQQFVDNPAIIDDPNLVVKIGSKYYNWTTAAPLLLAMQAFQKPLPKATVESIMRDKMPKKGGRWWFSWRGRNTTIKEESKPEQCLAGKAHSTGEQPPQLSLATRVKHESSSSDEERAAAKPSNAGHLPLLPNVSYKKTLRLTSEQLKSLKLKNGPNDVVFSVTTQYQGTCRCEGTIYLWNWDDKVIISDIDGTITRSDTLGHILPTLGKDWTHQGIAKLYHKVSQNGYKFLYCSARAIGMADMTRGYLHWVNERGTVLPQGPLLLSPSSLFSALHREVIEKKPEKFKVQCLTDIKNLFFPNTEPFYAAFGNRPADVYSYKQVGVSLNRIFTVNPKGELVQEHAKTNISSYVRLCEVVDHVFPLLKRSHSSDFPCSDTFSNFTFWREPLPPFENQDIHSASA

SEQ ID NO: 14776 - protein, 473 aa, Homo sapiens
MYEIYVETCGQNTENQVNPATFGKCEDHSPMKTDPVGSPLSEFRRCPFLEQEQAKKYSCNMMAFLADEYCNYCRDILRNVEDLLTSFWKSLQQDTVMLMSLPDVCQLFKCYDVQLYKGIEDVLLHDFLEDVSIQYLKSVQLFSKKFKLWLLNALEGVPALLQISKLKEVTLFVKRLRRKTYLSNMAKTMRMVLKSKRRVSVLKSDLQAIINQGTLATSKKALASDRSGADELENNPEMKCLRNLISLLGTSTDLRVFLSCLSSHLQAFVFQTSRSKEEFTKLAASFQLRWNLLLTAVSKAMTLCHRDSFGSWHLFHLLLLEYMIHILQSCLEEEEEEEDMGTVKEMLPDDPTLGQPDQALFHSLNSSLSQACASPSMEPLGVMPTHMGQGRYPVGVSNMVLRILGFLVDTAMGNKLIQVLLEDETTESAVKLSLPMGQEALITLKDGQQFVIQISDVPQSSEDIYFRENNANV

SEQ ID NO: 14777 - protein, 968 aa, Homo sapiens [sequence omitted]

SEQ ID NO: 14778 - protein, 580 aa, Homo sapiens
MDILPRISHEVLLPVLSFLTSLVTGFPSGAQARTILCVKTISLIALICLRIGQEMVQQHLSEPVATFFQVFSQLHELRQQDLKLDPAGRGEGQLPQVVFSDGQQRPVDPALLDELQKVFTLEMAYTIYVPFSCLLGDIIRKIIPNHELVGELAALYLESISPSSRNPASVEPTMPGTGPEWDPHGGGCPQDDGHSGTFGSVLVGNRIQIPNDSRPENPGPLGPISGVGGGGLGSGSDDNALKQELPRSVHGLSGNWLAYWQYEIGVSQQDAHFHFHQIRLQSFPGHSGAVKCVAPLSSEDFFLSGSKDRTVRLWPLYNYGDGTSETAPRLVYTQHRKSVFFVGQLEAPQHVVSCDGAVHVWDPFTGKTLRTVEPLDSRVPLTAVAVMPAPHTSITMASSDSTLRFVDCRKPGLQHEFRLGGGLNPGLVRALAISPSGRSVVAGFSSGFMVLLDTRTGLVLRGWPAHEGDILQIKAVEGSVLVSSSSDHSLTVWKELEQKPTHHYKSASDPIHTFDLYGSEVVTGTVSNKIGVCSLLEPPSQATTKLSSENFRGTLTSLALLPTKRHLLLGSDNGVIRLLA

SEQ ID NO: 14779 - protein, 162 aa, Homo sapiens
MAEQVLPQALYLSNMRKAVKIRERTPEDIFKPTNGIIHHFKTMHRYTLEMFRTCQFCPQFREIIHKALIDRNIQATLESQKKLNWCREVRKLVALKTNGDGNCLMHATSQYMWGVQDTDLVLRKALFSTLKETDTRNFKFRWQLESLKSQEFVETGLCYDTR

SEQ ID NO: 14780 - protein, 1032 aa, Homo sapiens
MFNGIISIRNKNGEEKVKIERPGGSLSPIWSICWNPSREERNDILAVADWGQKVSFYQLSGKQIGKDRALNFDPCCISYFTKGEYILLGGSDKQVSLFTKDGVRLGTVGEQNSWVWTCQAKPDSNYVVVGCQDGTISFYQLIFSTVHGLYKDRYAYRDSMTDVIVQHLITEQKVRIKCKELVKKIAIYRNRLAIQLPEKILIYELYSEDLSDMHYRVKEKIIKKFECNLLVVCANHIILCQEKRLQCLSFSGVKEREWQMESLIRYIKVIGGPPGREGLLVGLKNGQILKIFVDNLFAIVLLKQATAVRCLDMSASRKKLAVVDENDTCLVYDIDTKELLFQEPNANSVAWNTQCEDMLCFSGGGYLNIKASTFPVHRQKLQGFVVGYNGSKIFCLHVFSISAVEVPQSAPMYQYLDRKLFKEAYQIACLGVTDTDWRELAMEALEGLDFETAKKAFIRVQDLRYLELISSIEERKKRGETNNDLFLADVFSYQGKFHEAAKLYKRSGHENLALEMYTDLCMFEYAKDFLGSGDPKETKMLITKQADWARNIKEPKAAVEMYISAGEHVKAIEICGDHGWVDMLIDIARKLDKAEREPLLLCATYLKKLDSPGYAAETYLKMGDLKSLVQLHVETQRWDEAFALGEKHPEFKDDIYMPYAQWLAENDRFEEAQKAFHKAGRQREAVQVLEQLTNNAVAESRFNDAAYYYWMLSMQCLDIAQDPAQKDTMLGKFYHFQRLAELYHGYHAIHRHTEDPFSVHRPETLFNISRFLLHSLPKDTPSGISKVKILFTLAKQSKALGAYRLARHAYDKLRGLYIPARFQKSIELGTLTIRAKPFHDSEELVPLCYRCSTNNPLLNNLGNVCINCRQPFIFSASSYDVLHLVEFYLEEGITDEEAISLIDLEVLRPKRDDRQLEIANNSSQILRLVETKDSIGDEDPFTAKLSFEQGGSEFVPVVVSRLVLRSMSRRDVLIKRWPPPLRWQYFRSLLPDASITMCPSCFQMFHSEDYELLVLQHGCCPYCRRCKDDPGP

SEQ ID NO: 14781 - protein, 149 aa, Homo sapiens
PGRGSPKDRLPPAPRKRALVSVGVAERAVHETPTLTHETFKALKPGLSAYADDVEKVKKVFKASPFLVGDDCVSIMNGTDEGVSAWITINFLTGSLKTPGGSSVGMLDLGGGSTQIAFLPRVEGTLQASPPGYLTALRMFNRTYKLYSY

SEQ ID NO: 14782 - protein, 481 aa, Homo sapiens
FPLKSITESFATAIHGLKVGHLTDRVIQRSKRMILDTLGAGFLGTTTEVFHIASQYSKIYSSNISSTVWGQPDIRLPPTYAAFVNGVAIHSMDFDDTWHPATHPSGAVLPVLTALAEALPRSPKFSGLDLLLAFNVGIEVQGRLLHFAKEANDMPKRFHPPSVVGTLGSAAAASKFLGLSSTKCREALAIAVSHAGAPMANAATQTKPLHIGNAAKHGIEAAFLAMLGLQGNKQVLDLEAGFGAFYANYSPKVLPSIASYSWLLDQQDVAFKRFPAHLSTHWVADAAASVRKHLVAERALLPTDYIKRIVLRIPNVQYVNRPFPVSEHEARHSFQYVACAMLLDGGITVPSFHECQINRPQVRELLSKVELEYPPDNLPSFNILYCEISVTLKDGATFTDRSDTFYGHWRKPLSQEDLEEKFRANASKMLSWDTVESLIKIVKNLEDLEDCSVLTTLLKGPSPPEVASNSPACNNSITNLS

SEQ ID NO: 14783 - protein, 96 aa, Homo sapiens
MYPPSMIATGSIGAAVQGLGACSMSGDELTELLAGITGTEVDCLRACQEQIEAALRESLREASQTSSSPAPKAPRGSSSQGPSQTSTPTDVTAIHL

SEQ ID NO: 14784 - protein, 781 aa, Homo sapiens
MHDECTPQQTMSSIQDTKAADIAARGELNVIETATVSPTNGEESHYTNQVQLEKNKTHMSSALVEKENNTSLNGRVLGQEESQNKMFPDNAENEDDKQIEHMTVENINGNREETHGIIQTTETEIQETSESPREEMTTSSIICDISKKYINSTLPNDSENIKHKNNIMEKEYLDVLSDVTGPQVSCYITAPSYVLQQLECRIINHMSSLIVGDNEELVSNVITIECSDKEKRVPFPIGIAIPFTARYRGNYRDIMVKVCDINLQSSYLNPNSLEGMKGGYKGTCASVKVYKLGIFSVVSCLKKESFTVTKKGLALKSSMDSRISLNYPPGVFTSPVLVQLKIQPVDPALVAHLKAQQDTFYSVQSTSPLIHIQHPSTYPFQKPVTLFLPCSPYLDKNNLGSEIDHKRRASATINRITPSYFNRTKIASIRKPRKNASECLKLLGFRSQDSGWCGLDDVVKTIQSGLVSVELYEHLERFIVLHLSSTMDNSHLVTFVKSLEEAMLSTTACIVLSHQKDNPHRIAVLVVPSKDLSQVLKDLHLEGFGGPPEPSRHFQVREGEQLLLRFTGNIFASSNGKDYGKDYTLIFHLQRKPRLELQIKEVDEFGNYSCPHYKGTIVVYKVPKGKIVPNLNQSLVINENHSQLPICKLPLKLPKHKKLINRPQSTKRVSKDPVEALWDNLLHWLAEELSEENAESLSSTLPLRRSTIQLIKLKNPDDLTEQIHEFLCFWKKSLPTFTDKLRLLARHLRKIGRSDLAEELKFKWENKVFTEPQQCFDVAPE

SEQ ID NO: 14785 - protein, 1391 aa, Homo sapiens
MAHSKTRTNDGKITYPPGVKEISDKISKEEMVRRLKMVVKTFMDMDQDSEEEKELYLNLALHLASDFFLKHPDKDVRLLVACCLADIFRIYAPEAPYTSPDKLKDIFMFITRQLKGLEDTKSPQFNRYFYLLENIAWVKSYNICFELEDSNEIFTQLYRTLFSVINNGHNQKVHMHMVDLMSSIICEGDTVSQELLDTVLVNLVPAHKNLNKQAYDLAKALLKRTAQAIEPYITNFFNQVLMLGKTSISDLSEHVFDLILELYNIDSHLLLSVLPQLEFKLKSNDNEERLQVVKLLAKMFGAKDSELASQNKPLWQCYLGRFNDIHVPIRLECVKFASHCLMNHPDLAKDLTEYLKVRSHDPEEAIRHDVIVSIVTAAKKDILLVNDHLLNFVRERTLDKRWRVRKEAMMGLAQIYKKYALQSAAGKDAAKQIAWIKDKLLHIYYQNSIDDRLLVERIFAQYMVPHNLETTERMKCLYYLYATLDLNAVKALNEMWKCQNLLRHQVKDLLDLIKQPKTDASVKAIFSKVMVITRNLPDPGKAQDFMKKFTQVLEDDEKIRKQLEVLVSPTCSCKQAEGCVREITKKLGNPKQPTNPFLEMIKFLLERIAPVHIDTESISALIKQVNKSIDGTADDEDEGVPTDQAIRAGLELLKVLSFTHPISFHSAETFESLLACLKMDDEKVAEAALQIFKNTGSKIEEDFPHIRSALLPVLHHKSKKGPPRQAKYAIHCIHAIFSSKETQFAQIFEPLHKSLDPSNLEHLITPLVTIGHIALLAPDQFAAPLKSLVATFIVKDLLMNDRLPGKKTTKLWVPDEEVSPETMVKIQAIKMMVRWLLGMKNNHSKSGTSTLRLLTTILHSDGDLTEQGKISKPDMSRLRLAAGSAIVKLAQEPCYHEIITLEQYQLCALAINDECYQVRQVFAQKLHKGLSRLRLPLEYMAICALCAKDPVKERRAHARQCLVKNINVRREYLKQHAAVSEKLLSLLPEYVVPYTIHLLAHDPDYVKVQDIEQLKDVKECLWFVLEILMAKNENNSHAFIRKMVENIKQTKDAQGPDDAKMNEKLYTVCDVAMNIIMSKSTTYSLESPKDPVLPARFFTQPDKNFSNTKNYLPPEMKSFFTPGKPKTTNVLGAVNKPLSSAGKQSQTKSSRMETVSNASSSSNPSSPGRIKGRLDSSEMDHSENEDYTMSSPLPGKKSDKRDDSDLVRSELEKPRGRKKTPVTEQEEKLGMDDLTKLVQEQKPKGSQRSRKRGHTASESDEQQWPEEKRLKEDILENEDEQNSPPKKGKRGRPPKPLGGGTPKEEPTMKTSKKGSKKKSGPPAPEEEEEEERQSGNTEQKSKSKQHRVSRRAQQRAESPESSAIESTQSTPQKGRGRPSKTPSPSQPKKNV

SEQ ID NO: 14786 - protein, 298 aa, Homo sapiens
REEDIYQFAYCYPYTYTRFQHYLDSLQKRNMDYFFREQLGQSVQQRKLDLLTITSPDNLREGAEQKVVFITGRVHPGETPSSFVCQGIIDFLVSQHPIACVLREYLVFKIAPMLNPDGVYLGNYRCSLMGFDLNRHWLDPSPWVHPTLHGVKQLIVQMYNDPKTSLEFYIDIHAHSTMMNGFMYGNIFEDEERFQRQAIFPKLLCQNAEDFSYSSTSFNRDAVKAGTGRRFLGGLLDHTSYCYTLEVSFYSYIISGTTAAVPYTEEACILSPHPALGQPSSSREYPSLTGQELGPQLR

SEQ ID NO: 14787 - protein, 1880 aa, Homo sapiens
MSHYHFIKCCCFQLCNVFRSHEMEIDQCLLESLPLGQRQRLVKRMRCEQIKAYYEREKAFQKQEGFLKRLKHAKNPKVHFNLTDMLQDAIIHHNDKEVLRLLKEGADPHTLVSSGGSLLHLCARYDNAFIAEILIDRGVNVNHQDEDFWTPMHIACACDNPDIVLLLVLAGANVLLQDVNGNIPLDYAVEGTESSSILLTYLDENGVDLTSLRQMKLQRPMSMLTDVKHFLSSGGNVNEKNDEGVTLLHMACASGYKEVVSLILEHGGDLNIVDDQYWTPLHLAAKYGQTNLVKLLLMHQANPHLVNCNEEKASDIAASEFIEEMLLKAEIAWEEKMKEPLSASTLAQEEPYEEIIHDLPVLSSKLSPLVLPIAKQDSLLEKDIMFKDATKGLCKQQSQDSIPENPMMSGSTKPEQVKLMPPAPNDDLATLSELNDGSLLYEIQKRFGNNQIYTFIGDILLLVNPYKELPIYSSMVSQLYFSSSGKLCSSLPPHLFSCVERAFHQLFREQRPQCFILSGERGSGKSEASKQIIRHLTCRAGASRATLDSRFKHVVCILEAFGHAKTTLNDLSSCFIKYFELQFCERKQQLTGARIYTYLLEKSRLVSQPLGQSNFLIFYLLMDGLSAEEKYGLHLNNLCAHRYLNQTIQDDASTGERSLNREKLAVLKRALNVVGFSSLEVENLFVILAAILHLGDIRFTALNEGNSAFVSDLQLLEQVAGMLQVSTDELASALTTDIQYFKGDMIIRRHTIQIAEFFRDLLAKSLYSRLFSFLVNTMNSCLHSQDEQKSMQTLDIGILDIFGFEEFQKNEFEQLCVNMTNEKMHHYINEVLFLHEQVECVQEGVTMETAYSPGNQNGVLDFFFQKPSGFLTLLDEESQMIWSVESNFPKKLQSLLESSNTNAVYSPMKDGNGNVALKDHGTAFTIMHYAGRVMYDVVGAIEKNKDSLSQNLLFVMKTSENVVINHLFQSKLSQTGSLVSAYPSFKFRGHKSALLSKKMTASSIIGENKNYLELSKLLKKKGTSTFLQRLERGDPVTIASQLRKSLMDIIGKLQKCTPHFIHCIRPNNSKLPDTFDNFYVSAQLQYIGVLEMVKIFRYGYPVRLSFSDFLSRYKPLADTFLREKKEQSAAERCRLVLQQCKLQGWQMGVRKVFLKYWHADQLNDLCLQLQRKIITCQKVIRGFLARQHLLQRISIRQQEVTSINSFLQNTEDMGLKTYDALVIQNASDIARENDRLRSEMNAPYHKEKLEVRNMQEEGSKRTDDKSGPRHFHPSSMSVCAAVDGLGQCLVGPSIWSPSLHSVFSMDDSSSLPSPRKQPPPKPKRDPNTRLSASYEAVSACLSAAREAANEALARPRPHSDDYSTMKKIPPRKPKRSPNTKLSGSYEEISGSRPGDARPAGAPGAAARVLTPGTPQCALPPAAPPGDEDDSEPVYIEMLGHAARPDSPDPGESVYEEMKCCLPDDGGPGAGSFLLHGASPPLLHRAPEDEAAGPPGDACDIPPPFPNLLPHRPPLLVFPPTPVTCSPASDESPLTPLEVKKLPVLETNLKYPVQPEGSSPLSPQYSKSQKGDGDRPASPGLALFNGSGRASPPSTPPPPPPPPGPPPAPYRPCAHLAFPPEPAPVNAGKAGPSAEAPKVHPKPNSAPVAGPCSSFPKIPYSPVKATRADARKAGSSASPPAPYSPPSSRPLSSPLDELASLFNSGRSVLRKSAAGRKIREAEGFETNMNISSRDDPSTSEITSETQDRNANNHGIQLSNSLSSAITAENGNSISNGLPEEDGYSRLSISGTGTSTFQRHRDSHTTQVIHQLRLSENESVALQELLDWRRKLCEEGQDWQQILHHAEPRVPPPPPCKKPSLLKKPEGASCNRLPSELWDTTI

SEQ ID NO: 14788 - protein, 706 aa, Homo sapiens
MAAAVLMDRVQSCVTFEDVFVYFSREEWELLEEAQRFLYRDVMLENFALVATLAFIFPVPCSCAVGGGRKPWVPDRADITAATVKETYRGHGPAEWELEEGFWCEAEHEAPSEQSVSVEGVSQVRTAESGLFQKAHPCEMCDPLLKDILHLAEHQGSHLTQKLCTRGLCRRRFSFSANFYQHQKQHNGENCFRGDDGGASFVKSCTVHMLGRSFTCREEGMDLPDSSGLFQHQTTYNRVSPCRRTECMESFPHSSSLRQHQGDYDGQMLFSCGDEGKAFLDTFTLLDSQMTHAEVRPFRCLPCGNVFKEKSALINHRKIHSGEISHVCKECGKAFIHLHHLKMHQKFHTGKRHYTCSECGKAFSRKDTLVQHQRVHTGERSYDCSECGKAYSRSSHLVQHQRIHTGERPYKCNKCGKAFSRKDTLVQHQRFHTGERPYECSECGKFFSQSSHLIEHWRIHTGARPYECIECGKFFSHNSSLIKHRRVHTGARSYVCSKCGKAFGCKDTLVQHQIIHTGARPYECSECGKAFSRKDTLVQHQKIHTGERPYECGECGKFFSHSSNLIVHQRIHTGAKPYECNECGKCFSHNSSLILHQRVHTGARPYVCSECGKAYISSSHLVQHKKVHTGARPYECSECGKFFSRNSGLILHQRVHTGEKPYVCSECGKAYSRSSHLVRHQKAHTGERAHECNSFGGPLAASLKLV

SEQ ID NO: 14789 - protein, 401 aa, Homo sapiens
MCGIWALFGSDDCLSVQCLSAMKIAHRGPDAFRFENVNGYTNCCFGFHRLAVVDPLFGMQPIRVKKYPYLWLCYNGEIYNHKKMQQHFEFEYQTKVDGEIILHLYDKGGIEQTICMLDGVFAFVLLDTANKKVFLGRDTYGVRPLFKAMTEDGFLAVCSEAKGLVTLKHSATPFLKVEPFLPGHYEVLDLKPNGKVASVEMVKYHHCRDVPLHALYDNVEKLFPGFEIETVKNNLRILFNNAVKKRLMTDRRIGCLLSGGLDSSLVAATLLKQLKEAQVQYPLQTFAIGMEDSPDLLAARKVADHIGSEHYEVLFNSEEGIQALDEVIFSLETYDITTVRASVGMYLISKYIRKNTDSVVIFSGEGSDELTQGYIYFHKDWRGRKKNCFVCQKQNSWCFCL

SEQ ID NO: 14790 - protein, 205 aa, Homo sapiens
MSQTSLKQKKNEPGMRSSKESLEAEKRKESDKTGVRLSNQMRRAVNPNHSLRCCPFQGHSSCRRCLCAAEGTALGPCHTIRIYIHMCLLWEQGQQITMMRVSRDHTTDSGGEPQTTWGSQESSLRKTDSRGYLVRSQWSRISRSPSTKAPSIDEPRSRNTSAKLPSSSTSSRTPSTSPSLHDSSPPPLSGQPSLQPPASPQLPRS

SEQ ID NO: 14791 - protein, 588 aa, Homo sapiens
MMSSPAQPDLMWNLVPWVLFCGCCRIFPDGVAGREQLLAQQRMHSMISSVDVKSEVPVGLEPISPLDLRTDLRMMMPVVDPVVREKQLQQELLLIQQQQQIQKQLLIAEFQKQHENLTRQHQAQLQEHIKELLAIKQQQELLEKEQKLEQQRQEQEVERHRREQQLPPLRGKDRGRERAVASTEVKQKLQEFLLSKSATKDTPTNGKNHSVSRHPKLWYTAAHHTSLDQSSPPLSGTSPSYKYTLPGAQDAKDDFPLRKTESSVSSSSPGSGPSSPNNGPTGSVTENETSVLPPTPHAEQMVSQQRILIHEDSMNLLSLYTSPSLPNITLGLPAVPSQLNASNSLKEKQKCETQTLRQGVPLPGQYGGSIPASSSHPHVTLEGKPPNSSHQALLQHLLLKEQMRQQKLLVAGGVPLHPQSPLATKERISPGIRGTHKLPRHRPLNRTQSAPLPQSTLAQLVIQQQHQQFLEKQKQYQQQIHMNKLLSKSIEQLKQPGSHLEEAEEELQGDQAMQEDRAPSSGNSTRSDSSACVDDTLGQVGAVKVKEEPVDSDEDAQIQEMESGEQAAFMQQVIGKDLAPGFVIKVII

SEQ ID NO: 14792 - protein, 986 aa, Homo sapiens
MTLLGSEHSLLIRSKFRSVLQLRLQQRRTQEQLANQGIIPPLKRPAEFHEQRKHLDSDKAKNSLKRKARNRCNSADLVNMHILQASTAERSIPTAQMKLKRARLADDLNEKIALRPGPLELVEKNILPVDSAVKEAIKGNQVSFSKSTDAFAFEEDSSSDGLSPDQTRSEDPQNSAGSPPDAKASDTPSTGSLGTNQDLASGSENDRNDSASQPSHQSDAGKQGLGPPSTPIAVHAAVKSKSLGDSKNRHKKPKDPKPKVKKLKYHQYIPPDQKAEKSPPPMDSAYARLLQQQQLFLQLQILSQQQQQQQHRFSYLGMHQAQLKEPNEQMVRNPNSSSTPLSNTPLSPVKNSFSGQTGVSSFKPGPLPPNLDDLKVSELRQQLRIRGLPVSGTKTALMDRLRPFQDCSGNPVPNFGDITTVTFPVTPNTLPNYQSSSSTSALSNGFYHFGSTSSSPPISPASSDLSVAGSLPDTFNDASPSFGLHPSPVHVCTEESLMSSLNGGSVPSELDGLDSEKDKMLVEKQKVINELTWKLQQEQRQVEELRMQLQKQKRNNCSEKKPLPFLAASIKQEEAVSSCPFASQVPVKRQSSSSECHPPACEAAQLQPLGNAHCVESSDQTNVLSSTFLSPQCSPQHSPLGAVKSPQHISLPPSPNNPHFLPSSSGAQGEGHRVSSPISSQVCTAQNSGAHDGHPPSFSPHSSSLHPPFSGAQADSSHGAGGNPCPKSPCVQQKMAGLHSSDKVGPKFSIPSPTFSKSSSAISEVTQPPSYEDAVKQQMTRSQQMDELLDVLIESGEMPADAREDHSCLQKVPKIPRSSRSPTAVLTKPSASFEQASSGSQIPFDPYATDSDEHLEVLLNSQSPLGKMSDVTLLKIGSEEPHFDGIMDGFSGKAAEDLFNAHEILPGPLSPMQTQFSPSSVDSNGLQLSFTESPWETMEWLDLTPPNSTPGFSALTTSSPSIFNIDFLDVTDLNLNSSMDLHLQQW

SEQ ID NO: 14793 - protein, 1302 aa, Homo sapiens
MPGGACVLVIALMFLAWGEAQECSPGGHQFLRSPYRSVRFDSWHLQQSAVQDLICDHSLSPGWYRFLILDRPAEMPTKCVEMNHCGTQAPIWLSLRDSETLPSPGEIKQLTACATWQFLFSTTKDCCLFQIPVSVRNCGNFSVYLLQPTQGCMGYCAEAISDARLHPCGSDETETGGDCVRQLAASLPPPPAGRPEVLVELIESRLFCRCSFDVPATKNSVGFHIAWSRLSSQEVKEELTQETTVQAFSLLELDGINLRLGDRIFCSASVFFLENPHVQSVAIESQEFFAGFKLQPELSTISEDGKEYYLRIESTVPIICSEFSELDQECKISLKLKTIGQGREHLGLNLALSSCHVDLLQTSSCANGTCSHTFVYYTAVTDFSRDGDRVSNIVVQPIVNEDFLWNNYIPDSIQIKVKDVPTAYCYTFTDPHIITFDGRVYDNFKTGTFVLYKSMSRDFEVHVRQWDCRSLHYPVSCNCGFVAQEGGDIVTFDMCNGQLRESQPYLFIKSQDVTRNIKISESYLGRKVTIWFSSGAFIRADLGEWGMSLTIRAPSVDYRNTLGLCGTFDENPENDFHDKNGMQIDQNFNNYVAFINEWRILPGKSMSDTLPVSMTSPGKPSYCSCSLDTAAYPSSEDLDSVSRSEIALGCKDLNHVSLSSLIPELDVTSEYINSDTLVREINKHTSPEEYNLNLFLQEKKHINLTKLGLNVQKHPGNEKEDSLQYLANKKYTQGRGSHSQEMRYNRQNRWKRQNFHEFPPLFAFPSLSQTDLEELTYFFPEDHAEDVQQEFFPSWPTPSGLTEYSTLTLCQETLANSSIGRLCLAFLGKRLDSVIEMCVKDVLLKDDLSWAEAGVALLENECEKRIVEEGKYNTEEYGTSIEDILSVLKCPNLCSGNGQCMEWGCACSPSFSSYDCSDSYDKAPEITELGNAGFCDVQKYNCMMVRVFGKGFKELPSIKCEVTKLQYNSSEWMPGEPIYTQTVFHNSRAVDCQLPTDVQQFDTMDLVGGKPTGKWQLKVSNDGYKFSNPKITVIYDGACQVCGLYKNDSCTIKENVCIIDGLCYVEGDKNPTSPCLICRPKISRFTWSFLENNQPPVIQALQDKLQTFYGENFEYQFVAFDPEGSDIHFTLDSGPEGASVSSAGLFMWKTDLLTTQQITVRLNDDCDAETRVTIEVTVKSCDCLNGGSCVSDRNFSPGSGVYLCVCLPGFHGSLCEVDISGCQSNPCGLGSYISGFHSYSCDCPPELKGKNCQEDVDECDSKPCFEGVACLNTFGSYHCGSCPEGFYGDGKICHGKSFYFLL

SEQ ID NO: 14794 - protein, 301 aa, Homo sapiens
MTGRDSLSDGRTSSRALVPGGSPRGSRPRGFAITDLLGLEAELPAPAGPGQGSGCEGPAVAPCPGPGLDGSSLARGALPLGLGLLCGFGTQPPAAARAPCLLLADVPFLPPRGPEPAAPLAPSRPPPALGRQKRSDSVSTSDEDSQSEDRNDLKASPTLGKRKKRRHRTVFTAHQLEELEKAFSEAHYPDVYAREMLAVKTELPEDRIQVWFQNRRAKWRKREKRWGGSSVMAEYGLYGAMVRHCIPLPDSVLNSAEGGLLGSCAPWLLVQTSAPGGSRSLDFAGDTQAPQTPWWCLMTFS

SEQ ID NO: 14795 - protein, 258 aa, Homo sapiens
MGSRAELCTLLGGFSFLLLLIPGEGAKGGSLRESQGVCSKQTLVVPLHYNESYSQPVYKPYLTLCAGRRICSTYRTMYRVMWREVRREVQQTHAVCCQGWKKRHPGALTCEAICAKPCLNGGVCVRPDQCECAPGWGGKHCHVGSFTCGCPHDLVLGVDGRTCMEGSPEPPTSASILSVAVREAEKDERALKQEIHELRGRLERLEQWAGQAGAWVRAVLPVPPEELQPEQVAELWGRGDRIESLSDQVLLLEERLGA

SEQ ID NO: 14796 - protein, 826 aa, Homo sapiens
MVPSRRTWNLGATPSLRGLWRVGRAPEPEPGMARPAPAPASPAARPFPHTGPGRLRTGRGKDTPVCGDEDSSARSAARPALAQCRALSVDWAGPGSPHGLYLTLQVEHLKEKLISQAQEVSRLRSELGGTDLEKHRDLLMVENERLRQEMRRCEAELQELRTKPAGPCPGCEHSQESAQLRDKLSQLQLEMAESKGMLSELNLEVQQKTDRLAEVELRLKDCLAEKAQEEERLSRRLRDSHETIASLRAQSPPVKYVIKTVEVESSKTKQALSESQARNQHLQEQVAMQRQVLKEMEQQLQSSHQLTARLRAQIAMYESELERAHGQMLEEMQSLEEDKNRAIEEAFARAQVEMKAVHENLAGVRTNLLTLQPALRTLTNDYNGLKRQVRGFPLLLQEALRSVKAEIGQAIEEVNSNNQELLRKYRRELQLRKKCHNELVRLKGNIRVIARVRPVTKEDGEGPEATNAVTFDADDDSIIHLLHKGKPVSFELDKVFSPQASQQDVFQEVQALVTSCIDGFNVCIFAYGQTGAGKTYTMEGTAENPGINQRALQLLFSEVQEKASDWEYTITVSAAEIYNEVLRDLLGKEPQEKLEIRLCPDGSGQLYVPGLTEFQVQSVDDINKVFEFGHTNRTTEFTNLNEHSSRSHALLIVTVRGVDCSTGLRTTGKLNLVDLAGSERVGKSGAEGSRLREAQHINKSLSALGDVIAALRSRQGHVPFRNSKLTYLLQDSLSGDSKTLMVVQVSPVEKNTSETLYSLKFAERVRSVELGPGLRRAELGSWSSQEHLEWEPACQTPQPSARAHSAPSSGTSSRPGSIRRKLQPSA

SEQ ID NO: 14797 - protein, 1195 aa, Homo sapiens
MDLRDFYLLAALIACLRLDSAIAQELIYTIREELPENVPIGNIPKDLNISHINAATGTSASLVYRLVSKAGDAPLVKVSSSTGEIFTTSNRIDREKLCAGASYAEENECFFELEVVILPNDFFRLIKIKIIVKDTNDNAPMFPSPVINISIPENTLINSRFPIPSATDPDTGFNGVQHYELLNGQSVFGLDIVETPEGEKWPQLIVQQNLDREQKDTYVMKIKVEDGGTPQKSSTAILQVTVSDVNDNRPVFKEGQVEVHIPENAPVGTSVIQLHATDADIGSNAEIRYIFGAQVAPATKRLFALNNTTGLITVQRSLDREETAIHKVTVLASDGSSTPARATVTINVTDVNDNPPNIDLRYIISPINGTVYLSEKDPVNTKIALITVSDKDTDVNGKVICFIEREVPFHLKAVYDNQYLLETSSLLDYEGTKEFSFKIVASDSGKPSLNQTALVRVKLEDENDNPPIFNQPVIELSVSENNRRGLYLTTISATDEDSGKNADIVYQLGPNASFFDLDRKTGVLTASRVFDREEQERFIFTVTARDNGTPPLQSQAAVIVTVLDENDNSPKFTHNHFQFFVSENLPKYSTVGVITVTDADAGENKAVTLSILNDNDNFVLDPYSGVIKSNVSFDREQQSSYTFDVKATDGGQPPRSSTAKVTINVMDVNDNSPVVISPPSNTSFKLVPLSAIPGSVVAEVFAVDVDTGMNAELKYTIVSGNNKGLFRIDPVTGNITLEEKPAPTDVGLHRLVVNISDLGYPKSLHTLVLVFLYVNDTAGNASYIYDLIRRTMETPLDRNIGDSSQPYQNEDYLTIMIAIIAGAMVVIVVIFVTVLVRCRHASRFKAAQRSKQGAEWMSPNQENKQNKKKKRKKRKSPKSSLLNFVTIEESKPDDAVHEPINGTISLPAELEEQSIGRFDWGPAPPTTFKPNSPDLAKHYKSASPQPAFHLKPDTPVSVKKHHVIQELPLDNTFVGGCDTLSKRSSTSSDHFSASECSSQGGFKTKGPLHTRQCNSHSKSDNIPVTPQKCPSSTGFHIQENEESHYEPQDEFYDQASPDKRTEADGNSDPNSDGPLGPRGLAEATEMCTQECLVLGHSDNCWMPPGLGPYQHPKSPLSTFAPQKEWVKKDKLVNGHTLTRAWKEDSNRNQFNDRKQYGSNEGHFNNGSHMTDIPLANLKSYKQAGGATESPKEHQL

SEQ ID NO: 14798 - protein, 1048 aa, Homo sapiens
MEGRSAAAETFVWVNNASAHSQSVAKAKYEFLFGRSEGKAPDTSDHGGSTLLPPNVTNEFPEYGTMEEGGEGLRASLEFDGEALPCHPQEQQGVQPLTGCHSGLDSVTEGPKDVREAPSQSHLKEQSLQPIDSLISALKATEARIISGTLQATKVLDQDAVSSFSVQQVEKELDTASRKTQRVNKTLPAGQKNLPEIPLSAEVTTEESFYLSIQKDLTALLTGDTQAEISQIMNNGRKGAVCVQEPSCPLASLGSSAVTCHSAGSVGFLKEQRSALGREHPGGCDRSSSMGRPGRVKHVEFQGVEILWTGGDKRETQHPIDFETSLQRTASPDSKESSKVPRHLISSAGLCNSSSLTENVWDESWKAPSERPGTSSGTFSPVRLDESGEDEVFLQENKQHLEKTPKPERDRERISEQEEHVKGEDEDILGPGYTEDSTDVYSSQFETILDNTSLYYSAESLETLYSEPDSYFSFEMPLTPMIQQRIKEGGQFLERTSGGGHQDILSVSADGGIVMGYSSGVTNGLNDASDSIYTKGTPEIAFWGSNAGVKTTRLEAHSEMGSTEILEKETPENLSNGTSSNVEAAKRLAKRLYQLDRFKRSDVAKHLGKNNEFSKLVAEEYLKFFDFTGMTLDQSLRYFFKAFSLVGETQERERVLIHFSNRYFYCNPDTIASQDGVHCLTCAIMLLNTDLHGHVNIGKKMTCQEFIANLQGVNEGVDFSKDLLKALYNSIKNEKLEWAVDDEEKKKSPSESTEEKANGTHPKTISRIGSTTNPFLDIPHDPNAAVYKSGFLARKIHADMDGKKTPRGKRGWKTFYAVLKGTVLYLQKDEYKPEKALSEEDLKNAVSVHHALASKATDYEKKPNVFKLKTADWRVLLFQTQSPEEMQGWINKINCVAAVFSAPPFPAAIGSQKKFSRPLLPATTTKLSQEEQLKSHESKLKQITTELAEHRSYPPDKKVKAKDVDEYKLKDHYLEFEKTRYEMYVSILKEGGKELLSNDESEAAGLKKSHSSPSLNPDTSPITAKVKRNVSERKDHRPETPSIKQKVT

SEQ ID NO: 14799 - protein, 310 aa, Homo sapiens
MEEENATLLTEFVLTGFLYQPQWKIPLFLAFLVIYLITIMGNLGLIAVIWKDPHLHIPMYLLLGNLAFVDALLSSSVTLKMLINFLAKSKMISLSECKIQLFSFAISVTTECFLLATMAYDRYVAICKPLLYPAIMTNGLCIRLLILSYVGGLLHALIHEGFLFRLTFCNSNIIQHFYCDIIPLLKISYTDSSINFLMVFIFAGSIQVFTIGTVLISYIFVLYTILKKKSVKGMRKAFSTCGAHLLSVSLYYGPLAFMYMGSASPQADDQDMMESLFYTVIVPLLNPMIYSLRNKQVIASFTKMFKRNDV

SEQ ID NO: 14800 - protein, 1202 aa, Homo sapiens
MNFEGLDPGLAEYAPAMHSALDPVLDAHLNPSLLQNVELDPEGVALEALPVQESVHIMEGVYSELHSVVAEVGVPVSVSHFDLHEEMLWVGSHGGHATSFFGPALERYSSFQVNGSDDIRQIQSLENGILFLTKNNLKYMARGGLIIFDYLLDENEDMHSLLLTDSSTLLVGGLQNHIIEIDLNTVQETQKYAVETPGVTIMRQTNRFFFCGHTSGKVSLRDLRTFKVEHEFDAFSGSLSDFDVHGNLLAACGFSSRLTGLACDRFLKVYDLRMMRAITPLQVHVDPAFLRFIPTYTSRLAIISQSGQCQFCEPTGLANPADIFHVNPVGPLLMTFDVSASKQALAFGDSEGCVHLWTDSPEPSFNPYSRETEFALPCLVDSLPPLDWSQDLLPLSLIPVPLTTDTLLSDWPAANSAPAPRRAPPVDAEILRTMKKVGFIGYAPNPRTRLRNQIPYRLKESDSEFDSFSQVTESPVGREEEPHLHMVSKKYRKVTIKYSKLGLEDFDFKHYNKTLFAGLEPHIPNAYCNCMIQVLYFLEPVRCLIQNHLCQKEFCLACELGFLFHMLDLSRGDPCQGNNFLRAFRTIPEASALGLILADSDEASGKGNLARLIQRWNRFILTQLHQDMQELEIPQAYRGAGGSSFCSSGDSVIGQLFSCEMENCSLCRCGSETVRASSTLLFTLSYPDGSKSDKTGKNYDFAQVLKRSICLDQNTQAWCDTCEKYQPTIQTRNIRHLPDILVINCEVNSSKEADFWRMQAEVAFKMAVKKHGGEISKNKEFALADWKELGSPEGVLVCPSIEELKNVWLPFSIRMKMTKNKGLDVCNWTDGDEMQWGPARAEEEHGVYVYDLMATVVHILDSRTGGSLVAHIKVGETYHQRKEGVTHQQWYLFNDFLIEPIDKHEAVQFDMNWKVPAILYYVKRNLNSRYNLNIKNPIEASVLLAEASLARKQRKTHTTFIPLMLNEMPQIGDLVGLDAEFVTLNEEEAELRSDGTKSTIKPSQMSVARITCVRGQGPNEGIPFIDDYISTQEQVVDYLTQYSGIKPGDLDAKISSKHLTTLKSTYLKLRFLIDIGVKFVGHGLQKDFRVINLMVPKDQVLDTVYLFHMPRKRMISLRFLAWYFLDLKIQGETHDSIEDARTALQLYRKYLELSKNGTEPESFHKVLKGLYEKGRKMDWKVPEPEGQTSPKNAAVFSSVLAL

SEQ ID NO: 14801 - protein, 681 aa, Homo sapiens
MSKELAAMGPGASGDGVRTETAPHIALDSRVGLHAYDISVVVIYFVFVIAVGIWSSIRASRGTIGGYFLAGRSMSWWPIGASLMSSNVGSGLFIGLAGTGAAGGLAVGGFEWNATWLLLALGWVFVPVYIAAGVVTMPQYLKKRFGGQRIQVYMSVLSLILYIFTKISTDIFSGALFIQMALGWNLYLSTGILLVVTAVYTIAGGLMAVIYTDALQTVIMVGGALVLMFLGFQDVGWYPGLEQRYRQAIPNVTVPNTTCHLPRPDAFHILRDPVSGDIPWPGLIFGLTVLATWCWCTDQVIVQRSLSAKSLSHAKGGSVLGGYLKILPMFFIVMPGMISRALFPDEVGCVDPDVCQRICGARVGCSNIAYPKLVMALMPVGLRGLMIAVIMAALMSSLTSIFNSSSTLFTIDVWQRFRRKSTEQELMVVGRVFVVFLVVISILWIPIIQSSNSGQLFDYIQAVTSYLAPPITALFLLAIFCKRVTEPGAFWGLVFGLGVGLLRMILEFSYPAPACGEVDRRPAVLKDFHYLYFAILLCGLTAIVIVIVSLCTTPIPEEQLTRLTWWTRNCPLSELEKEAHESTPEISERPAGECPAGGGAAENSSLGQEQPEAPSRSWGKLLWSWFCGLSGTPEQALSPAEKAALEQKLTSIEEEPLWRHVCNINAVLLLAINIFLWGYFA

SEQ ID NO: 14802 - protein, 256 aa, Homo sapiens
EICGAPGVGKTQLCMQLAVDVQIPECFGGVAGEAVFIDTEGSFMVDRVVDLATACIQHLQLIAEKHKGEEHRKALEDFTLDNILSHIYYFRCRDYTELLAQVYLLPDFLSEHSKVRLVIVDGIAFPFRHDLDDLSLRTRLLNGLAQQMISLANNHRLAVILTNQMTTKIDRNQALLVPALGESWGHAATIRLIFHWDRKQSRLATLYKSPSQKECTVLFQIKPQGFRDTVVTSACSLQTEGSLSTRKRSRDPEEEL

SEQ ID NO: 14803 - protein, 406 aa, Homo sapiens
MESKAWESNNEDLLSSSGVTSNGGSSSSFFVSSIRGTIIENTSSAGTLTQVPFFPKYEVELDSPRKIIPSPGKEHFERVLEEYSHQVKDLQRRLNESNELHEKQKFYLRQSVIDLQTKLQEMQMERDAMADIRRRESQSQEDLRNQLQNTVHELEAAKCLKEDMLKDSNTQIEQLRKMMLSHEGVLQEIRSILVDFEEASGKKICEHDSMSTLHFRSLGSAISKILRELDTEISYLKGRIFPVEDQLEALKSESQNKIELLLQQHQDRIEQLISEHEVEITGLTEKASSARSQANSIQSQMEIIQEQARNQNSMYMRQLSDLESTVSQLRSELREAKRMYEDKENLQNSPLRIWTSRSCHYWLCRFGFTLNFRFLTTKISPDVDSAFIFTTLKAVGAEFCIKKVMI

SEQ ID NO: 14804 - protein, 604 aa, Homo sapiens
MGPGARLAALLAVLALGTGDPERAAARGDTFSALTSVARALAPERRLLGLLRRYLRGEEARLRDLTRFYDKVLSLHEDSTTPVANPLLAFTLIKRLQSDWRNVVHSLEASENIRALKDGYEKVEQDLPAFEDLEGAARALMRLQDVYMLNVKGLARGVFQRVTGSAITDLYSPKRLFSLTGDDCFQVGKVAYDMGDYYHAIPWLEEAVSLFRGSYGEWKTEDEASLEDALDHLAFAYFRAGNVSCALSLSREFLLYSPDNKRMARNVLKYERLLAESPNHVVAEAVIQRPNIPHLQTRDTYEGLCQTLGSQPTLYQIPSLYCSYETNSNAYLLLQPIRKEVIHLEPYIALYHDFVSDSEAQKIRELAEPWLQRSVVASGEKQLQVEYRISKSAWLKDTVDPKLVTLNHRIAALTGLDVRPPYAEYLQVVNYGIGGHYEPHFDHATSPSSPLYRMKSGNRVATFMIYLSSVEAGGATAFIYANLSVPVVRHCFGGTCTGVVKGTVTHFMLAVLSWWEISGWPTSGYMSMDRNSADPAAPALKTELLAERSWWSPVAFQRSQEPKAGVGEEKAEQPPGRRPCQLCLCLANQRQGRGCYQGTLRMYI

SEQ ID NO: 14805 - protein, 251 aa, Homo sapiens
MMRRTLENRNAQTKQLQTAVSNVEKHFGELCQIFAAYVRKTARLRDKADLLVNEINAYAATETPHLKLGLMNFADEFAKLQDYRQAEVERLEAKVVEPLKTYGTIVKMKRDDLKATLTARNREAKQLTQLERTRQRNPSDRHVISQAETELQRAAMDASRTSRHLEETINNFERQKMKDIKVFRNSLYAPDYSSRLDIVRANSKSPLQRSLSAKCVSGTGQVSTCRLRKDQQAEDDEDDELDVTEEENFLK

SEQ ID NO: 14806 - protein, 1162 aa, Homo sapiens
MSVACVLKRKAVLWQDSFSPHLKHHPQEPANPNMPVVLTSGTGSQAQPQPAANQALAAGTHSSPVPGSIGVAGRSQDDAMVDYFFQRQHGEQLGGGGSGGGGYNNSKHRWPTGDNIHAEHQVRSMDELNHDFQALALEGRAMGEQLLPGKKFWETDESSKDGPKGIFLGDQWRDSAWGTSDHSVSQPIMVQRRPGQSFHVNSEVNSVLSPRSESGGLGVSMVEYVLSSSPGDSCLRKGGFGPRDADSDENDKGEKKNKGTFDGDKLGDLKEEGDVMDKTNGLPVQNGIDADVKDFSRTPGNCQNSANEVDLLGPNQNGSEGLAQLTSTNGAKPVEDFSNMESQSVPLDPMEHVGMEPLQFDYSGTQVPVDSAAATVGLFDYNSQQQLFQRPNALAVQQLTAAQQQQYALAAAHQPHIAGLAPAAFVPNPYIISAAPPGTDPYTAGLAAAATLGPAVVPHQYYGVTPWGVYPASLFQQQAAAAAAATNSANQQTTPQAQQGQQQVLRGGASQRPLTPNQNQQGQQTDPLVAAAAVNSALAFGQGLAAGMPGYPVLAPAAYYDQTGALVVNAGARNGLGAPVRLVAPAPVIISSSAAQAGTQQPQPQPQQQPNNNLASSSFYGNNSLNSNSQSSSLFSQGSAQPANTSLGFGSSSSLGATLGSALGGFGTAVANSNTGSGSRRDSLTGSSDLYKRTSSSLTPIGHSFYNGLSFSSSPGPVGMPLPSQGPGHSQTPPPSLSSHGSSSSLNLGGLTNGSGRYISAAPGAEAKYRSASSASSLFSPSSTLFSSSRLRYGMSDVMPSGRSRLLEDFRNNRYPNLQLREIAGHIMEFSQDQHGSRFIQLKLERATPAERQLVFNEILQAAYQLMVDVFGNYVIQKFFEFGSLEQKLALAERIRGHVLSLALQMYGCRVIQKALEFIPSDQQVINEMVRELDGHVLKCVKDQNGNHVVQKCIECVQPQSLQFIIDAFKGQVFALSTHPYGCRVIQRILEHCLPDQTLPILEELHQHTEQLVQDQYGNYVIQHVLEHGRPEDKSKIVAEIRGNVLVLSQHKFASNVVEKCVTHASRTERAVLIDEVCTMNDGPHSALYTMMKDQYANYVVQKMIDVAEPGQRKIVMHKIRPHIATLRKYTYGKHILAKLEKYYMKNGVDLGPICGPPNGII

SEQ ID NO: 14807 - protein, 219 aa, Homo sapiens
GISLDPEAAIGVTKRPPPKWVDGVDEIQYDVGRIKQKMKELASLHDKHLNRPTLDDSSEEEHAIEITTQEITQLFHRCQRAVQALPSRARACSEQEGRLLGNVVASLAQALQELSTSFRHAQSGYLKRMKNREERSQHFFDTSVPLMDDGDDNTLYHRGTVLDRIDYNVEQSCIKTEDGLKQLHKAEQYQKKNRKMLVILILFVIIIVLIVVLVGVKSR

SEQ ID NO: 14808 - protein, 389 aa, Homo sapiens
MADPRDKALQDYRKKLLEHKEIDGRLKELREQLKELTKQYEKSENDLKALQSVGQIVGEVLKQLTEEKFIVKATNGPRYVVGCRRQLDKSKLKPGTRVALDMTTLTIMRYLPREVDPLVYNMSHEDPGNVSYSEIGGLSEQIRELREVIELPLTNPELFQRVGIIPPKGCLLYGPPGTGKTLLARAVASQLDCNFLKVVSSSIVDKYIGESARLIREMFNYARDHQPCIIFMDEIDAIGGRRFSEGTSADREIQRTLMELLNQMDGFDTLHRVKMIMATNRPDTLDPALLRPGRLDRKIHIDLPNEQARLDILKIHAGPITKHGEIDYEAIVKLSDGFNGADLRNVCTEAGMFAIRADHDFVVQEDFMKAVRKVADSKKLESKLDYKPV

SEQ ID NO: 14809 - protein, 352 aa, Homo sapiens
MVKSKWGLALAAVVTVLSSLLMSVGLCTLFGLTPTLNGGEIFPYLVVVIGLENVLVLTKSVVSTPVDLEVKLRIAQGLSSESWSIMKNMATELGIILIGYFTLVPAIQEFCLFAVVGLVSDFFLQMLFFTTVLSIDIRRMELADLNKRLPPEACLPSAKPVGQPTRYERQLAVRPSTPHTITLQPSSFRNLRLPKRLRVVYFLAPTGAHTCWALGSRTQGPRWGAGPWRRHAVQGGGAGPGHRHRLGAAAALPLPRAMPAQLRAAGWWARAAEARGAALRRLRLCATRDGDRAACAARPPHGHRVPGQRRHAAGELLPGRPRLRVGRADRGLPNAHSAPRQAAPGQWRGQRA

SEQ ID NO: 14810 - protein, 417 aa, Homo sapiens
MKWVTFISLLFLFSSAYSRGVFRRDAHKSEVAHRFKDLGEENFKALAVARLSQRFPKAEFAEVSKLVTDLTKVHTECCHGDLLECADDRADLAKYICENQDSISSKLKECCEKPLLEKSHCIAEVENDEMPADLPSLAADFVESKDVCKNYAEAKDVFLGMFLYEYARRHPDYSVVLLLRLAKTYETTLEKCCAAADPHECYAKVFDEFKPLVEEPQNLIKQNCELFEQLGEYKFQNALLVRYTKKVPQVSTPTLVEVSRNLGKVGSKCCKHPEAKRMPCAEDYLSVVLNQLCVLHEKTPVSDRVTKCCTESLVNRRPCFSALEVDETYVPKEFNAETFTFHADICTLSEKERQIKKQTALVELVKHKPKATKEQLKAVMDDFAAFVEKCCKADDKETCFAEEGKKLVAASQAALGL

SEQ ID NO: 14811 - protein, 506 aa, Homo sapiens
MDADPYNPVLPTNRASAYFRLKKFAVAESDCNLAVALNRSYTKAYSRRGAARFALQKLEEAKKDYERVLELEPNNFEATNELRKISQALASKENSYPKEADIVIKSTEGERKQIEAQQNKQQAISEKDRGNGFFKEGKYERAIECYTRGIAADGANALLPANRAMAYLKIQKYEEAEKDCTQAILLDGSYSKAFARRGTARTFLGKLNEAKQDFETVLLLEPGNKQAVTELSKIKKELIEKGHWDDVFLDSTQRQNVVKPIDNPPHPGSTKPLKKVIIEETGNLIQTIDVPDSTTAAAPENNPINLANVIAATGTTSKKNSSQDDLFPTSDTPRAKVLKIEEVSDTSSLQPQASLKQDVCQSYSEKMPIEIEQKPAQFATTVLPPIPANSFQLESDFRQLKSSPDMLYQYLKQIEPSLYPKLFQKNLDPDVFNQIVKILHDFYIEKEKPLLIFEILQRLSELKRFDMAVMFMSETEKKIARALFNHIDKSGLKDSSVEELKKRYGG

SEQ ID NO: 14812 - protein, 601 aa, Homo sapiens
LFDTDTWSLQIRKTGAQTATDFPHAIRIWYKTKPEGRSVTWTSDQSGRPCVYTVGSPINNRALFPCQEPPVAMSTWQATVRAAASFVVLMSGENSAKPTQLWEECSSWYYYVTMPMPASTFTIAVGCWTEMKMETWSSNDLATERPFSPSEANFRHVGVCSHMEYPCRFQNASATTQEIIPHRVFAPVCLTGACQETLLRLIPPCLSAAHSVLGAHPFSRLDVLIVPANFPSLGMASPHIMFLSQSILTGGNHLCGTRLCHEIAHAWFGLAIGARDWTEEWLSEGFATHLEDVFWATAQQLAPYEAREQQELRACLRWRRLQDEMQCSPEEMQVLRPSKDKTGHTSDSGASVIKHGLNPEKIFMQVHYLKGYFLLRFLAKRLGDETYFSFLRKFVHTFHGQLILSQDFLQMLLENIPEEKRLELSVENIYQDWLESSGIPKPLQRERRAGAECGLARQVRAEVTKWIGVNRRPRKRKRREKEEVFEKLLPDQLVLLLEHLLEQKTLSPRTLQSLQRTYHLQDQDAEVRHRWCELIVKHKFTKAYKSVERFLQEDQAMGVYLYGELMVSEDARQQQLARRCFERTKEQMDRSSAQVVAEMLF

SEQ ID NO: 14813 - protein, 433 aa, Homo sapiens
MGCDRNCGLIAGAVIGAVLAVFGGILMPVGDLLIQKTIKKQVVLEEGTIAFKNWVKTGTEVYRQFWIFDVQNPQEVMMNSSNIQVKQRGPYTYRVRFLAKENVTQDAEDNTVSFLQPNGAIFEPSLSVGTEADNFTVLNLAVAAASHIYQNQFVQMILNSLINKSKSSMFQVRTLRELLWGYRDPFLSLVPYPVTTTVGLFYPYNNTADGVYKVFNGKDNISKVAIIDTYKGKRSIYAVFESDVNLKGIPVYRFVLPSKAFASPVENPDNYCFCTEKIISKNCTSYGVLDISKCKEGRPVYISLPHFLYASPDVSEPIDGLNPNEEEHRTYLDIEPITGFTLQFAKRLQVNLLVKPSEKIQVLKNLKRNYIVPILWLNETGTIGDEKANMFRSQVTGKINLLGLIEMILLSVGVVMFVAFMISYCACRSKTIK

SEQ ID NO: 14814 - protein, 668 aa, Homo sapiens
MEHIQGAWKTISNGFGFKDAVFDGSSCISPTIVQQFGYQRRASDDGKLTDPSKTSNTIRVFLPNKQRTVVNVRNGMSLHDCLMKALKVRGLQPECCAVFRLLHEHKGKKARLDWNTDAASLIGEELQVDFLDHVPLTTHNFARKTFLKLAFCDICQKFLLNGFRCQTCGYKFHEHCSTKVPTMCVDWSNIRQLLLFPNSTIGDSGVPALPSLTMRRMRESVSRMPVSSQHRYSTPHAFTFNTSSPSSEGSLSQRQRSTSTPNVHMVSTTLPVDSRMIENNNLSASPRAWSRRFCLRGRDAIRSHSESASPSALSSSPNNLSPTGWSQPKTPVPAQRERAPVSGTQEKNKIRPRGQRDSSYYWEIEASEVMLSTRIGSGSFGTVYKGKWHGDVAVKILKVVDPTPEQFQAFRNEVAVLRKTRHVNILLFMGYMTKDNLAIVTQWCEGSSLYKHLHVQETKFQMFQLIDIARQTAQGMDYLHAKNIIHRDMKSNNIFLHEGLTVKIGDFGLATVKSRWSGSQQVEQPTGSVLWMAPEVIRMQDNNPFSFQSDVYSYGIVLYELMTGELPYSHINNRDQIIFMVGRGYASPDLSKLYKNCPKAMKRLVADCVKKVKEERPLFPQILSSIELLQHSLPKINRSASEPSLHRAAHTEDINACTLTTSPRLPVF

SEQ ID NO: 14815 - protein, 437 aa, Homo sapiens
MKKGIRYETSRKTSYIFQQPQHGPWQTRMRKISNHGSLRVAKVAYPLGLCVGVFIYVAYIKWHRATATQAFFSITRAAPGARWGQQAHSPLGTAADGHEVFYGIMFDAGSTGTRVHVFQFTRPPRETPTLTHETFKALKPGLSAYADDVEKSAQGIRELLDVAKQDIPFDFWKATPLVLKATAGLRLLPGEKAQKLLQKVKKVFKASPFLVGDDCVSIMNGTDEGVSAWITINFLTGSLKTPGGSSVGMLDLGGGSTQIAFLPRVEGTLQASPPGYLTALRMFNRTYKLYSYSYLGLGLMSARLAILGGVEGQPAASLHELCAARVSEVLQNRVHRTEEVKHVDFYAFSYYYDLAAGVGLIDAEKGGSLVVGDFEIAAKYGGSHLEREGTCLIPSVSDPGDTAAEQPLLMHGPHLRQPATPGVRLSQEQSAEAHSEN

SEQ ID NO: 14816 - protein, 532 aa, Homo sapiens
MGWLEELNWQLHIFLLILLSMHTRANFLDNMLLRSAGKLNVGTKKEDGESTAPTPRPKVLRCKCHHHCPEDSVNNICSTDGYCFTMIEEDDSGLPVVTSGCLGLEGSDFQCRDTPIPHQRRSIECCTERNECNKDLHPTLPPLKNRDFVDGPIHHRALLISVTVCSLLLVLIILFCYFRYKRQETRPRYSIGLEQDETYIPPGESLRDLIEQSQSSGSGSGLPLLVQRTIAKQIQMVKQIGKGRYGEVWMGKWRGEKVAVKVFFTTEEASWFRETEIYQTVLMRHENILGFIAADIKGTGSWTQLYLITDYHENGSLYDYLKSTTLDAKSMLKLAYSSVSGLCHLHTEIFSTQGKPAIAHRDLKSKNILVKKNGTCCIADLGLAVKFISDTNEVDIPPNTRVGTKRYMPPEVLDESLNRNHFQSYIMADMYSFGLILWEVARRCVSGGIVEEYQLPYHDLVPSDPSYEDMREIVCIKKLRPSFPNRWSSDECLRQMGKLMTECWAHNPASRLTALRVKKTLAKMSESQDIKL

SEQ ID NO: 14817 - protein, 118 aa, Homo sapiens
MKSQGQHWYSSSDKNCKVSFREKLLIIDSNLGVQDVENLKFLCIGLVPNKKLEKSSSASDVFEHLLAEDLLSEEDPFFLAELLYIIRQKKLLQHLNCTKEEVERLLPTRQRVSLFRPP

SEQ ID NO: 14818 - protein, 695 aa, Homo sapiens
MASTRSIELEHFEERDKRPRPGSRRGAPSSSGGSSSSGPKGNGLIPSPAHSAHCSFYRTRTLQALSSEKKAKKARFYRNGDRYFKGLVFAISSDRFRSFDALLIELTRSLSDNVNLPQGVRTIYTIDGSRKVTSLDELLEGESYVCASNEPFRKVDYTKNINPNWSVNIKGGTSRALAAASSVKSEVKESKDFIKPKLVTVIRSGVKPRKAVRILLNKKTAHSFEQVLTDITEAIKLDSGVVKRLCTLDGKQVTCLQDFFGDDDVFIACGPEKFRYAQDDFVLDHSECRVLKSSYSRSSAVKYSGSKSPGPSRRSKSPASVNGTPSSQLSTPKSTKSSSSSPTSPGSFRGLKISAHGRSSSNVNGGPELDRCISPEGVNGNRCSESSTLLEKYKIGKVIGDGNFAVVKECIDRSTGKEFALKIIDKAKCCGKEHLIENEVSILRRVKHPNIIMLVEEMETATELFLVMELVKGGDLFDAITSSTKYTERDGSAMVYNLANALRYLHGLSIVHRDIKPENLLVCEYPDGTKSLKLGDFGLATVVEGPLYTVCGTPTYVAPEIIAETGYGLKVDIWAAGVITYILLCGFPPFRSENNLQEDLFDQILAGKLEFPAPYWDNITDSAKELISQMLQVNVEARCTAGQILSHPWVSDDASQENNMQAEVTGKLKQHFNNALPKQNSTTTGVSVIMFDLTV

SEQ ID NO: 14819 - protein, 243 aa, Homo sapiens
RRANLIIPYPETDNWYLSLQLMCPENAEDCEQAVVHVETTLYLVPCLNDCGPYGQCLLLRRHSYLYASCSCKAGWRGWSCTDNSTAQTVAQQRAATLLLTLSNLMFLAPIAVSVRRFFLVEASVYAYTMFFSTFYHACDQPGEAVLCILSYDTLQYCDFLGSGAAIWVTILCMARLKTVLKYVLFLLGTLVIAMSLQLDRRGMWNMLGPCLFAFVIMASMWVRSRAGWHCCPGARRREPGPLL

SEQ ID NO: 14820 - protein, 164 aa, Homo sapiens
MRLWNKISRWMLGCYDALQKKYVYTNPEDPQTISECYQFKFKYTNNGPLMDFISKNQSNESSMLSTDTKKASILLIRKIYILMQNLGPLPNDVCLTMKLFYYDEVTPPDYQPPGFKDGDCEGVIFEGEPMYLNVGEVSTPFHIFKVKVTTERERMENIDSTILS

SEQ ID NO: 14821 - protein, 1833 aa, Homo sapiens
MREKEQEREEQLMEDKKRKKEDKKKKEATQKVTEQKTKVPEVTKPSLSQPTAASPIGSSPSPPVNGGNNAKRVAVPNGQPPSAARYMPREVPPRFRCQQDHKVLLKRGQPPPPSCMLLGGGAGPPPCTAPGANPNNAQVTGALLQSESGTAPDSTLGGAAASNYANSTWGSGASSNNGTSPNPIHIWDKVIVDGSDMEEWPCIASKDTESSSENTTDNNSASNPGSEKSTLPGSTTSNKGKGSQCQSASSGNECNLGVWKSDPKAKSVQSSNSTTENNNGLGNWRNVSGQDRIGPGSGFSNFNPNSNPSAWPALVQEGTSRKGALETDNSNSSAQVSTVGQTSREQQSKMENAGVNFVVSGREQAQIHNTDGPKNGNTNSLNLSSPNPMENKGMPFGMGLGNTSRSTDAPSQSTGDRKTGSVGSWGAARGPSGTDTVSGQSNSGNNGNNGKEREDSWKGASVQKSTGSKNDSWDNNNRSTGGSWNFGPQDSNDNKWGEGNKMTSGVSQGEWKQPTGSDELKIGEWSGPNQPNSSTGAWDNQKGHPLPENQGNAQAPCWGRSSSSTGSEVGGQSTGSNHKAGSSDSHNSGRRSYRPTHPDCQAVLQTLLSRTDLDPRVLSNTGWGQTQIKQDTVWDIEEVPRPEGKSDKGTEGWESAATQTKNSGGWGDAPSQSNQMKSGWGELSASTEWKDPKNTGGWNDYKNNNSSNWGGGRPDEKTPSSWNENPSKDQGWGGGRQPNQGWSSGKNGWGEEVDQTKNSNWESSASKPVSGWGEGGQNEIGTWGNGGNASLASKGGWEDCKRSPAWNETGRQPNSWNKQHQQQQPPQQPPPPQPEASGSWGGPPPPPPGNVRPSNSSWSSGPQPATPKDEEPSGWEEPSPQSISRKMDIDDGTSAWGDPNSYNYKNVNLWDKNSQGGPAPREPNLPTPMTSKSASVWSKSTPPAPDNGTSAWGEPNESSPGWGEMDDTGASTTGWGNTPANAPNAMKPNSKSMQDGWGESDGPVTGARHPSWEEEEDGGVWNTTGSQGSASSHNSASWGQGGKKQMKCSLKGGNNDSWMNPLAKQFSNMGLLSQTEDNPSSKMDLSVGSLSDKKFDVDKRAMNLGDFNDIMRKDRSGFRPPNSKDMGTTDSGPYFEKLTLPFSNQDGCLGDEAPCSPFSPSPSYKLSPSGSTLPNVSLGAIGTGLNPQNFAARQGGSHGLFGNSTAQSRGLHTPVQPLNSSPSLRAQVPPQFISPQVSASMLKQFPNSGLSPGLFNVGPQLSPQQIAMLSQLPQIPQFQLACQLLLQQQQQQQLLQNQRKISQAVRQQQEQQLARMVSALQQQQQQQQRQPGMKHSPSHPVGPKPHLDNMVPNALNVGLPDLQTKGPIPGYGSGFSSGGMDYGMVGGKEAGTESRFKQWTSMMEGLPSVATQEANMHKNGAIVAPGKTRGGSPYNQFDIIPGDTLGGHTGPAGDSWLPAKSPPTNKIGSKSSNASWPPEFQPGVPWKGIQNIDPESDPYVTPGSVLGGTATSPIVDTDHQLLRDNTTGSNSSLNTSLPSPGAWPYSASDNSFTNVHSTSAKFPDYKSTWSPDPIGHNPTHLSNKMWKNHISSRNTTPLPRPPPGLTNPKPSSPWSSTAPRSVRGWGTQDSRLASASTWSDGGSVRPSYWLVLHNLTPQIDGSTLRTICMQHGPLLTFHLNLTQGTALIRYSTKQEAAKAQTALHMCVLGNTTILAEFATDDEVSRFLAQAQPPTPAATPSAPAAGWQSLETGQNQSDPVGPALNLFGGSTGLGQWSSSAGGSSGADLAGASLWGPPNYSSSLWGVPTVEDPHRMGSPAPLLPGDLLGGGSDSI

SEQ ID NO: 14822 - protein, 1201 aa, Homo sapiens [sequence omitted]

SEQ ID NO: 14823 - protein, 270 aa, Homo sapiens
MTLSTLCVLGPSEPTESKVMCFHPWSDVTLPLMSVPEIRAVVDAWASVTEELGAQYPWVQIFENKGAMMGCSNPHPHCQVWASSFLPDIAQREERSQQAYKSQHGEPLLMEYSRQELLRKERLVLTSEHWLVLVPFWATWPYQTLLLPRRHVRRLPELTPAERDDLASIMKKLLTKYDNLFETSFPYSMGWHGAPTGSEAGANWNHWQLHAHYYPPLLRSATVRKFMVGYEMLAQAQRDLTPEQAAERLRALPEVHYHLGQKDRETATIA

SEQ ID NO: 14824 - protein, 2081 aa, Homo sapiens
MGCTTSVILFKGIRTVFERNCAYMCKQQGENNALEYTAYNWTKEDSELLISSWLAKPKLIEPLDYENVIVQKKTQILNDCLREMLLFPYDDFQTAILRRQGRYICSTVPAKAEEEAQSLFVTECIKTYNSDWHLVNYKYEDYSGEFRQLPNKVVKLDKLPVHVYEVDEEVDKDEDAASLGSQKGGITKHGWLYKGNMNSAISVTMRSFKRRFFHLIQLGDGSYNLNFYKDEKISKEPKGSIFLDSCMGVVQNNKVRRFAFELKMQDKSSYLLAADSEVEMEEWITILNKILQLNFEAAMQEKRNGDSHEDDEQSKLEGSGSGLDSYLPELAKSAREAEIKLKSESRVKLFYLDPDAQKLDFSSAEPEVKSFEEKFGKRILVKCNDLSFNLQCCVAENEEGPTTNVEPFFVTLSLFDIKYNRKISADFHVDLNHFSVRQMLATTSPALMNGSGQSPSVLKGILHEAAMQYPKQGIFSVTCPHPDIFLVARIEKVLQGSITHCAEPYMKSSDSSKVAQKVLKNAKQACQRLGQYRMPFAWAARTLFKDASGNLDKNARFSAIYRQDSNKLSNDDMLKLLADFRKPEKMAKLPVILGNLDITIDNVSSDFPNYVNSSYIPTKQFETCSKTPITFEVEEFVPCIPKHTQPYTIYTNHLYVYPKYLKYDSQKSFAKARNIAICIEFKDSDEEDSQPLKCIYGRPGGPVFTRSAFAAVLHHHQNPEFYDEIKIELPTQLHEKHHLLLTFFHVSCDNSSKGSTKKRDVVETQVGYSWLPLLKDGRVVTSEQHIPVSANLPSGYLGYQELGMGRHYGPEIKWVDGGKPLLKISTHLVSTVYTQDQHLHNFFQYCQKTESGAQALGNELVKYLKSLHAMEGHVMIAFLPTILNQLFRVLTRATQEEVAVNVTRVIIHVVAQCHEEGLESHLRSYVKYAYKAEPYVASEYKTVHEELTKSMTTILKPSADFLTSNKLLKYSWFFFDVLIKSMAQHLIENSKVKLLRNQRFPASYHHAVETVVNMLMPHITQKFRDNPEASKNANHSLAVFIKRCFTFMDRGFVFKQINNYISCFAPGDPKTLFEYKFEFLRVVCNHEHYIPLNLPMPFGKGRIQRYQDLQLDYSLTDEFCRNHFLVGLLLREVGTALQEFREVRLIAISVLKNLLIKHSFDDRYASRSHQARIATLYLPLFGLLIENVQRINVRDVSPFPVNAGMTVKDESLALPAVNPLVTPQKGSTLDNSLHKDLLGAISGIASPYTTSTPNINSVRNADSRGSLISTDSGNSLPERNSEKSNSLDKHQQSSTLGNSVVRCDKLDQSEIKSLLMCFLYILKSMSDDALFTYWNKASTSELMDFFTISEVCLHQFQYMGKRYIARTGMMHARLQQLGSLDNSLTFNHSYGHSDADVLHQSLLEANIATEVCLTALDTLSLFTLAFKNQLLADHGHNPLMKKVFDVYLCFLQKHQSETALKNVFTALRSLIYKFPSTFYEGRADMCAALCYEILKCCNSKLSSIRTEASQLLYFLMRNNFDYTGKKSFVRTHLQVIISVSQLIADVVGIGGTRFQQSLSIINNCANSDRLIKHTSFSSDVKDLTKRIRTVLMATAQMKEHENDPEMLVDLQYSLAKSYASTPELRKTWLDSMARIHVKNGDLSEAAMCYVHVTALVAEYLTRKGVFRQGCTAFRVITPNIDEEASMMEDVGMQDVHFNEDVLMELLEQCADGLWKAERYELIADIYKLIIPIYEKRRDFERLAHLYDTLHRAYSKVTEVMHSGRRLLGTYFRVAFFGQGFFEDEDGKEYIYKEPKLTPLSEISQRLLKLYSDKFGSENVKMIQDSGKVNPKDLDSKYAYIQVTHVIPFFDEKELQERKTEFERSHNIRRFMFEMPFTQTGKRQGGVEEQCKRRTILTAIHCFPYVKKRIPVMYQHHTDLNPIEVAIDEMSKKVAELRQLCSSAEVDMIKLQLKLQGSVSVQVNAGPLAYARAFLDDTNTKRYPDNKVKLLKEVFRQFVEACGQALAVNERLIKEDQLEYQEEMKANYREMAKELSEIMHEQICPLEEKTSVLPNSLHIFNAISGTPTSTMVHGMTSSSSVV

SEQ ID NO: 14825 - protein, 399 aa, Homo sapiens
MIPTFTALLCLGLSLGPRTHMQAGPLPKPTLWAEPGSVISWGNSVTIWCQGTLEAREYRLDKEESPAPWDRQNPLEPKNKARFSIPSMTEDYAGRYRCYYRSPVGWSQPSDPLELVMTGAYSKPTLSALPSPLVTSGKSVTLLCQSRSPMDTFLLIKERAAHPLLHLRSEHGAQQHQAEFPMSPVTSVHGGTYRCFSSHGFSHYLLSHPSDPLELIVSGSLEGPRPSPTRSVSTAGPEDQPLMPTGSVPHSGLRRHWEVLIGVLVVSILLLSLLLFLLLQHWRQGKHRTLAQRQADFQRPPGAAEPEPKDGGLQRRSSPAADVQGENFCAAVKNTQPEDGVEMDTRQSPHDEDPQAVTYAKVKHSRPRREMASPPSPLSGEFLDTKDRQAEEDRQMDTE

SEQ ID NO: 14826 - protein, 540 aa, Homo sapiens
MPFAEDKTYKYICRNFSNFCNVDVVEILPYLPCLTARDQDRLRATCTLSGNRDTLWHLFNTLQRRPGWVEYFIAALRGCELVDLADEVASVYQSYQPRTSDRPPDPLEPPSLPAERPGPPTPAAAHSIPYNSCREKEPSYPMPVQETQAPESPGENSEQALQTLSPRAIPRNPDGGPLESSSDLAALSPLTSSGHQEQDTELGSTHTAGATSSLTPSRGPVSPSVSFQPLARSTPRASRLPGPTGSVVSTGTSFSSSSPGLASAGAAEGKQGAESDQAEPIICSSGAEAPANSLPSKVPTTLMPVNTVALKVPANPASVSTVPSKLPTSSKPPGAVPSNALTNPAPSKLPINSTRAGMVPSKVPTSMVLTKVSASTVPTDGSSRNEETPAAPTPAGATGGSSAWLDSSSENRGLGSELSKPGVLASQVDSPFSGCFEDLAISASTSLGMGPCHGPEENEYKSEGTFGIHVAENPSIQLLEGNPGPPADPDGGPRPQADRKFQEREVPCHRPSPGALWLQVAVTGVLVVTLLVVLYRRRLH

SEQ ID NO: 14827 - protein, 254 aa, Homo sapiens
MNEKSCSFHSKEELRDGQGERLSAGYSPSYDKDKSVLAFRGIPISELKNHGILQALTTEAYEWEPRVVSTEVVRAQEEWEAVDTIQPETGSQASSEQPGQLISFSEALQHFQTVDLSPFKKRIQPTIRRTGLAALRHYLFGPPKLHQRLREERDLVLTIAQCGLDSQDPVHGRVLQTIYKKLTGSKFDCALHGNHWEDLGFQGANPATDLRGAGFLALLHLLYLVMDSKTLPMAQEIFRLSRHHIQIERNQGKG

SEQ ID NO: 14828 - protein, 434 aa, Homo sapiens
GIPLLWPCLGATENSQTKKVKQPVRSHLRVKRGWVWNQFFVPEEMNTTSHHIGQLRSDLDNGNNSFQYKLLGAGAGSTFIIDERTGDIYAIQKLDREERSLYILRAQVIDIATGRAVEPESEFVIKVSDINDNEPKFLDEPYEAIVPEMSPEGTLVIQVTASDADDPSSGNNARLLYSLLQGQPYFSVEPTTGVIRISSKMDRELQDEYWVIIQAKDMIGQPGALSGTTSVLIKLSDVNDNKPIFKESLYRLTVSESAPTGTSIGTIMAYDNDIGENAEMDYSIEEDDSQTFDIITNHETQEGIVILKKKVDFEHQNHYGIRAKVKNHHVPEQLMKYHTEASTTFIKIQVEDVDEPPLFLLPYYVFEVFEETPQGSFVGVVSATDPDNRKSPIRYSITRSKVFNINDNGTITTSNSLDREISAWYNLSITATEK

SEQ ID NO: 14829 - protein, 129 aa, Homo sapiens
MEERGDSEPTPGCSGLGPGGVRGFGDGGGAPSWAPEDAWMGTHPKYLEMMELDIGDATQVYVAFLVYLDLMESKSWHEVNCVGLPELQLICLVGTEIEGEGLQTVVPTPITASLSHNRIFLLEDDIHVS

SEQ ID NO: 14830 - protein, 3052 aa, Homo sapiens
MAFSIDRALNVALGNPSSTAQHVFKVSLVSGMPFYGYHEKERHFMKIYLYNPTMVKRICELLQSGAIMNKFYQPHEAHIPYLLQLFIDYNLYGMNLINLAAVKFRKARRKSNTLHATGSCKNHLSGNSLADTLFRWEQDEIPSSLILEGVEPQSTCELEVDAVAADILNRLDIEAQIGGNPGLQAIWEDEKQRRRNRNETSQMSQPESQDHRFVPATESEKKFQKRLQEILKQNDFSVTLSGSVDYSDGSQEFSAELTLHSEVLSPEMLQCTPANMVEVHKDKESSKGHTRHKVEEALINEEAILNLMENSQTFQPLTQRLSESPVFMDSSPDEALVHLLAGLESDGYRGERNRMPSPCRSFGNNKYPQNSDDEENEPQIEKEEMELSLVMSQRWDSNIEEHCAKKRSLCRNTHRSSTEDDDSSSGEEMEWSDNSLLLASLSIPQLDGTADENSDNPLNNENSRTHSSVIATSKLSVKPSIFHKDAATLEPSSSAKITFQCKHTSALSSHVLNKEDLIEDLSQTNKNTEKGLDNSVTSFTNESTYSMKYPGSLSSTVHSENSHKENSKKEILPVSSCESSIFDYEEDIPSVTRQVPSRKYTNIRKIEKDSPFIHMHRHPNENTLGKNSFNFSDLNHSKNKVSSEGNEKGNSTALSSLFPSSFTENCELLSCSGENRTMVHSLNSTADESGLNKLKIRYEEFQEHKTEKPSLSQQAAHYMFFPSVVLSNCLTRPQKLSPVTYKLQPGNKPSRLKLNKRKLAGHQETSTKSSETGSTKDNFIQNNPCNSNPEKDNALASDLTKTTRGAFENKTPTDGFIDCHFGDGTLETEQSFGLYGNKYTLRAKRKVNYETEDSESSFVTHNSKISLPHPMEIGESLDGTLKSRKRRKMSKKLPPVIIKYIIINRFRGRKNMLVKLGKIDSKEKQVILTEEKMELYKKLAPLKDFWPKVPDSPATKYPIYPLTPKKSHRRKSKHKSAKKKTGKQQRTNNENIKRTLSFRKKRSHAILSPPSPSYNAETEDCDLNYSDVMSKLGFLSERSTSPINSSPPRCWSPTDPRAEEIMAAAEKEAMLFKGPNVYKKTVNSRIGKTSRARAQIKKSKAKLANPSIVTKKRNKRNQTNKLVDDGKKKPRAKQKTNEKGTSRKHTTLKDEKIKSQSGAEVKFVLKHQNVSEFASSSGGSQLLFKQKDMPLMGSAVDHPLSASLPTGINAQQKLSGCFSSFLESKKSVDLQTFPSSRDDLHPSVVCNSIGPGVSKINVQRPHNQSAMFTLKESTLIQKNIFDLSNHLSQVAQNTQISSGMSSKIEDNANNIQRNYLSSIGKLSEYRNSLESKLDQAYTPNFLHCKDSQQQIVCIAEQSKHSETCSPGNTASEESQMPNNCFVTSLRSPIKQIAWEQKQRGFILDMSNFKPERVKPRSLSEAISQTKALSQCKNRNVSTPSAFGEGQSGLAVLKELLQKRQQKAQNANTTQDPLSNKHQPNKNISGSLEHNKANKRTRSVTSPRKPRTPRSTKQKEKIPKLLKVDSLNLQNSSQLDNSVSDDSPIFFSDPGFESCYSLEDSLSPEHNYNFDINTIGQTGFCSFYSGSQFVPADQNLPQKFLSDAVQDLFPGQAIEKNEFLSHDNQKCDEDKHHTTDSASWIRSGTLSPEIFEKSTIDSNENRRHNQWKNSFHPLTTRSNSIMDSFCVQQAEDCLSEKSRLNRSSVSKEVFLSLPQPNNSDWIQGHTRKEMGQSLDSANTSFTAILSSPDGELVDVACEDLELYVSRNNDMLTPTPDSSPRSTSSPSQSKNGSFTPRTANILKPLMSPPSREEIMATLLDHDLSETIYQEPFCSNPSDVPEKPREIGGRLLMVETRLANDLAEFEGDFSLEGLRLWKTAFSAMTQNPRPGSPLRSGQGVVNKGSSNSPKMVEDKKIVIMPCKCAPSRQLVQVWLQAKEEYERSKKLPKTKPTGVVKSAENFSSSVNPDDKPVVPPKMDVSPCILPTTAHTKEDVDNSQIALQAPTTGCSQTASESQMLPPVASASDPEKDEDDDDNYYISYSSPDSPVIPPWQQPISPDSKALNGDDRPSSPVEELPSLAFENFLKPIKDGIQKSPCSEPQEPLVISPINTRARTGKCESLCFHSTPIIQRKLLERLPEAPGLSPLSTEPKTQKLSNKKGSNTDTLRRVLLTQAKNQFAAVNTPQKETSQIDGPSLNNTYGFKVSIQNLQEAKALHEIQNLTLISVELHARTRRDLEPDPEFDPICALFYCISSDTPLPDTEKTELTGVIVIDKDKTVFSQDIRYQTPLLIRSGITGLEVTYAADEKALFHEIANIIKRYDPDILLGYEIQMHSWGYLLQRAAALSIDLCRMISRVPDDKIENRFAAERDEYGSYTMSEINIVGRITLNLWRIMRNEVALTNYTFENVSFHVLHQRFPLFTFRVLSDWFDNKTDLYRWKMVDHYVSRVRGNLQMLEQLDLIGKTSEMARLFGIQFLHVLTRGSQYRVESMMLRIAKPMNYIPVTPSVQQRSQMRAPQCVPLIMEPESRFYSNSVLVLDFQSLYPSIVIAYNYCFSTCLGHVENLGKYDEFKFGCTSLRVPPDLLYQVRHDITVSPNGVAFVKPSVRKGVLPRMLEEILKTRFMVKQSMKAYKQDRALSRMLDARQLGLKLIANVTFGYTSANFSGRMPCIEVGDSIVHKARETLERAIKLVNDTKKWGARVVYGDTDSMFVLLKGATKEQSFKIGQEIAEAVTATNPKPVKLKFEKVYLPCVLQTKKRYVGYMYETLDQKDPVFDAKGIETVRRDSCPAVSKILERSLKLLFETRDISLIKQYVQRQCMKLLEGKASIQDFIFAKEYRGSFSYKPGACVPALELTRKMLTYDRRSEPQVGERVPYVIIYGTPGVPLIQLVRRPVEVLQDPTLRLNATYYITKQILPPLARIFSLIGIDVFSWYHELPRIHKATSSSRSEPEGRKGTISQYFTTLHCPVCDDLTQHGICSKCRSQPQHVAVILNQEIRELERQQEQLVKICKNCTGCFDRHIPCVSLNCPVLFKLSRVNRELSKAPYLRQLLDQF

SEQ ID NO: 14831 - protein, 198 aa, Homo sapiens
VTFMVGEILLLILTICSLAAIFPRAFPKKLVAFSTWIDRTRWARNTWAMLAIFILVMANVVDMLSCLQYYTGPSNATAGMETEGSCLENPKYYNYVAVLSLIATIMLVQVSHMVKLTLMLLVAGAVATINLYAWRPVFDEYDHKRFREHDLPMVALEQMQGFNPGLNGTDSRLPLVPSKYSMTVMVFLMMLSFYYFSR

SEQ ID NO: 14832 - protein, 394 aa, Homo sapiens
MDPVACEDVAVNFTQEEWALLDISQRKLYREVMLETFRNLTSIGKKWKDQNIEYEYQNPRRNFRSLIEGNVNEIKEDSHCGETFTQVPDDRLNFQEKKASPEAKSCDNFVCGEVGIGNSSFNMNIRGDIGHKAYEYQDYAPKPYKCQQPKKAFRYHPSFRTQERNHTGEKPYACKECGKTFISHSGIRRRMVMHSGDGPYKCKFCGKAVHCLRLYLIHERTHTGEKPYECKQCVKSFSYSATHRIHERTHTGEKPYECQQCGKAFHSSSSFQAHKRTHTGGKPYECKQCGKSFSWCHSFQIHERTHTGEKPCECSKCNKAFRSYRSYLRHKRSHTGEKPYQCKECRKAFTYPSSLRRHERTHSAKKPYECKQCGKALSYKFSNTPKNALWRKTL

SEQ ID NO: 14833 - protein, 97 aa, Homo sapiens
MNRLYLTPDGFFFRVHMLALDSSSCNKPCPEFKPGSRYIVMGHIYHKRRQLPTALLQVLRGRLRPGDGLLRSSSSYVKRFNRKREGQIQGAIHTQCI

SEQ ID NO: 14834 - protein, 206 aa, Homo sapiens
MNHLPEDMENALTGSQSSHASLRNIHSINPTQLMARIESYEGREKKGISDVRRTFCLFVTFDLLFVTLLWIIELNVNGGIENTLEKEVMQYDYYSSYFDIFLLAVFRFKVLILAYAVCRLRHWWAIALTTAVTSAFLLAKVILSKLFSQGAFGYVLPIISFILAWIETWFLDFKVLPQEAEEENRLLIVQDASERAALIPGGLSDG

SEQ ID NO: 14835 - protein, 2839 aa, Homo sapiens
MPITQDNAVLHLPLLYQWLQNSLQEGGDGPEQRLCQAAIQKLQEYIQLNFAVDESTVPPDHSPPEMEICTVYLTKELGDTETVGLSFGNIPVFGDYGEKRRGGKKRKTHQGPVLDVGCIWVTELRKNSPAGKSGKVRLRDEILSLNGQLMVGVDVSGASYLAEQCWNGGFIYLIMLRRFKHKAHSTYNGNSSNSSEPGETPTLELGDRTAKKGKRTRKFGVISRPPANKAPEESKGSAGCEVSSDPSTELENGPDPELGNGHVFQLENGPDSLKEVAGPHLERSEVDRGTEHRIPKTDAPLTTSNDKRRFSKGGKTDFQSSDCLAREEVGRIWKMELLKESDGLGIQVSGGRGSKRSPHAIVVTQVKEGGAAHRDGRLSLGDELLVINGHLLVGLSHEEAVAILRSATGMVQLVVASKENSAEDLLRLTSKSLPDLTSSVEDVSSWTDNEDQEADGEEDEGTSSSVQRAMPGTDEPQDVCGAEESKGNLESPKQGSNKIKLKSRLSGGVHRLESVEEYNELMVRNGDPRIRMLEVSRDGRKHSLPQLLDSSSASQEYHIVKKSTRSLSTTQVESPWRLIRPSVISIIGLYKEKGKGLGFSIAGGRDCIRGQMGIFVKTIFPNGSAAEDGRLKEGDEILDVNGIPIKGLTFQEAIHTFKQIRSGLFVLTVRTKLVSPSLTPCSTPTHMSRSASPNFNTSGGASAGGSDEGSSSSLGRKTPGPKDRIVMEVTLNKEPRVGLGIGACCLALENSPPGIYIHSLAPGSVAKMESNLSRGDQILEVNSVNVRHAALSKVHAILSKCPPGPVRLVIGRHPNPKVSEQEMDEVIARSTYQESKEANSSPGLGTPLKSPSLAKKDSLISESELSQYFAHDVPGPLSDFMVAGSEDEDHPGSGCSTSEEGSLPPSTSTHKEPGKPRANSLVTLGSHRASGLFHKQVTVARQASLPGSPQALRNPLLRQRKVGCYDANDASDEEEFDREGDCISLPGALPGPIRPLSEDDPRRVSISSSKGMDVHNQEERPRKTLVSKAISAPLLGSSVDLEESIPEGMVDAASYAANLTDSAEAPKGSPGSWWKKELSGSSSAPKLEYTVRTDTQSPTNTGSPSSPQQKSEGLGSRHRPVARVSPHCKRSEAEAKPSGSQTVNLTGRANDPCDLDSRVQATSVKVTVAGFQPGGAVEKESLGKLTTGDACVSTSCELASALSHLDASHLTENLPKAASELGQQPMTELDSSSDLISSPGKKGAAHPDPSKTSVDTGQVSRPENPSQPASPRVTKCKARSPVRLPHEGSPSPGEKAAAPPDYSKTRSASETSTPHNTRRVAALRGAGPGAEGMTPAGAVLPGDPLTSQEQRQGAPGNHSKALEMTGIHAPESSQEPSLLEGADSVSSRAPQASLSMLPSTDNTKEACGHVSGHCCPGGSRESPVTDIDSFIKELDASAARSPSSQTGDSGSQEGSAQGHPPAGAGGGSSCRAEPVPGGQTSSPRRAWAAGAPAYPQWASQPSVLDSINPDKHFTVNKNFLSNYSRNFSSFHEDSTSLSGLGDSTEPSLSSMYGDAEDSSSDPESLTEAPRASARDGWSPPRSRVSLHKEDPSESEEEQIEICSTRGCPNPPSSPAHLPTQAAICPASAKVLSLKYSTPRESVASPREKAACLPGSYTSGPDSSQPSSLLEMSSQEHETHADISTSQNHRPSCAEETTEVTSASSAMENSPLSKVARHFHSPPIILSSPNMVNGLEHDLLDDETLNQYETSINAAASLSSFSVDVPKNGESVLENLHISESQDLDDLLQKPKMIARRPIMAWFKEINKHNQGTHLRSKTEKEQPLMPARSPDSKIQMVSSSQKKGVTVPHSPPQPKTNLENKDLSKKSPAEMLLTNGQKAKCGPKLKRLSLKGKAKVNSEAPAANAVKAGGTDHRKPLISPQTSHKTLSKAVSQRLHVADHEDPDRNTTAAPRSPQCVLESKPPLATSGPLKPSVSDTSIRTFVSPLTSPKPVPEQGMWSRFHMAVLSEPDRGCPTTPKSPKCRAEGRAPRADSGPVSPAASRNGMSVAGNRQSEPRLASHVAADTAQPRPTGEKGGNIMASDRLERTNQLKIVEISAEAVSETVCGNKPAESDRRGGCLAQGNCQEKSEIRLYRQVAESSTSHPSSLPSHASQAEQEMSRSFSMAKLASSSSSLQTAIRKAEYSQGKSSLMSDSRGVPRNSIPGGPSGEDHLYFTPRPATRTYSMPAQFSSHFGREGHPPHSLGRSRDSQVPVTSSVVPEAKASRGGLPSLANGQGIYSVKPLLDTSRNLPATDEGDIISVQETSCLVTDKIKVTRRHYCYEQNWPHESTSFFSVKQRIKSFENLANADRPVAKSGASPFLSVSSKPPIGRRSSGSIVSGSLGHPGDAAARLLRRSLSSCSENQSEAGTLLPQMAKSPSIMTLTISRQNPPETSSKGSDSELKKSLGPLGIPTPTMTLASPVKRNKSSVRHTQPSPVSRSKLQELRALSMPDLDKLCSEDYSAGPSAVLFKTELEITPRRSPGPPAGGVSCPEKGGNRACPGGSGPKTSAAETPSSASDTGEAAQDLPFRRSWSVNLDQLLVSAGDQQRLQSVLSSVGSKSTILTLIQEAKAQSENEEDVCFIVLNRKEGSGLGFSVAGGTDVEPKSITVHRVFSQGAASQEGTMNRGDFLLSVNGASLAGLAHGNVLKVLHQAQLHKDALVVIKKGMDQPRPSARQEPPTANGKGLLSRKTIPLEPGIGRSVAVHDALCVEVLKTSAGLGLSLDGGKSSVTGDGPLVIKRVYKGGAAEQAGIIEAGDEILAINGKPLVGLMHFDAWNIMKSVPEGPVQLLIRKHRNSS

SEQ ID NO: 14836 - protein, 732 aa, Homo sapiens
MFYFRGCGRWVAVSFTKQQFPLARLSSDSAAPRTPHFDVIVIGGGHAGTEAATAAARCGSRTLLLTHRVDTIGQMSCNPSFGGIGKGHLMREVDALDGLCSRICDQSGVHYKVLNRRKGPAVWGLRAQIDRKLYKQNMQKEILNTPLLTVQEGAVEDLILTEPEPEHTGKCRVSGVVLVDGSTVYAESVILTTGTFLRGMIVIGLETHPAGRLGDQPSIGLAQTLEKLGFVVGRLKTGTPPRIAKESINFSILNKHIPDNPSIPFSFTNETVWIKPEDQLPCYLTHTNPRVDEIVLKNLHLNSHVKETTRGPRYCPSIESKVLRFPNRLHQVWLEPEGMDSDLIYPQGLSMTLPAELQEKMITCIRGLEKAKVIQPGYGVQYDYLDPRQITPSLETHLVQRLFFAGQINGTTGYEEAAAQTECCSVARLECSDMISQLQAILLPQPSLVAGTAGMHHNTQGVIAGINASLRVSRKPPFVVSRTEGYIGVLIDDLTTLGTSEPYRMFTSRVEFRLSLRPDNADSRLTLRGYKDAGCVSQQRYERACWMKSSLEEGISVLKSIEFLSSKWKKLIPEASISTSRSLPVRALDVLKYEEVDMDSLAKAVPEPLKKYTKCRELAERLKIEATYESVLFHQLQEIKGVQQDEALQLPKDLDYLTIRDVSLSHEVREKLHFSRPQTIGAASRIPGVTPAAIINLLRFVKTTQRRQSAMNESSKTDQYLCDADRLQEREL

SEQ ID NO: 14837 - protein, 747 aa, Homo sapiens
MTTEVGSVSEVKKDSSQLGTDATKEKPKEVAENQQNQSSDPEEEKGSQPPPAAESQSSLRRQKREKETSESRGISRFIPPWLKKQKSYTLVVAKDGGDKKEPTQAVVEEQVLDKEEPLPEEQRQAKGDAEEMAQKKQEIKVEVKEEKPSVSKEEKPSVSKVEMQPTELVSKEREEKVKETQEDKLEGGAAKRETKEVQTNELKAEKASQKVTKKTKTVQCKVTLLDGTEYSCDLEKHAKGQVLFDKVCEHLNLLEKDYFGLLFQESPEQKNWLDPAKEIKRQLRNLPWLFTFNVKFYPPDPSQLTEDITRYFLCLQLRQDIASGRLPCSFVTHALLGSYTLQAELGDYDPEEHGSIDLSEFQFAPTQTKELEEKVAELHKTHRGLSPAQADSQFLENAKRLSMYGVDLHHAKDSEGVDIKLGVCANGLLIYKDRLRINRFAWPKILKISYKRSNFYIKVRPAELEQFESTIGFKLPNHRAAKRLWKVCVEHHTFYRLVSPEQPPKAKFLTLGSKFRYSGRTQAQTRQASTLIDRPAPHFERTSSKRVSRSLDGAPIGVMDQSLMKDFPGAAGEISAYGPGLVSIAVVQDGDGRREVRSPTKAPHLQLIEGKPPVVKTEMVTISDASQRTEISTKEVPIVQTETKTITYESPQIDGGAGGDSGTLLTAQTITSESVSTTTTTHITKTVKGGISETRIEKRIVITGDGDIDHDQALAQAIREAREQHPDMSVTRVVVHKETELAEEGED

SEQ ID NO: 14838 - protein, 1068 aa, Homo sapiens
MSNKTGGKRPATTNSDIPNHNMVSEVPPERPSVRATRTARKAVAFGKRSHSMKRNPNAPVTKAGWLFKQASSGVKQWNKRWFVLVDRCLFYYKDEKEESILGSIPLLSFRVAAVQPSDNISRKHTFKVTVCWVDEAEASSTRCLSPQAEHAGVRTYFFSAESPEEQEAWIQAMGEAARVQIPPAQKSVPQAVRHSHEKPDSENVPPSKHHQQPPHNSLPKPEPEAKTRGEGDGRGCEKAERRPERPEVKKEPPVKANGLPAGPEPASEPGSPYPEGPRVPGGGEQPAQPNGWQYHSPSRPGSTAFPSQDGETGGHRRSFPPRTNPDKIAQRKSSMNQLQQWVNLRRGVPPPEDLRSPSRFYPVSRRVPEYYGPYSSQYPDDYQYYPPGVRPESICSMPAYDRISPPWALEDKRHAFRNGGGPAYQLREWKEPASYGRQDATVWIPSPSRQPVYYDELDAASSSLRRLSLQPRSHSVPRSPSQGSYSRARIYSPVRSPSARFERLPPRSEDIYADPAAYVMRRSISSPKVPPYPEVFRDSLHTYKLNEQDTDKLLGKLCEQNKVVREQDRLVQQLRAEKESLESALMGTHQELEMFGSQPAYPEKLRHKKDSLQNQLINIRVELSQATTALTNSTIEYEHLESEVSALHDDLWEQLNLDTQNEVLNRQIQKEIWRIQDVMEGLRKNNPSRGTDTAKHRGGLGPSATYSSNSPASPLSSASLTSPLSPFSLVSGSQGSPTKPGSNEPKANYEQSKKDPHQTLPLDTPRDISLVPTRQEVEAEKQAALNKVGVVPPRTKSPTDDEVTPSAVVRRNASGLTNGLSSQERPKSAVFPGEGKVKMSVEEQIDRMRRHQSGSMREKRRSLQLPASPAPDPSPRPAYKVVRRHRSIHEVDISNLEAALRAEEPGGHAYETPREEIARLRKMELEPQHYDVDINKELSTPDKVLIPERYIDLEPDTPLSPEELKEKQKKVERIKTLIAKSSMQNVVPIGEGDSVDVPQDSESQLQEQEKRIEISCALATEASRRGRMLSVQCATPSPPTSPASPAPPANPLSSESPRGADSSYTMRV

SEQ ID NO: 14839 - protein, 417 aa, Homo sapiens
MARAMAAAWPLLLVALLVLSWPPPGTGDVVVQAPTQVPGFLGDSVTLPCYLQVPNMEVTHVSQLTWARHGESGSMAVFHQTQGPSYSESKRLEFVAARLGAELRNASLRMFGLRVEDEGNYTCLFVTFPQGSRSVDIWLRVLAKPQNTAEVQKVQLTGEPVPMARCVSTGGRPPAQITWHSDLGGMPNTSQVPGFLSGTVTVTSLWILVPSSQVDGKNVTCKVEHESFEKPQLLTVNLTVYYPPEVSISGYDNNWYLGQNEATLTCDARSNPEPTGYNWSTTMGPLPPFAVAQGAQLLIRPVDKPINTTLICNVTNALGARQAELTVQVKEGPPSEHSGMSRNAIIFLVLGILVFLILLGIGIYFYWSKCSREVLWHCHLCPSSTEHASASANGHVSYSAVSRENSSSQDPQTEGTR

SEQ ID NO: 14840 - protein, 350 aa, Homo sapiens
MEAFALGPARRGRRRTRAAGSLLSRAAILLFISAFLVRVPSSVGHLVRLPRAFRLTKDSVKIVGSTSFPVKAYVMLHQKSPHVLCVTQQLRNAELIDPSFQWYGPKGKVVSENRTAQITSTGSLVFQNFEESMSGIYTCFLEYKPTVEEIVKRLQLKYAIYAYREPHYYYQFTARYHAAPCNSIYNISFEKKLLQILSKLLLDLSCEISLLKSECHRVKMQRAGLQNELFFAFSVSSLDTEKGPKRCTDHNCEPYKRLFKAKNLIERFFNQQVEILGRRAEQLPQIYYIEGTLQMVWINRCFPGYGMNVQQHPKCPECCVICSPGSYNPRDGIHCLQCNSSLVYGAKTCL

SEQ ID NO: 14841 - protein, 606 aa, Homo sapiens
MQAPVPHSQRRESFLYRSDSDYELSPKAMSRNSSVASDLHGEDMIVTPFAQVLASLRTVRSNVAALARQQCLGAAKQGPVGNPSSSNQLPPAEDTGQKLALETLDELDWCLDQLETLQTRHSVGEMASNKFKRILNRELTHLSETSRSGNQVSEYISRTFLDQQTEVELPKVTAEEAPQPMSRISGLHGLCHSASLSSATVPRFGVQTDQEEQLAKELEDTNKWGLDVFKVAELSGNRPLTAIIFSIFQERDLLKTFQIPADTLATYLLMLEGHYHANVAYHNSLHAADVAQSTHVLLATPALEAVFTDLEILAALFASAIHDVDHPGVSNQFLINTNSELALMYNDASVLENHHLAVGFKLLQAENCDIFQNLSAKQRLSLRRMVIDMVLATDMSKHMNLLADLKTMVETKKVTSLGVLLLDNYSDRIQVLQNLVHCADLSNPTKPLPLYRQWTDRIMAEFFQQGDRERESGLDISPMCDKHTASVEKSQVGFIDYIAHPLWETWADLVHPDAQDLLDTLEDNREWYQSKIPRSPSDLTNPERDGPDRFQFELTLEEAEEEDEEEEEEGEETALAKEALELPDTELLSPEAGPDPGDLPLDNQRT

SEQ ID NO: 14842 - protein, 544 aa, Homo sapiens
MRSSKLQSPSPSQEKQGVYLQETAMETWSVEQVCSWLVEKNLGELVHRFQEEEVSGAALLALNDRMVQQLVKKIGHQAVLMDLIKKYKQNTQGLKSPENPKKAALVMQTEAARDYRDEESSSPARHGEQMPSFYPAENLDNGLIDQRVLKQRRNVKQILARSKALQWTKSYVLPEFPYDVKCMLAEQKCPDHSMRIRIIEFLQADMTKYLEGSLYPSTQQYNDVVNALLQAHPFLDEDGCGFFLWKRALKDRFKYVRRPIEDDEQVIRNKCKFGHRRGQTRKSLADIRFDEIKLVQIKEEAVCFDSELDEHIKWFQQEYVKTEKDWREIDKRMSQTLEIRRKMIGSRTPLKDILKLFPFLKCPYQMFREFQLLTRTDIYKKTRHILESYSENILTSFSVVDNPINIVLQEKMKHYTDEDMLKYMKMTATCLLLPDVFGDDPSLFVIMNEQVQVSTPVLEVKNPFNMEVCEFSLYLERERLTKVDDCVTALAALVAAFHVFRIECPRRLSQTFNFLETLIFDMHSPYFPSLKEKENEVGFQHPLT

SEQ ID NO: 14843 - protein, 921 aa, Homo sapiens
MGQICQRESATAAEKPKLHLLAESEIDKYLYAMRLSDETLIDIMTRFRKEMKNGLSRDFNPTATVKMLPTFVRSIPDGSEKGDFIALDLGGSSFRILRVQVNHEKNQNVHMESEVYDTPENIVHGSGSQLFDHVAECLGDFMEKRKIKDKKLPVGFTFSFPCQQSKIDEAILITWTKRFKASGVEGADVVKLLNKAIKKRGDYDANIVAVVNDTVGTMMTCGYDDQHCEVGLIIGTGTNACYMEELRHIDLVEGDEGRMCINTEWGAFGDDGSLEDIRTEFDREIDRGSLNPGKQLFEKMVSGMYLGELVRLILVKMAKEGLLFEGRITPELLTRGKFNTSDVSAIEKNKEGLHNAKEILTRLGVEPSDDDCVSVQHVCTIVSFRSANLVAATLGAILNRLRDNKGTPRLRTTVGVDGSLYKTHPQYSRRFHKTLRRLVPDSDVRFLLSESGSGKGAAMVTAVAYRLAEQHRQIEETLAHFHLTKDMLLEVKKRMRAEMELGLRKQTHNNAVVKMLPSFVRRTPDGTENGDFLALDLGGTNFRVLLVKIRSGKKRTVEMHNKIYAIPIEIMQGTGEELFDHIVSCISDFLDYMGIKGPRMPLGFTFSFPCQQTSLDAGILITWTKGFKATDCVGHDVVTLLRDAIKRREEFDLDVVAVVNDTVGTMMTCAYEEPTCEVGLIVGTGSNACYMEEMKNVEMVEGDQGQMCINMEWGAFGDNGCLDDIRTHYDRLVDEYSLNAGKQRYEKMISGMYLGEIVRNILIDFTKKGFLFRGQISETLKTRGIFETKFLSQIESDRLALLQVRAILQQLGLNSTCDDSILVKTVCGVVSRRAAQLCGAGMAAVVDKIRENRGLDRLNVTVGVDGTLYKLHPHFSRIMHQTVKELSPKCNVSFLLSEDGSGKGAALITAVGVRLRTEASS

SEQ ID NO: 14844 - protein, 659 aa, Homo sapiens
MSTRTPLPTVNERDTENHTSHGDGRQEVTSRTSRSGARCRNSIASCADEQPHIGNYRLLKTIGKGNFAKVKLARHILTGREVAIKIIDKTQLNPTSLQKLFREVRIMKILNHPNIVKLFEVIETEKTLYLIMEYASGGEVFDYLVAHGRMKEKEARSKFRQIVSAVQYCHQKRIVHRDLKELRERVLRGKYRIPFYMSTDCENLLKRFLVLNPIKRGTLEQIMKDRWINAGHEEDELKPFVEPELDISDQKRIDIMVGMGYSQEEIQESLSKMKYDEITATYLLLGRKSSELDASDSSSSSNLSLAKVRPSSDLNNSTGQSPHHKVQRSVSSSQKQRRYSDHAGPAIPSVVAYPKRSQTSTADSDLKEDGISSRKSSGSAVGGKGIAPASPMLGNASNPNKADIPERKKSSTVPSSNTASGGMTRRNTYVCSERTTADRHSVIQNGKENSTIPDQRTPVASTHSISSAATPDRIRFPRGTASRSTFHGQPRERRTATYNGPPASPSLSHEATPLSQTRSRGSTNLFSKLTSKLTRRNMSFRFIKSRNVSAEQKDENKEAKPRSLRFTWSMKTTSSMDPGDMMREIRKVLDANNCDYEQRERFLLFCVHGDGHAENLVQWEMEVCKLPRLSLNGVRFKRISGTSIAFKNIASKIANELKL

SEQ ID NO: 14845 - protein, 840 aa, Homo sapiens
MHLVAGDSPGSGPHLPATAFIIPASSATLGLPSSALDVSCFPREPIHVGAPEQVAGCEPVSATVLPQLSAGPASSSTSTVRLLEWTEAAAPPPGGGLRFRISEYKPLNMAGVEQPPSPELRQEGVTEYEDGGAPAGDGEAGPQQAEDHPQNPPEDPNQDPPEDDSTCQCQACGPHQAAGPDLGSSNDGCPQLFQERSVIVENSSGSTSASELLKPMKKRKRREYQSPSEEESEPEAMEKQEEGKDPEGQPTASTPESEEWSSSQPATGEKKECWSWESYLEEQKAITAPVSLFQDSQAVTHNKNGFKLGMKLEGIDPQHPSMYFILTVAEVCGYRLRLHFDGYSECHDFWVNANSPDIHPAGWFEKTGHKLQPPKGYKEEEFSWSQYLRSTRAQAAPKHLFVSQSHSPPPLGFQVGMKLEAVDRMNPSLVCVASVTDVVDSRFLVHFDNWDDTYDYWCDPSSPYIHPVGWCQKQGKPLTPPQDYPDPDNFCWEKYLEETGASAVPTWAFKVRPPHSFLVNMKLEAVDRRNPALIRVASVEDVEDHRIKIHFDGWSHGYDFWIDADHPDIHPAGWCSKTGHPLQPPLGPREPSSASPGGCPPLSYRSLPHTRTSKYSFHHRKCPTPGCDGSGHVTGKFTAHHCLSGCPLAERNQSRLKAELSDSEASARKKNLSGFSPRKKPRHHGRIGRPPKYRKIPQEDFQTLTPDVVHQSLFMSALSAHPDRSLSVCWEQHCKLLPGVAGISASTVAKWTIDEVFGFVQTLTGCEDQARLFKDEARIVRVTHVSGKTLVWTVAQLGDLVCSDHLQEGKGILETGVHSLLCSLPTHLLAKLSFASDSQY

SEQ ID NO: 14846 - protein, 536 aa, Homo sapiens
MRKLLTNLPAAAVLSAQVYSAVLQGLWEENVCGTPGRTRVCTALLYGQVCPFQDSTDGLRTITSILFNWPPENTSVYYQPPQRSSFRIKLAFRNLSWPGLGLEDHQEIVLGQLVLPEPNEAKPDDPAPRPGQHALTMPALEPAPPLLADLGPALEPESPAALGPPGYLHSAPGPAPAPGEGPPPGTVLEPQSAPESSCPCRGSVKNQPSEELPDMTTFPPRLLAEQLTLMDAELFKKVVLHECLGCIWGQGHLKGNEHMAPTVRATIAHFNRLTNCITTSCLGDHSMRARDRARVVEHWIKVARECLSLNNFSSVHVIVSALCSNPIGQLHKTWAGVSSKSMKELKELCKKDTAVKRDLLIKAGSFKVATQERNPQRVQMRLRRQKKGVVPFLGDFLTELQRLDSAIPDDLDGNTNKRSKEVRVLQEMQLLQVAAMNYRLRPLEKFVTYFTRMEQLSDKERWGFTMMSRIVSNSWPQAIHPPQPPKVLTLQLQAVLPAGARKPVGWQHPAVAGNPPGCWPEHRLCTIPHPDRRHQG

SEQ ID NO: 14847 - protein, 316 aa, Homo sapiens
MPNRKASRNAYYFFVQEKIPELRRRGLPVARVADAIPYCSSDWAKPVFTPLRRPGMLVPKQNVSPPDMSALSLKGDQALLGGIFYFLNIFSHGELPPHCEQRFLPCEIGCVKYSLQEGIMADFHSFINPGEIPRGFRFHCQAASDSSHKIPISNFERGHNQATVLQNLYRFIHPNPGNWPPIYCKSDDRTRVNWCLKHMAKASEIRQDLQLLTVEDLVVGIYQQKFLKEPSKTWIRSLLDVAMWDYSSNTRCKWHEENDILFCALAVCKKIAYCISNSLATLFGIQLTEAHVPLQDYEASNSVTPKMVVLDAGRYQ

SEQ ID NO: 14848 - protein, 1207 aa, Homo sapiens
MANGGGGGGGSSGGGGGGGGSSLRMSSNIHANHLSLDASSSSSSSSSSSSSSSSSSSSSSVHEPKMDALIIPVTMEVPCDSRGQRMWWAFLASSMVTFFGGLFIILLWRTLKYLWTVCCHCGGKTKEAQKINNGSSQADGTLKPVDEKEEAVAAEVGWMTSVKDWAGVMISAQTLTGRVLVVLVFALSIGALVIYFIDSSNPIESCQNFYKDFTLQIDMAFNVFFLLYFGLRFIAANDKLWFWLEVNSVVDFFTVPPVFVSVYLNRSWLGLRFLRALRLIQFSEILQFLNILKTSNSIKLVNLLSIFISTWLTAAGFIHLVENSGDPWENFQNNQALTYWECVYLLMVTMSTVGYGDVYAKTTLGRLFMVFFILGGLAMFASYVPEIIELIGNRKKYGGSYSAVSGRKHIVVCGHITLESVSNFLKDFLHKDRDDVNVEIVFLHNISPNLELEALFKRHFTQVEFYQGSVLNPHDLARVKIESADACLILANKYCADPDAEDASNIMRVISIKNYHPKIRIITQMLQYHNKAHLLNIPSWNWKEGDDAICLAELKLGFIAQSCLAQGLSTMLANLFSMRSFIKIEEDTWQKYYLEGVSNEMYTEYLSSAFVGLSFPTVCELCFVKLKLLMIAIEYKSANRESRILINPGNHLKIQEGTLGFFIASDAKEVKRAFFYCKACHDDITDPKRIKKCGCKRLKVAARSRYSKDPFEFKKETPNSRLVTEPVEDEQPSTLSPKKKQRNGGMRNSPNTSPKLMRHDPLLIPGNDQIDNMDSNVKKYDSTGMFHWCAPKEIEKVILTRSEAAMTVLSGHVVVCIFGDVSSALIGLRNLVMPLRASNFHYHELKHIVFVGSIEYLKREWETLHNFPKVSILPGTPLSRADLRAVNINLCDMCVILSANQNNIDDTSLQDKECILASLNIKSMQFDDSIGVLQANSQGFTPPGMDRSSPDNSPVHGMLRQPSITTGVNIPIITELVNDTNVQFLDQDDDDDPDTELYLTQPFACGTAFAVSVLDSLMSATYFNDNILTLIRTLVTGGATPELEALIAEENALRGGYSTPQTLANRDRCRVAQLALLDGPFADLGDGGCYGDLFCKALKTYNMLCFGIYRLRDAHLSTPSQCTKRYVITNPPYEFELVPTDLIFCLMQFDHNAGQSRASLSHSSHSSQSSSKKSSSVHSIPSTANRQNRPKSRESRDKQKYVQEERL

SEQ ID NO: 14849 - protein, 368 aa, Homo sapiens
MGRKKIQISRILDQRNRQVTFTKRKFGLMKKAYELSVLCDCEIALIIFNSANRLFQYASTDMDRVLLKYTEYSEPHESRTNTDILETLKRRGIGLDGPELEPDEGPEEPGEKFRRLAGEGGDPALPRPRLYPAAPAMPSPDVVYGALPPPGCDPSGLGEALPAQSRPSPFRPAAPKAGPPGLVHPLFSPSHLTSKTPPPLYLPTEGRRSDLPGGLAGPRGGLNTSRSLYSGLQNPCSTATPGPPLGSFPFLPGGPPEYGLGDPPPPPGLLQPPTLAPWQPSRGDGPPAVSSQPSGGRSLGEEGPPTRGASPPTPPVSIKSERLSPAPGGPGDFPKTFPYPLLLARSLAEPLRPGPALRRLPLADGWPR

SEQ ID NO: 14850 - protein, 508 aa, Homo sapiens
VVSEEFRNQIVRELVTLPANRWREQLDYYARCSQAPGCGELLFDTDTWSLQIRKTGAQTATDFPHAIRIWYKTKPEGRSVTWTSDQSGRPCVYTVGSPINNRALFPCQEPPVAMSTWQATVRAAASFVVLMSGENSAKPTQLWEECSSWYYYVTMPMPASTFTIAVGCWTEMKMETWSSNDLATERPFSPSEANFRHVGVCSHMEYPCRFQNASATTQEIIPHRVFAPVCLTGACQETLLRLIPPCLSAAHSVLGAHPFSRLDVLIVPANFPSLGMARPSKDKTGHTSDSGASVIKHGLNPEKIFMQVHYLKGYFLLRFLAKRLGDETYFSFLRKFVHTFHGQLILSQDFLQMLLENIPEEKRLELSVENIYQDWLESSGIPKPLQRERRAGAECGLARQVRAEVTKWIGVNRRPRKRKRREKEEVFEKLLPDQLVLLLEHLLEQKTLSPRTLQSLQRTYHLQDQDAEVRHRWCELIVKHKFTKAYKSVERFLQEDQVGVIFQQMGIL

SEQ ID NO: 14851 - protein, 659 aa, Homo sapiens
APGRFHVGSAESMLHVRPGGYTPQRALINPFAPSRMPMKLTSNRRRWMHTFPVGMNPRTQNKDSLEDSVSTSPDPILTLSAPPVVPGFCCTVGVDWKSLTTPACLPLTTDYFPDRQGLQNDYTEGCYDLLPEADIDRRDEDGVQMTAQQVFEEFICQRLMQGYQIIVQPKTQKPNPAVPPPLSSSPLYSRGLVSRNRPEEEDQYWLSMGRTFHKVTLKDKMITVTRYLPKYPYESAQIHYTYSLCPSHSDSEFVSCWVEFSHERLEEYKWNYLDQYICSAGSEDFSLIESLKFWRTRFLLLPACVTATKRITEGEAHCDIYGDRPRADEDEWQLLDGFVRFVEGLNRIRRRHRSDRMMRKGTAMKGLQMTGPISTHSLESTAPPVGKKGTSALSALLEMEASQKCLGEQQAAVHGGKSSAQSAESSSVAMTPTYMDSPRKDGAFFMEFVRSPRTASSAFYPQVSVDQTATPMLDGTSLGICTGQSMDRGNSQTFGNSQNIGEQGYSSTNSSDSSSQQLVASSLTSSSTLTEILEAMKHPSTGVQLLSEQKGLSPYCFISAEVVHWLVNHVEGIQTQAMAIDIMQWPCSSPPPPGTQQEWTTSPASSASGLRWPLWQKSSCTLRFLPFSCPGCLAGQPPMQVGTAPLAEVLEDGARRQHF

SEQ ID NO: 14852 - protein, 711 aa, Homo sapiens
MLARRQRDPLQALRRRNQELKQQVDSLLSESQLKEALEPNKRQHIYQRCIQLKQAIDENKNALQKLSKADESAPVANYNQRKEEEHTLLDKLTQQLQGLAVTISRENITEVGAPTEEEEESESEDSEDSGGEEEDAEEEEEEKEENESHKWSTGEEYIAVGDFTAQQVGDLTFKKGEILLVIEKKPDGWWIAKDAKGNEGLVPRTYLEPYSEEEEGQESSEEGSEEDVEAVDETADGAEVKQRTDPHWSAVQKAISEINTVDVLTTMGAIPAGFRPSTLSQLLEEGNQFRANYFLQPELMPSQLAFRDLMWDATEGTIRSRPSRISLILTLWSCKMIPLPGMSIQVLSRHVRLCLFDGNKVLSNIHTVRATWQPKKPKTWTFSPQVTRILPCLLDGDCFIRSNSASPDLGILFELGISYIRNSTGERGELSCGWVFLKLFDASGVPIPAKTYELFLNGGTPYEKGIEVDPSISRRAHGSVFYQIMTMRRQPQLLVKLRSLNRRSRNVLSLLPETLIGNMCSIHLLIFYRQILGDVLLKDRMSLQSTDLISHPMLATFPMLLEQPDVMDALRSSWAGKESTLKRSEKLSKPVSPREGKKKWPELYHILKTMHCSCLPCYKIMRDKEFLKSTFLLVYHDCVLPLLHSTRLPPFRWAEEETETARWKVITDFLKQNQENQGALQALLSPDGVHEPFDLSEQTYDFLGEMRKNAV

SEQ ID NO: 14853 - protein, 120 aa, Homo sapiens
MFPLTEENKHVAQLLLNTGTCPRCIFRFCGVDFHAPYKLPYKELLNELQKFLETEKDELILEVMNPPPKKIRLQELEDSIDNLSQNGEGRISVSHVGSTASKNSNLNVCNVCLGILQEFC

SEQ ID NO: 14854 - protein, 477 aa, Homo sapiens
MAHNPNMTHLKINLPVTALPPLWVRCDSSDPEGTCWLGAELITTNNSITGIVLYVVSCKADKNYSVNLENLKNLHKKRHHLSTVTSKGFAQYELFKSSALDDTITASQTAIALDISWSPVDEILQIPPLSSTATLNIKVESGEPRGPLNHLYRELKFLLVLADGLRTGVTEWLEPLEAKSAVELVQEFLNDLNKLDGFGDSTKKDTEVETLKHDTAAVDRSVKRLFKVRSDLDFAEQLWCKMSSSVISYQDLVKCFTLIIQSLQRGDIQPWLHSGSNSLLSKLIHQSYHGTMDTVSLSGTIPVQMLLEIGLDKLKKDYISFFIGQELASLNHLEYFIAPSVDIQEQVYRVQKLHHILEILVSCMPFIKSQHELLFSLTQICIKYYKQNPLDEQHIFQLPVRPTAVKNLYQSEKPQKWRVEIYSGQKKIKTVWQLSDSSPIDHLNFHKPDFSELTLNGSLEERIFFTNMVTCSQVHFK

SEQ ID NO: 14855 - protein, 423 aa, Homo sapiens
MVFAFWKVFLILSCLAGQVSVVQVTIPDGFVNVTVGSNVTLICIYTTTVASREQLSIQWSFFHKKEMEPISHSSCLSTEGMEEKAVSQCLKMTHARDARGRCSWTSEIYFSQGGQAVAIGQFKDRITGSNDPGNASITISHMQPADSGIYICDVNNPPDFLGQNQGILNVSVLVKPSKPLCSVQGRPETGHTISLSCLSALGTPSPVYYWHKLEGRDIVPVKENFNPTTGILVIGNLTNFEQGYYQCTAINRLGNSSCEIDLTSSHPEVGIIVGALIGSLVGAAIIISVVCFARNKAKAKAKERNSKTIAELEPMTKINPRGESEAMPREDATQLEVTLPSSIHETGPDTIQEPDYEPKPTQEPAPEPAPGSEPMAVPDLDIELELEPETQSELEPEPEPEPESEPGVVVEPLSEDEKGVVKA

SEQ ID NO: 14856 - protein, 1386 aa, Homo sapiens
MYFLSGWPKRLLCPLGSPAEAPFHVQSDPQRAFFAVLAAARLSIWYSRPSVLIVTYKEPAKSSTQFGSYKQAEWRPDSTMIAVSTANGYILFFHITSTRGDKYLYEPVYPKGSPQMKGTPHFKEEQCAPALNLEMRKILDLQAPIMSLQSVLEDLLVATSDGLLHLIHWEGMTNGRKAINLCTVPFSVDLQSSRVGSFLGFTDVHIRDMEYCATLDGFAVVFNDGKVGFITPVSSRFTAEQLHGVWPQDVVDGTCVAVNNKYRLMAFGCVSGSVQVYTIDNSTGAMLLSHKLELTAKQYPDIWNKTGAVKLMRWSPDNSVVIVTWEYGGLSLWSVFGAQLICTLGGDFAYRSDGTKKDPLKINSMSWGAEGYHLWVISGFGSQNTEIESDLRSVVKQPSILLFQFIKSVLTVNPCMSNQEQVLLQGEDRLYLNCGEASQTQNPRSSSTHSEHKPSREKSPFADGGLESQGLSTLLGHRHWHVVQISSTYLESNWPIREQNMIVTGGLAWWNDFMVLACYNINDRQEELRVYLRTSNLDNAFAHVTKAQAETLLLSVFQDMVIVFRADCSICLYSIERKSDGPNTTAGIQVLQEVSMSRYIPHPFLVVSVTLTSVSTENGITLKMPQQARGAESIMLNLAGQLIMMQRDRSGPQIREKDSNPNNQRKLLPFCPPVVLAQSVENVWTTCRANKQKRHLLEALWLSCGGAGMKVWLPLFPRDHRKPHSFLSQRIMLPFHINIYPLAVLFEDALVLGAVNDTLLYDSLYTRNNAREQLEVLFPFCVVERTSQIYLHHILRQLLVRNLGEQALLLAQSCATLPYFPHVLELMLHEVLEEEATSREPIPDPLLPTVAKFITEFPLFLQTVVHCARKTEYALWNYLFAAVGNPKDLFEECLMAQDLDTAASYLIILQNMEVPAVSRQHATLLFNTALEQGKWDLCRHMIRFLKAIGSGESETPPSTPTAQEPSSSGGFEFFRNRSISLSQSAENVPASKFSLQKTLSMPSGPSGKRWSKDSDCAENMYIDMMLWRHARRLLEDVRLKDLGCFAAQLGFELISWLCKERTRAARVDNFVIALKRLHKDFLWPLPIIPASSISSPFKNGKYRTVGEQLLKSQSADPFLNLEMDAGISNIQRSQSWLSNIGPTHHEIDTASSHGPQMQDAFLSPLSNKGDECSIGSATDLTESSSMVDGDWTMVDENFSTLSLTQSELEHISMELASKGPHKSQVQLRYLLHIFMEAGCLDWCIVIGLILRESSIINQILVITQSSEVDGEMLQNIKTGLHAVDRWASTDCPGYKPFLNIIKPQLQKLSEITEEQVQPDAFQPITMGKTPEQTSPRAEESRGSSSHGSIPQGEVGSSNMVSRKEEDTAQAEEEEPFQDGTYDCSVS

SEQ ID NO: 14857 - protein, 663 aa, Homo sapiens
MCHPDKAFTSDKLQCVFNEYKAAVWVPPRPRPLSRAPLPEAGGENLHLKISRVRKRNLPFVVWGEEEASTPGLDAISHHLCYPDRTHRDRTEKHSTMPDSPVDVKTQSRLTPPTMPPPPTTQGAPRTSSFTPTTLTNGTSHSPTALNGAPSPPNGFSNGPSSSSSSSLANQQLPPACGARQLSKLKRFLTTLQQFGNDISPEIGERVRTLVLGLVNSTLTIEEFHSKLQEATNFPLRPFVIPFLKANLPLLQRELLHCARLAKQNPAQYLAQHEQLLLDASTTSPVDSSELLLDVNENGKRRTPDRTKENGFDREPLHSEHPSKRPCTISPGQRYSPNNGLSYQPNGLPHPTPPPPQHYRLDDMAIAHHYRDSYRHPSHRDLRDRNRPMGLHGTRQEEMIDHRLTDREWAEEWKHLDHLLNCIMDMVEKTRRSLTVLRRCQEADREELNYWIRRYSDAEDLKKGGGSSSSHSRQQSPVNPDPVALDAHREFLHRPASGYVPEEIWKKAEEAVNEVKRQAMTELQKAVSEAERKAHDMITTERAKMERTVAEAKRQAAEDALAVINQQEDSSESCWNCGRKASETCSGCNTARYCGSFCQHKDWEKHHHICGQTLQAQQQGDTPAVSSSVTPNSGAGSPMDTPPAATPRSTTPGTPSTIETTPR

SEQ ID NO: 14858 - protein, 342 aa, Homo sapiens
DDAKNGFARCTAAEIQRFAFSATGLLSHVEEGLDSDATDSSSDDDLDEYTLRKNVAVNCSTEWKWLVDRARVGSRWTWLQAQISDLECKIQQLTDIHRQIRASKGIVVLEECQLPKDILKKQMQFADQAASLNILGNPQVPQECQDPVPEQDFEMSPSSPTLLLRNIEKQSAQLTEIINSLIAPLNLSPTSSPLSSKSCSHKCLANGIYRSASENLDELSSSSSWLLNQKHSKKKRKDRTRLKSSSLTFMSTSARTRPLQSFHKRKLYRLSPTFYWTPQTLPSKETAFLNTTQMPCLQSASTWSSYEHNSESYLLREHVSELDSSFHSVLSLPSGKPPCNNF

SEQ ID NO: 14859 - protein, 226 aa, Homo sapiens
MSRYGRYGGETKVYVGNLGTGAGKGELERAFSYYGPLRTVWIARNPPGFAFVEFEDPRDAEDAVRGLDGKVICGSRVRVELSTGMPRRSRFDRPPARRPFDPNDRCYECGEKGHYAYDCHRYSRRRRSRSRSRSHSRSRGRRYSRSRSRSRGRRSRSASPRRSRSISLRRSRSASLRRSRSGSIKGSRYFQSPSRSRSRSRSISRPRSSRSPSGSPRRSASPERMD

SEQ ID NO: 14860 - protein, 639 aa, Homo sapiens
MSRIKSTLNSVSKAVFGNQNEMISRLAQFKPSSQILRKVSDSGWLKQKNIKQAIKSLKKYSDKSAEKSPFPEEKSHIIDKEEDIGKRSLFHYTSSITTKFGDSFYFLSNHINSYFKRKEKMSQQKENEHFRDKSELEDKKVEEGKLRSPDPGILAYKPGSESVHTVDKPTSPSAIPDVLQVSTKQSIANFLSRPTEGVQALVGGYIGGLVPKLKYDSKSQSEEQEEPAKTDQAVSKDRNAEEKKRLSLQREKIIARVSIDNRTRALVQALRRTTDPKLCITRVEELTFHLLEFPEGKGVAVKERIIPYLLRLRQIKDETLQAAVREILALIGYVDPVKGRGIRILSIDGGGTRGVVALQTLRKLVELTQKPVHQLFDYICGVSTGAILAFMLGLFHMPLDECEELYRKLGSDVFSQNVIVGTVKMSWSHAFYDSQTWENILKDRMGSALMIETARNPTCPKVAAVSTIVNRGITPKAFVFRNYGHFPGINSHYLGGCQYKMWQAIRASSAAPGYFAEYALGNDLHQDGGLLLNNPSALAMHECKCLWPDVPLECIVSLGTGRYESDVRNTVTYTSLKTKLSNVINSATDTEEVHIMLDGLLPPDTYFRFNPVMCENIPLDESRNEKLDQLQLEGLKYIE

SEQ ID NO: 14861 - protein, 749 aa, Homo sapiens
MQRPSVSRAENYQLLWDTIASLKQCEQAMQHAFIPVNGTEIEYEFEEITLERGNSGLGFSIAGGTDNPHIGDDPGIFITKIIPGGAAAEDGRLRVNDCILRVNEVDVSEVSHSKAVEALKEAGSIVRLYVRRRRPILETVVEIKLFKGPKGLGFSIAGGVGNQHIPGDNSIYVTKIIDGGAAQKDGRLQVGDRLLMVNNYSLEEVTHEEAVAILKNTSEVVYLKVGKPTTIYMTDPYGPPDITHSYSPPMENHLLSGNNGTLEYKTSLPPISPGRYSPIPKHMLVDDDYTSHSQHSTATRQPSMTLQRAVSLEGEPRKVVLHKGSTGLGFNIVGGEDGEGIFVSFILAGGPADLSGELQRGDQILSVNGIDLRGASHEQAAAALKGAGQTVTIIAQYQPEDYARFEAKIHDLREQMMNHSMSSGSGSLRTNQKRSLYVRAMFDYDKSKDSGLPSQGLSFKYGDILHVINASDDEWWQARRVMLEGDSEEMGVIPSKRRVERKERARLKTVKFNAKPGVIDSKGDIPGLGDDGYGTKTLRGQEDLILSYEPVTRQEINYTRPVIILGPMKDRINDDLISEFPDKFGSCVPHTTRPKRDYEVDGRDYHFVISREQMEKDIQEHKFIEAGQYNDNLYGTSVQSVRFVAERGKHCILDVSGNAIKRLQVAQLYPIAIFIKPRSLEPLMEMNKRLTEEQAKKTYDRAIKLEQEFGEYFTAIVQGDTLEDIYNQCKLVIEEQSGPFIWIPSKEKL

SEQ ID NO: 14862 - protein, 255 aa, Homo sapiens
MALLWGLLVLSWSCLQGPCSVFSPVSAMEPLGRQLTSGPNQEQVSPLTLLKLGNQEPGGQTALKSPPGVCSRDPTPEQTHRLARAMMAFTADLFSLVAQTSTCPNLILSPLSVALALSHLALGAQNHTLQRLQQVLHAGSGPCLPHLLSRLCQDLGPGAFRLAARMYLQKGFPIKEDFLEQSEQLFGAKPVSLTGKQEDDLANINQWVKEATEGKIQEFLSGLPEDTVLLLLNAIHFQGFWRNKFDPSLTQRDSF

SEQ ID NO: 14863 - protein, 546 aa, Homo sapiens
MTGCFLWQYHLPKLKTGSLGPEETSAPVRMCPRHPEPVPLAHPLPVLKEALEKVDQILRQAMSAPGVAAMSAVVIHNDTVLWTGNFGKKNGSDPASGAPNEYTMYRISSISKIFPVLMLYRLWEEGIVASLDDPLERYASTFTINNPLGLASAEQQGLMDGLEQVGPAPRPSPVTLRRMASQLSGLPRRLRSTSLLWKGSTQEALNLLKDDVLVVDPGTRCHYSTLAFSLLAHVLAAHTAQGDYQRWVSENVLEPLGMADTGFDLTPDVRARLAAGFYGSGRPAPLYDLGWYRPSGQMYSTAADLAKLAVALLGGGPRRLLRPDAAKTLLAPLLACPGAYFANETGTPWEFHAQRGYRVVRKDGDLDGYAATFSLVPPLRLGLVLLLAGPRPPGPDLVARAYDELLPALERALREAEPGPAPPPTAHPFAGYFTFANLTFYEVRAGPAGELRLRQFGPRVEALVPPAFRTLALRHLHGRVFQLHVAHEFPCALPLGDAWLSLEAQHGQLVNFYPLDHHGLSPGFDVPGLNTYRVLRLRGKPVFKTQ

SEQ ID NO: 14864 - protein, 887 aa, Homo sapiens
SVGASGQRPVFCPVHKQEQLKLFCETCDRLTCRDCQLLEHKEHRYQFLEEAFQNQKGAIENLLAKLLEKKNYVHFAATQVQNRIKEVNETNKRVEQEIKVAIFTLINEINKKGKSLLQQLENVTKERQMKLLQQQNDITGLSRQVKHVMNFTNWAIASGSSTALLYSKRLITFQLRHILKARCDPVPAANGAIRFHCDPTFWAKNVVNLGNLVIESKPAPGYTPNVVVGQVPPGTNHISKTPGQINLAQLRLQHMQQQVYAQKHQQLQQMRMQQPPAPVPTTTTTTQQHPRQAAPQMLQQQPPRLISVQTMQRGNMNCGAFQAHQMRLAQNAARIPGIPRHSGPQYSMMQPHLQRQHSNPGHAGPFPVVSVHNTTINPTSPTTATMANANRGPTSPSVTAIELIPSVTNPENLPSLPDIPPIQANVVPMMHSWYEFGAREKTQDQNVLEDAGSSSLDNLLSRYISGSHLPPQPTSTMNPSPGPSALSPGSSGLSNSHTPVRPPSTSSTGSRGSCGSSGRTAEKTSLSFKSDQVKVKQEPGTEDEICSFSGGVKQEKTEDGRRSACMLSSPESSLTPPLSTNLHLESELDALASLENHVKIEPADMNESCKQSGLSSLVNGKSPIRSLMHRSARIGGDGNNKDDDPNEDWCAVCQNGGDLLCCEKCPKVFHLTCHVPTLLSFPSGDWICTFCRDIGKPEVEYDCDNLQHSKKGKTAQGLSPVDQRKCERLLLYLYCHELSIEFQEPVPASIPNYYKIIKKPMDLSTVKKKLQKKHSQHYQIPDDFVADVRLIFKNCERFNEMMKVVQVYADTQEINLKADSEVAQAGKAVALYFEDKLTEIYSDRTFAPLPEFEQEEDDGEVTEDSDEDFIQPRRKRLKSDERPVHIK

SEQ ID NO: 14865 - protein, 3925 aa, Homo sapiens
MPGERPRGAPPPTMTGDLQPRQVASSPGHPSQPPLEDNTPATRTTKGAREAGGQAQAMELPEAQPRQARDGELKPPSLRGQAPSSTPGKRGSPQTPPGRSPLQAPSRLAGRAEGSPPQRYILGIASSRTKPTLDETPENPQLEAAQLPEVDTPQGPGTGAPLRPGLPRTEAQPAAEELGFHRCFQEPPSSFTSTNYTSPSATPRPPAPGPPQSRGTSPLQPGSYPEYQASGADSWPPAAENSFPGANFGVPPAEPEPIPKGSRPGGSPRGVSFQFPFPALHGASTKPFPADVAGHAFTNGPLVFAFHQPQGAWPEEAVGTGPAYPLPTQPAPSPLPCYQGQPGGLNRHSDLSGALSSPGAAHSAPRPFSDSLHKSLTKILPERPPSAQDGLGSTRGPPSSLPQRHFPGQAYRASGVDTSPGPPDTELAAPGPPPARLPQLWDPTAAPYPTPPGGPLAATRSMFFNGQPSPGQRLCLPQSAPLPWPQVLPTARPSPHGMEMLSRLPFPAGGPEWQGGSQGALGTAGKTPGPREKLPAVRSSQGGSPALFTYNGMTDPGAQPLFFGVAQPQVSPHGTPSLPPPRVVGASPSESPLPSPATNTAGSTCSSLSPMSSSPANPSSEESQLPGPLGPSAFFHPPTHPQETGSPFPSPEPPHSLPTHYQPEPAKAFPFPADGLGAEGAFQCLEETPFPHEGPEVGRGGLQGFPRAPPPYPTHHFSLSSASLDQLDVLLTCRQCDRNYSSLAAFLAHRQFCGLLLARAKDGHQRSPGPPGLPSPPAAPRVPADAHAGLLSHAKTFLLAGDAQAEGKDDPLRTGFLPSLAATPFPLPASDLDMEDDAKLDSLITEALNGMEYQSDNPEIDSSFIDVFADEEPSGPRGPSSGHPLKSKAGVTPESKAPPPLPAATPDPQTPRPGDRGCPARGRPKTRSLGLAPTEADAPSQGRQQRRGKQLKLFRKDLDSGGAAEGSGSGGGGRASGLRPRRNDGLGERPPPRPRRPRTQAPGSRADPAPRVPRAAALPEETRSSRRRRLPPRKDPRKRKARGGAWGKELILKIVQQKNRLREYDFASESEEDEQPPPRGPGFRGRRGRGEKRKEVELTQGPREDEPQKPRKAARQEAGGDGAPANPEEPGGSRPGPGRSPQARGPSRSLETGAAAREGGPKCADRPSVAPKDPLQVPTNTETSEETRPSLDFPQEAKEPETAEESAPDSTEFTEALRSPPAACAGEMGASPGLLIPEQPPPSRHDTGTPKPSGSLANTAPHGSSPTPGVGSLLGGPGGTQAPVSHNSKDPPARQPGEFLAPVANPSSTACPKPSVLSSKISSFGCDPAGFNRDPLGVPVAKKGPQPYSSPHSELFLGPKDLAGCFLEELHPKPSARDAPPASSSCLCQDGEDAGSLEPQLPRSPPGTAETEPGRAASPPTLESSSLFPDLPVDRFDPPLYGSLSANRDSGLPFACADPPQKTVPSDPPYPSFLLLEEVSPMLPSHFPDLSGGKVLSKTCPPERTVVPGAAPSLPGKGSGCSVALMSHLSEDELEIQKLVTELESQLQRSKDTRGAPRELAEAESVGRVELGTGTEPPSQRRTCQATVPHEDTFSAADLTRVGESTAHREGAESAVATVEAVQGRPGGTWPCPASFHPGHAALLPCAQEDLVSGAPFSPRGANFHFQPVQKAGASKTGLCQAEGDSRPPQDVCLPEPSKQPGPQLDAGSLAKCSPDQELSFPKNKEAASSQESEDSLRLLPCEQRGGFLPEPGTADQPHRGAPAPEAFGSPAVHLAPDLAFQGDGAPPLDATWPFGASPSHAAQGHSAGRAGGHLHPTAGRPGFEGNEFAPAGASSLTAPRGREAWLVPVPSPACVSNTHPSRRSQDPALSPPIRQLQLPGPGVAKSKDGILGLQELTPAAQSPPRVNPSGLEGGTVEGGKVACGPAQGSPGGVQVTTLPAVAGHQLGLEADGHWGLLGQAEKTQGQGTANQLQPENGVSPGGTDNHASVNASPKTALTGPTEGAVLLEKCKGSRAAMSLQEEAEPTPSPPSPNRESLALALTAAHSRSGSEGRTPERASSPGLNKPLLATGDSPAPSVGDLAACAPSPTSAAHMPCSLGPLPREDPLTSPSRAQGGLGGQLPASPSCRDPPGPQQLLACSPAWAPLEEADGVQATTDTGAEDSPVAPPSLTTSPCDPKEALAGCLLQGEGSPLEDPSSWPPGSVSAVTCTHSGDTPKDSTLRIPEDSRKEKLWESPGRATSPPLAGAVSPSVAVRATGLSSTPTGDEAQAGRGLPGPDPQSRGAPPHTNPDRMPRGHSSYSPSNTARLGHREGQAVTAVPTEPPTLQGAGPDSPACLEGEMGTSSKEPEDPGTPETGRSGATKMPRVTCPSTGLGLGRTTAPSSTASDFQSDSPQSHRNASHQTPQGDPLGPQDLKQRSRGYKKKPASTENGQWKGQAPHGPVTCEVCAASFRSGPGLSRHKARKHRPHPGAPAEPSPAALPAQQPLEPLAQKCQPPRKKSHRVSGKERPNHSRGDPSHVTQPPPAQGSKEVLRAPGSPHSQQLHPPSPTEHEVDVKTPASKPRPDQAREDELHPKQAEKREGRRWRREPTVDSPSHSEGKSNKKRGKLRGRRLREESILPVSADVISDGRGSRPSPAMASYAASPSHCLSVEGGPEADGEQPPRLATLGPGVMEGAAETDQEALCAGETGAQKPPGDRMLCPGRMDGAALGEQPTGQKGASARGFWGPRETKALGVCKESGSEPAEDSSRAHSRSEEGVWEENTPPLGPLGFPETSSSPADSTTSSCLQGLPDNPDTQGGVQGPEGPTPDASGSSAKDPPSLFDDEVSFSQLFPPGGRLTRKRNPHVYGKRCEKPVLPLPTQPSFEEGGDPTLGPARLPTDLSDSSSLCLCHEDPWEDEDPAGLPESFLLDGFLNSRVPGIDPWAPGLSLWALEPSREAGAEKLPSHCPEDDRPEAIPELHMVPAAWRGLEMPAPADDSSSSLGDVSPEPPSLERERCDGGLPGNTHLLPLRATDFEVLSTKFEMQDLCFLGPFEDPVGLPGPSFLDFEGTASSQGPQSRRTEEAAGAGRAQGRGRPAKGRRASYKCKVCFQRFRSLGELDLHKLAHTPAPPPTCYMCVERRFGSRELLRGHLQERHAQSKAGPWACGMCLKEVADVWMYNEHLREHAVRFARRGQARRSLGDLPGGLEGSSAVAHLLNSITEPAPKHHRGKRSAGKAAGSPGDPWGQEGEAKKDSPGERAKPRARSTPSNPDGAATPDSASATALADAGSPGPPRTTPSPSPDPWAGGEPLLQATPVHEACKDPSRDCHHCGKRFPKPFKLQRHLAVHSPQRVYLCPRCPRVYPEHGELLAHLGGAHGLLERPELQHTPLYACELCATVMRIIKKSFACSSCNYTFAKKEQFDRHMNKHLRGGRQPFAFRGVRRPGAPGQKARALEGTLPSKRRRVAMPGSAPGPGEDRPPPRGSSPILSEGSLPALLHLCSEVAPSTTKGWPETLERPVDPVTHPIRGCELPSNHQECPPPSLSPFPAALADGRGDCALDGALERPENEASPGSPGPLLQQALPLGASLPRPGARGQDAEGKRAPLVFSGKRRAPGARGRCAPDHFQEDHLLQKEKEVSSSHMVSEGGPRGAFHKGSATKPAGCQSSSKDRSAASTPSKALKFPVHPRKAVGSLAPGELARGTENGMKPATPKAKPGPSSQGSGSPRPGTKTGGGSQPQPASGQLQSETATTPAKPSFPSRSPAPERLPARAQAKSCTKGPREAGEQGPHGSLGPKEKGESSTKRKKGQVPGPARSESVGSFGRAPSAPDKPPRTPRKQATPSRVLPTKPKPNSQNKPRPPPSEQRKAEPGHTQRKDRLGKAFPQGRPLLRPPKRGTAVHGAEPAEPHTHRTAEAQSDLLSQLFGQRLTGFKIPLKKDASE

SEQ ID NO: 14866 - protein, 231 aa, Homo sapiens
MASTSRLDALPRVTCPNHPDAILVEDYRAGDMICPECDRVIDVGSEWRTFSNDKATKDPSRVGDSQNPLLSDGDLSTMIGKGTGAASFDEFGNSKYQNRRTMSSSDRAMMNAFKEITTMADRINLPRNIVDRTNNLFKQVYEQKSLKGRANDAIASACLYIACRQEGVPRTFKEICAVSRISKKEIGRCFKLILKALETSVDLITTGDFMSRFCSNLCLPKQVQMAATHIA

SEQ ID NO: 14867 - protein, 772 aa, Homo sapiens
MQFQLTLFLHLGWLSYSKAQDDCNRGACHPTTGDLLVGRNTQLMASSTCGLSRAQKYCILSYLEGEQKCFICDSRFPYDPYDQPNSHTIENVIVSFEPDREKKWWQSENGLDHVSIRLDLEALFRFSHLILTFKTFRPAAMLVERSTDYGHNWKVFKYFAKDCATSFPNITSGQAQGVGDIVCDSKYSDIEPSTGGEVVLKVLDPSFEIENPYSPYIQDLVTLTNLRINFTKLHTLGDALLGRRQNDSLDKYYYALYEMIVRGSCFCNGHASECRPMQKMRGDVFSPPGMVHGQCVCQHNTDGPNCERCKDFFQDAPWRPAADLQDNACRSCSCNSHSSRCHFDMTTYLASGGLSGGVCEDCQHNTEGQHCDRCRPLFYRDPLKTISDPYACIPCECDPDGTISGGICVSHSDPALGSVAGQCLCKENVEGAKCDQCKPNHYGLSATDPLGCQPCDCNPLGSLPFLTCDVDTGQCLCLSYVTGAHCEECTVGYWGLGNHLHGCSPCDCDIGGAYSNVCSPKNGQCECRPHVTGRSCSEPAPGYFFAPLNFYLYEAEEATTLQGLAPLGSETFGQSPAVHVVLGEPVPGNPVTWTGPGFARVLPGAGLRFAVNNIPFPVDFTIAIHYETQSAADWTVQIVVNPPGGSEHCIPKTLQSKPQSFALPAATRIMLLPTPICLEPDVQYSIDVYFSQPLQGESHAHSHVLVDSAAVQWHNLGSLQPPPPECKQFSCFSFPSSWDYRHPPPHLANFCIFSRDGVSPHWPGWSQTPDLR

SEQ ID NO: 14868 - protein, 164 aa, Homo sapiens
MASLAAANAEFCFNLFREMDDNQGNGNVFFSSLSLFAALALVRLGAQDDSLSQIDKLLHVNTASGYGNSSNSQSGLQSQLKRVFSDINASHKDYDLSIVNGLFAEKVYGFHKDYIECAEKLYDAKVERVDFTNHLEDTRRNINKWVENETHGKIKNVIGEGGIS

SEQ ID NO: 14869 - protein, 985 aa, Homo sapiens
RFPPLNLQRPVHHVVPPSTVTEDYLRSFRPYHTTDDLRMSSLPPLGLDPATAAAYYHPSYLAPHPFPHPAFRMDDSYCLSALRSPFYPIPTPGSLPPLHPSAMHLHLSGVRYPPELSHSSLAALHSERMSGLSAERLQMDEELRREREREREREREREADREREKEREREREKEREQEKEREREKERERELERQREQRAREKELLAAKALEPSFLPVAELHGLRGHATEERGKPSEQLTPTRAEKLKDAGLQAPKPVQHPLHPVPTPHHTVPSLISNHGIFSLPSSSAATALLIQRTNEEEKWLARQRRLRQEKEDRQSQVSEFRQQVLEQHLDMGRPPVPAEAEHRPESTTRPGPNRHEPGGRDPPQHFGGPPPLISPKPQLHAAPTALWNPVSLMDNTLETRRAESHSLHSHPAAFEPSRQAAVPLVKVERVFCPEKAEEGPRKREPAPLDKYQPPPPPPREGGSLEHQPFLPGPGPFLAELEKSTQTILGQQRASLPQAATFGELSGPLKPGSPYRPPVPRAPDPAYIYDEFLQQRRRLVSKLDLEERRRREAQEKGYYYDLDDSYDESDEEEVRAHLRCVAEQPPLKLDTSSEKLEFLQLFGLTTQQQKEELVAQKRRKRRRMLRERSPSPPTIQSKRQTPSPRLALSTRYSPDEMNNSPNFEEKKKFLTIFNLTHISAEKRKEPATQQASLDVEKPVGVAASLSDIPKAAEPGKLEQVRPQELSRVQELAPASGEKARLSEAPGGKKSLSMLHYIRGAAPKDIPVPLSHSTNGKSKPWEPFVAEEFAHQFHESVLQSTQKALQKHKGSVAVLSAEQNHKVDTSVHYNIPELQSSSRAPPPQHNGQQEPPTARKGPPTQELDRDSEEEEEEDDEDGEDEEEVPKRKWQGIEAVFEAYQEHIEEQNLERQVLQTQCRRLEARHYSLSLTAEQLSHSVAELRSQKQKMVSERERLQAELDHLRKCLALPAMHWPRGYLKGYPR

SEQ ID NO: 14870 - protein, 439 aa, Homo sapiens
MDTMAFSLTVPTLALKMPNGLDGMSLSPPGARVPLHYLETELEDPFAFNEEDDDLKKGATVRKKLQSKLAQNRQRQRETEILKVRQEHFSPPPAPSQQQPPQQHSHLSPLSTSLKPPAPPQGSVCKSPQPQNTSLPMQGVAPTTHTIAQARQLSHKRPLPLLPSSRAPTVDPPRTDRILMKATAFSPHFSCISRLQRLVKLCTQKHQLDTDLFPHLGLDWSEESGEEPEDSEQASPYQVAWSIRETLRYQRHASDDDDAESRSSRVTQLCTYFQQKYKHLCRLERAESRQKKCRHTFRKALLQAASKEPECTGQLIQELRRAACSRTSISRTKLREVEPAACSGTVKGEQCANKALPFTRHCFQHILLNHSQQLFSSCTAKFADGQQCSVPVFDITHQTPLCEEHAKKMDNFLRGDNSRKVQHQQQRKPRKKTKPPALT

SEQ ID NO: 14871 - protein, 285 aa, Homo sapiens
MDLSAASHRIPLSDGNSIPIIGLGTYSEPKSTPKGACATSVKVAIDTGYRHIDGAYIYQNEHEVGEAIREKIAEGKVRREDIFYCGKLWATNHVPEMVRPTLERTLRVLQLDYVDLYIIEVPMAFKPGDEIYPRDENGKWLYHKSNLCATWEVECHPYFTQPKLLKFCQQHDIVITAYSPLGTSRNPIWVNVSSPPLLKDALLNSLGKRYNKTAAQIVLRFNIQRGVVVIPKSFNLERIKENFQIFDFSLTEEEMKDIEALNKNVRFVELLMWRDHPEYPFHDEY

SEQ ID NO: 14872 - protein, 396 aa, Homo sapiens
MPPKRNEKYKLPIPFPEGKVLDDMEGNQWVLGKKIGSGGFGLIYLAFPTNKPEKDARHVVKVEYQENGPLFSELKFYQRVAKKDCIKKWIERKQLDYLGIPLFYGSGLTEFKGRSYRFMVMERLGIDLQKISGQNGTFKKSTVLQLGIRMLDVLEYIHENEYVHGDIKAANLLLGYKNPDQVYLADYGLSYRYCPNGNHKQYQENPRKGHNGTIEFTSLDAHKGVALSRRSDVEILGYCMLRWLCGKLPWEQNLKDPVAVQTAKTNLLDELPQSVLKWAPSGSSCCEIAQFLVCAHSLAYDEKPNYQALKKILNPHGIPLGPLDFSTKGQSINVHTPNSQKVDSQKAATKQVNKAHNRLIEKKVHSERSAESCATWKVQKEEKLIGLMNNEAAQFR

SEQ ID NO: 14873 - protein, 1132 aa, Homo sapiens
MDAVNAFNQELFSLMDMKPPISRAKMILITKAAIKAIKCKPEYKVPGLYVIDSIVRQSRHQFGTDKDVFGPRFSKNITATFQYLYLCPSEDKSKIVRVLNLWQKNGVFKIEIIQPLLDMAAGTSNAAPVAENVTNNEGSPPPPVKVSSEPPTQATPNSVPAVPQLPSSDAFAAVAQLFQTTQGQQLQQILQTFQQPPKPQSPALDNAVMAQVQAITAQLKTTPTQPSEQKAAFPPPEQKTAFDKKLLDRFDYDDEPEAVEESKKEDTTAVTTTAPAAAVPPAPTATVPAAAAPAAASPPPPQAPFGFPGDGMQQPAYTQHQNMDQFQPRMMGIQQDPMHHQVPLPPNGQMPGFGLLPTPPFPPMAQPVIPPTPPVQQPFQASFQAQNEPLTQKPHQQEMEVEQPCIQEVKRHMSDNRKSRSRSASRSPKRRRSRSGSRSRRSRHRRSRSRSRDRRRHSPRSRSQERRDREKERERRQKGLPQVKPETASVCSTTLWVGQLDKRTTQQDVASLLEEFGPIESINMIPPRGCAYIVMVHRQDAYRALQKLSRGNYKVNQKSIKIAWALNKGIKADYKQYWDVELGVTYIPWDKVKPEELESFCEGGMLDSDTLNPDWKGIPKKPENEVAQNGGAETSHTEPVSPIPKPLPVPVPPIPVPAPITVPPPQVPPHQPGPPVVGALQPPAFTPPLGIPPPGFGPGVPPPPPPPPFLRPGFNPMHLPPGFLPPGPPPPITPPVSIPPPHTPPISIPNSTIAGINEDTTKDLSIGNPIPTVVSGARGNAESGDSVKMYGSAVPPAAPTNLPTPPVTQPVSLLGTQGVAPGPVIGLQAPSTGLLGARPGLIPLQRPPGMPPPHLQRFPLMPPRPMPPHMMHRGPPPGPGGFAMPPPHGMKGPFPPHGPFVRPGGMPGLGGPGPGPGGPEDRDGRQQPPQQPQQQPQPQAPQQPQQQQQQQPPPSQQPPPTQQQPQQFRNDNRQQFNSGRDQERFGRRSFGNRVENDRERYGNRNDDRDNSNRDRREWGRRSPDRDRHRDLEERNRRSSGHRDRERDSRDRESRREKEEARGKEKPEVTDRAGGNKTVEPPISQVGNVDTASELEKGVSEAAVLKPSEELPAEATSSVEPEKDSGSAAEAPR

SEQ ID NO: 14874 - protein, 1018 aa, Homo sapiens
MNLQAQPKAQNKRKRCLFGGQEPAPKEQPPPLQPPQQSIRVKEEQYLGHEGPGGAVSTSQPVELPPPSSLALLNSVVYGPERTSAAMLSQQVASVKWPNSVMAPGRGPERGGGGGVSDSSWQQQPGQPPPHSTWNCHSLSLYSATKGSPHPGVGVPTYYNHPEALKREKAGGPQLDRYVRPMMPQKVQLEVGRPQAPLNSFHAAKKPPNQSLPLQPFQLAFGHQVNRQVFRQGPPPPNPVAAFPPQKQQQQQQPQQQQQQQQAALPQMPLFENFYSMPQQPSQQPQDFGLQPAGPLGQSHLAHHSMAPYPFPPNPDMNPELRKALLQDSAPQPALPQVQIPFPRRSRRLSKEGILPPSALDGAGTQPGQEATGNLFLHHWPLQQPPPGSLGQPHPEALGFPLELRESQLLPDGERLAPNGREREAPAMGSEEGMRAVSTGDCGQVLRGGVIQSTRRRRRASQEANLLTLAQKAVELASLQNAKDGSGSEEKRKSVLASTTKCGVEFSEPSLATKRAREDSGMVPLIIPVSVPVRTVDPTEAAQAGGLDEDGKGPEQNPAEHKPSVIVTRRRSTRIPGTDAQAQAEDMNVKLEGEPSVRKPKQRPRPEPLIIPTKAGTFIAPPVYSNITPYQSHLRSPVRLADHPSERSFELPPYTPPPILSPVREGSGLYFNAIISTSTIPAPPPITPKSAHRTLLRTNSAEVTPPVLSVMGEATPVSIEPRINVGSRFQAEIPLMRDRALAAADPHKADLVWQPWEDLESSREKQRQVEDLLTAACSSIFPGAGTNQELALHCLHESRGDILETLNKLLLKKPLRPHNHPLATYHYTGSDQWKMAERKLFNKGIAIYKKDFFLVQKLIQTKTVAQCVEFYYTYKKQVKIGRNGTLTFGDVDTSDEKSAQEEVEVDIKTSQKFPRVPLPRRESPSEERLEPKREVKEPRKEGEEEVPEIQEKEEQEEGRERSRRAAAVKATQTLQANESASDILILRSHESNAPGSAGGQASEKPREGTGKSRRALPF

SEQ ID NO: 14875 - protein, 862 aa, Homo sapiens
MHSSWIPRGNYIESNRDDCTVSLIYAVHLKKSGYVFFEYQYVDNNIFFEFFIQNDQCQEMDTTTDKWVKLTDNGEWGSHSVMLKSGTNILYWRTTGILMGSKAVKPVLVKNITIEGVAYTSECFPCKPGTFSNKPGSFNCQVCPRNTYSEKGAKECIRCKDDSQFSEEGSSECTERPPCTTKDYFQIHTPCDEEGKTQIMYKWIEPKICREDLTDAIRLPPSGEKKDCPPCNPGFYNNGSSSCHPCPPGTFSDGTKECRPCPAGTEPALGFEYKWWNVLPGNMKTSCFNVGNSKCDGMNGWEVAGDHIQSGAGGSDNDYLILNLHIPGFKPPTSMTGATGSELGRITFVFETLCSADCVLYFMVDINRKSTNVVESWGGTKEKQAYTHIIFKNATFTFTWAFQRTNQGQDNRRFINDMVKIYSITATNAVDGVASSCRACALGSEQSGSSCVPCPPGHYIEKETNQCKECPPDTYLSIHQVYGKEACIPCGPGSKNNQDHSVCYSDCFFYHEKENQSLHYDFSNLSSVGSLMNGPSFTSKGTKYFHFFNISLCGHEGKKMALCTNNITDFTVKEIVAGSDDYTNLVGAFVCQSTIIPSESKGFRAALSSQSIILADTFIGVTVETTLKNINIKEDMFPVPTSQIPDVHFFYKSSTATTSCINGRSTAVKMRCNPTKSGAGVISVPSKCPAGTCDGCTFYFLWESAEACPLCTEHDFHEIEGACKRGFQETLYVWNEPKWCIKGISLPEKKLATCETVDFWLKVGAGVGAFTAVLLVALTCYFWKKNQKLEYKYSKLVMTTNSKECELPAADSCAIMEGEDNEEEVVYSNKQSLLGKLKSLATKEKEDHFESVQLKTSRSPNI

SEQ ID NO: 14876 - protein, 213 aa, Homo sapiens
MSDDIDWLRSHRGVCKVDLYNPEGQQDQDRKVICFVDVSTLNVEDKDYKDAASSSSEGNLNLGSLEEKEIIVIKDTEKKDQSKTEGSVCLFKQAPSDPVSVLNWLLSDLQKYALGFQHALSPSTSTCKHKVGDTEGEYHRASSENCYSVYADQVNIDYLMNRPQNLRLEMTAAKNTNNNQNTCEEDCPGSTMGYMAQSTQYEKCGGGQSAKAL

SEQ ID NO: 14877 - protein, 69 aa, Homo sapiens
MGTRDDVPEAKVLVPVAVYCGSIPRTSAGPRVLPPGSINSSLPHGEGSLQPEPRALLNNEEPSQLLRGL

SEQ ID NO: 14878 - protein, 97 aa, Homo sapiens
MPLARDLLHPSLEEEKKKHKKKRLVQSPNSYFMDVKCPGCYKITTVFSHAQTVVLCVGCSTVLCQPTGGKARLTEGISFGILQPSDEIDDYKCLYLH

SEQ ID NO: 14879 - protein, 216 aa, Homo sapiens
MWPHSAGARPWASTLTGKDPRVMACWCLDGLPSGLAEPWRELWRWRSRPLHCVPPFSPLARSSRDHRNLRRRVEALPRILKGNIDGWRQNLEPSNNVEMFPPSGSTGLIPPSHFQARPLSTLPRMAPTWLSDIPLVQPPGHQDVSERRLDTQRPQVTMWERDVSSDRQEPGRRGRSWGLEGSQALSQQAEVIVRQLQELRRLEEEVRLLRETSLQQ

SEQ ID NO: 14880 - protein, 415 aa, Homo sapiens
MNVTSIALRAETWLLAAWHVKVPPMWLEACINWIQEENNNVNLSQAQMNKQVFEQWLLTDLRDLEHPLLPDGILEIPKGELNGFYALQINSLVDVSQPAYSQIQKLRGKNTTNDLVTAEAQVTPKPWEAKPSRMLMLQLTDGIVQIQGMEYQPIPILHSDLPPGTKILIYGNISFRLGVLLLKPENVKVLGGEVDALLEEYAQEKVLARLIGEPDLVVSVIPNNSNENIPRVTDVLDPALGPSDEELLASLDENDELTANNDTSSERCFTTGSSSNTIPTRQSSFEPEFVISPRPKEEPSNLSIHVMDGELDDFSLEEALLLEETVQKEQMETKELQPLTFNRNADRSIERFSHNPNTTNNFSLTCKNGNNNWSEKNVSEQMTNEDKSFGCPSVRDQNRSIFSVHCNVPLAHDFT

SEQ ID NO: 14881 - protein, 634 aa, Homo sapiens
MKIRYISALNCFGSCSLDSNHSLVLESLKRLEDNLPVREFSMPRGANTFCYCVKANVIVTGGDDKVIRLWHPNISTKPVGKLVGHMFSIAEIVTNEKDQHVVSLSSAKVFRVWDIQTLSLLQVFHDSQGGPGDMQIYSMIYDANHGMLITGSSVMDMYPLTRMIQDTKQVPHTHEREINVMLYNKYFHQVLTICSESIIRVWELETGLQVYQILEPHGFNTEVTSAAVDESGFLFATGAYNGTVRIWDFGSGQEMKVLPEGKDWKEDEHCLRRLIFLKAQEKHQQLVLALERNGTIKMIQGKEDDIYLMVIWELPDVVPFLQDGKHAVHLRMSTRDRNMAIPFPDVELIVERNFSQPTDNPTMDLLRVNCIDLLQVEGYNLIAAGTLNEGHVILCNISSFLDPPHDEKKFKQLLSWRAHSLEIIQVIYVEEKQVVLTASIDGSVRLWHALNGHYCGYFGQRRLFELSQTRDFILPCDVTEYPIEIKEESKFTEKQKYEYPLIFDREKWRKMSSVSLLFKRTPPKAFEVEQDFKFFKSLSSPKIRRYPLEGFVTENREAGIVFGSLPIYSISSPTSLRFLPLIGVEAQKDSSDGITGKKKGGHVQREKVTRRRSLKKNLVPQINLASSFFPAIPK

SEQ ID NO: 14882 - protein, 1023 aa, Homo sapiens
MPIRPDLQQLEKCIDDALRKNDFKPLKTLLQIDICEDVKIKCSKQFFHKVDNLICRELNKEDIHNVSAILVSVGRCGKNISVLGQAGLLTMIKQGLIQKMVAWFEKSKDIIQSQGNSKDEAVLNMIEDLVDLLLVIHDVSDEGKKQVVESFVPRICSLVIDSRVNICIQQEIIKKMNAMLDKMPQDARKILSNQEMLILMSSMGERILDAGDYDLQVGIVEALCRMTTEKQRQELAHQWFSMDFIAKAFKRIKDSEFETDCRIFLNLVNGMLGDKRRVFTFPCLSAFLDKYELQIPSDEKLEEFWIDFNLGSQTLSFYIAGDNDDHQWEAVTVPEEKVQIYSIEVRESKKLLTIILKNTVKISKREGKELLLYFDASLEITNVTQKIFGATKHRESIRKQGISVAKTSLHILFDASGSQILVPESQISPVGEELVSLKEKSKSPKEFAKPSKYIKNSDKGNRNNSQLEKTTPSKRKMSEASMIVSGADRYTMRSPVLFSNTSIPPRRRRIKPPLQMTSSAEKPSVSQTSENRVDNAASLKSRSSEGRHRRDNIDKHIKTAKCVENTENKNVEFPNQNFSELQDVIPDSQAAEKRDHTILPGVLDNICGNKIHSKWACWTPVTNIELCNNQRASTSSGDTLNQDIVINKKLTKQKSSSSISDHNSEGTGKVKYKKEQTDHIKIDKAEVEVCKKHNQQQNHPKYSGQKNTENAKQSDWPVESETTFKSVLLNKTIEESLIYRKKYILSKDVNTATCDKNPSASKNVQSHRKAEKELTSELNSWDSKQKKMREKSKGKEFTNVAESLISQINKRYKTKDDIKSTRKLKESLINSGFSNKPVVQLSKEKVQKKSYRKLKTTFVNVTSECPVNDVYNFNLNGADDPIIKLGIQEFQATAKEACADRSIRLVGPRNHDELKSSVKTKDKKIITNHQKKNLFSDTETEYRCDDSKTDISWLREPKSKPQLIDYSRNKNVKNHKSGKSRSSLEKGQPSSKMTPSKNITKKMDKTIPEGRIRLPRKATKTKK

SEQ ID NO: 14883 - protein, 745 aa, Homo sapiens
MKGFKLSCTASNSNRSTPACSPILRKRSRSPTPQNQDGDTMVEKGSDHSSDKSPSTPEQGVQRSCSSQSGRSGGKNSKSHKRLSKKSQSWYNVLSPTYKQRNEDFRKLFKQLPDTERLIVDYSCALQRDILLQGRLYLSENWICFYSNIFRWETLLTVRLKDICSMTKEKTARLIPNAIQVCTDSEKHFFTSFGARDRTYMMMFRLWQNALLEKPLCPKELWHFVHQCYGNELGLTSDDEDYVPPDDDFNTMGYCEEIPVEENEVNDSSSKSSIETKPDASPQLPKKSITNSTLTSTGSSEAPVSFDGLPLEEEALEGDGSLEKELAIDNIMGEKIEMIAPVNSPSLDFNDNEDIPTELSDSSDTHDEGEVQAFYEDLSGRQYVNEVFNFSVDKLYDLLFTNSPFQRDFMEQRRFSDIIFHPWKKEENGNQSRVILYTITLTNPLAPKTATVRETQTMYKASQESECYVIDAEVLTHDVPYHDYFYTINRYTLTRVARNKSRLRVSTELRYRKQPWGLVKTFIEKNFWSGLEDYFRHLESELAKTESTYLAEMHRQSPKEKASKTTTVRRRKRPHAHLRVPHLEEVMSPVTTPTDEDVGHRIKHVAGSTQTRHIPEDTPNGFHLQSVSKLLLVISCVICFSLVLLVILNMMLFYKLWMLEYTTQTLTAWQGLRLQERLPQSQTEWAQLLESQQKYHDTELQKWREIIKSSVMLLDQMKDSLINLQNGIRSRDYTSESEEKRNRYH

SEQ ID NO: 14884 - protein, 955 aa, Homo sapiens
MLPGRLCWVPLLLALGVGSGSGGGGDSRQRRLLAAKVNKHKPWIETSYHGVITENNDTVILDPPLVALDKDAPVPFAGEICAFKIHGQELPFEAVVLNKTSGEGRLRAKSPIDCELQKEYTFIIQAYDCGAGPHETAWKKSHKAVVHIQVKDVNEFAPTFKEPAYKAVVTEGKIYDSILQVEAIDEDCSPQYSQICNYEIVTTDVPFAIDRNGNIRNTEKLSYDKQHQYEILVTAYDCGQKPAAQDTLVQVDVKPVCKPGWQDWTKRIEYQPGSGSMPLFPSIHLETCDGAVSSLQIVTELQTNYIGKGCDRETYSEKSLQKLCGASSGIIDLLPSPSAATNWTAGLLVDSSEMIFKFDGRQGAKVPDGIVPKNLTDQFTITMWMKHGPSPGVRAEKETILCNSDKTEMNRHHYALYVHNCRLVFLLRKDFDQADTFRPAEFHWKLDQICDKEWHYYVINVEFPVVTLYMDGATYEPYLVTNDWPIHPSHIAMQLTVGACWQGGEVTKPQFAQFFHGSLASLTIRPGKMESQKVISCLQACKEGLDINSLESLGQGIKYHFNPSQSILVMEGDDIGNINRALQKVSYINSRQFPTAGVRRLKVSSKVQCFGEDVCISIPEVDAYVMVLQAIEPRITLRGTDHFWRPAAQFESARGVTLFPDIKIVSTFAKTEAPGDVKTTDPKSEVLEEMLHNLDFCDILVIGGDLDPRQECLELNHSELHQRHLDATNSTAGYSIYGVGSMSRYEQVLHHIRYRNWRPASLEARRFRIKCSELNGRYTSNEFNLEVSILHEDQVSDKEHVNHLIVQPPFLQSVHHPESRSSIQHSSVVPSIATVVIIISVCMLVFVVAMGVYRVRIAHQHFIQETEAAKESEMDWDDSALTITVNPMEKHEGPGHGEDETEGEEEEEAEEEMSSSSGSDDSEEEEEEEGMGRGRHGQNGARQAQLEWDDSTLPY

SEQ ID NO: 14885 - protein, 811 aa, Homo sapiens
MNKVEQKSQESVSFKDVTVGFTQEEWQHLDPSQRALYRDVMLENYSNLVSVGYCVHKPEVIFRLQQGEEPWKQEEEFPSQSFPEVWTADHLKERSQENQSKHLWEVVFINNEMLTKEQGDVIGIPFNVDVSSFPSRKMFCQCDSCGMSFNTVSELVISKINYLGKKSDEFNACGKLLLNIKHDETHTQEKNEVLKNRNTLSHHEETLQHEKIQTLEHNFEYSICQETLLEKAVFNTQKRENAEENNCDYNEFGRTLCDSSSLLFHQISPSRDNHYEFSDCEKFLCVKSTLSKPHGVSMKHYDCGESGNNFRRKLCLSHLQKGDKGEKHFECNECGKAFWEKSHLTRHQRVHTGQKPFQCNECEKAFWDKSNLTKHQRSHTGEKPFECNECGKAFSHKSALTLHQRTHTGEKPYQCNACGKTFCQKSDLTKHQRTHTGLKPYECYECGKSFRVTSHLKVHQRTHTGEKPFECLECGKSFSEKSNLTQHQRIHIGDKSYECNACGKTFYHKSLLTRHQIIHTGWKPYECYECGKTFCLKSDLTVHQRTHTGQKPFACPECGKFFSHKSTLSQHYRTHTGEKPYECHECGKIFYNKSYLTKHNRTHTGEKPYECNECGKAFYQKSQLTQHQRIHIGEKPYKCNECGKAFCHKSALIVHQRTHTQEKPYKCNECGKSFCVKSGLIFHERKHTGEKPYECNECGKFFRHKSSLTVHHRAHTGEKSCQCNECGKIFYRKSELAQHQRSHTGEKPYECNTCRKTFSQKSNLIVHQRRHIGENLMNEMDIRNFQPQVSLHNASEYSHCGESPDDILNVQ

SEQ ID NO: 14886 - protein, 1039 aa, Homo sapiens
MVSSAQMGFNLQALLEQLSQDELSKFKYLITTFSLAHELQKIPHKEMASLQVFEKMHRMDLSERAKDEVREAALKSFNKRKPLSLGITRKERPPLDVDEMLERFKTEAQAFTETKGNVICLGKEVFKGKKPDKDNRCRYILKTKFREMWKSWPGDSKEVQVMAERYKMLIPFSNPRVLPGPFSYTVVLYGPAGLGKTTLAQKLMLDWAEDNLIHKFKYAFYLSCRELSRLGPCSFAELVFRDWPELQDDIPHILAQARKILFVIDGFDELGAAPGALIEDICGDWEKKKPVPVLLGSLLNRVMLPKAALLVTTRPRALRDLRILAEEPIYIRVEGFLEEDRRAYFLRHFGDEDQAMRAFELMRSNAALFQLGSAPAVCWIVCTTLKLQMEKGEDPVPTCLTRTGLFLRFLCSRFPQGAQLRGALRTLSLLAAQGLWAQTSVLHREDLERLGVQESDLRLFLDGDILRQDRVSKGCYSFIHLSFQQFLTALFYTLEKEEEEDRDGHTWDIGDVQKLLSGVERLRNPDLIQAGYYSFGLANEKRAKELEATFGCRMSPDIKQELLRCDISCKGGHSTVTDLQELLGCLYESQEEELVKEVMAQFKEISLHLNAVDVVPSSFCVKHCRNLQKMSLQVIKENLPENVTASESDAEVERSQDDQHMLPFWTDLCSIFGSNKDLMGLAINDSFLSASLVRILCEQIASDTCHLQRVVFKNISPADAHRNLCLALRGHKTVTYLTLQGNDQDDMFPALCEVLRHPECNLRYLGLVSCSATTQQWADLSLALEVNQSLTCVNLSDNELLDEGAKLLYTTLRHPKCFLQRLSLENCHLTEANCKDLAAVLVVSRELTHLCLAKNPIGNTGVKFLCEGLRYPECKLQTLVLWNCDITSDGCCDLTKLLQEKSSLLCLDLGLNHIGVKGMKFLCEALRKPLCNLRCLWLWGCSIPPFSCEDLCSALSCNQSLVTLDLGQNPLGSSGVKMLFETLTCSSGTLRTLRLKIDDFNDELNKLLEEIEEKNPQLIIDTEKHHPWAERPSSHDFMI

SEQ ID NO: 14887 - protein, 1119 aa, Homo sapiens
MGVDFDVKTFCHNLRATKPPYECPVETCRKVYKSYSGIEYHLYHYDHDNPPPPQQTPLRKHKKKGRQSRPANKQSPSPSEVSQSPGREVMSYAQAQRMVEVDLHGRVHRISIFDNLDVVSEDEEAPEEAPENGSNKENTETPAATPKSGKHKNKEKRKDSNHHHHHNVSASTTPKLPEVVYRELEQDTPDAPPRPTSYYRYIEKSAEELDEEVEYDMDEEDYIWLDIMNERRKTEGVSPIPQEIFEYLMDRLEKESYFESHNKGDPNALVDEDAVCCICNDGECQNSNVILFCDMCNLAVHQECYGVPYIPEGQWLCRRCLQSPSRAVDCALCPNKGGAFKQTDDGRWAHVVCALWIPEVCFANTVFLEPIDSIEHIPPARWKLTCYICKQRGSGACIQCHKANCYTAFHVTCAQQAGLYMKMEPVRETGANGTSFSVRKTAYCDIHTPPGSARRLPALSHSEGEEDEDEEEDEGKGWSSEKVKKAKAKSRIKMKKARKILAEKRAAAPVVSVPCIPPHRLSKITNRLTIQRKSQFMQRLHSYWTLKRQSRNGVPLLRRLQTHLQSQRNCDQVGRDSEDKNWALKEQLKSWQRLRHDLERARLLVELIRKREKLKRETIKVQQIAMEMQLTPFLILLRKTLEQLQEKDTGNIFSEPVPLSEVPDYLDHIKKPMDFFTMKQNLEAYRYLNFDDFEEDFNLIVSNCLKYNAKDTIFYRAAVRLREQGGAVLRQARRQAEKMGIDFETGMHIPHSLAGDEATHHTEDAAEEERLVLLENQKHLPVEEQLKLLLERLDEVNASKQSVGRSRRAKMIKKEMTALRRKLAHQRETGRDGPERHGPSSRGSLTPHPAACDKDGQTDSAAEESSSQETSKDLPANGFSGGNQPVKKSFLVYRNDCSLPRSSSDSESSSSSSSSAASDRTSTTPSKQGRGKPSFSRGTFPEDSSEDTSGTENEAYSVGTGRGVGHSMVRKSLGRGAGWLSEDEDSPLDALDLVWAKCRGYPSYPALIIDPKMPREGMFHHGVPIPVPPLEVLKLGEQMTQEAREHLYLVLFFDNKRTWQWLPRTKLVPLGVNQDLDKEKMLEGRKSNIRKSVQIAYHRALQHRSKVQGEQSSETSDSD

SEQ ID NO: 14888 - protein, 210 aa, Homo sapiens
MDLEEFLSENGIPPSPSQHDHSPHPPGLQPASSAAPSVMDLSSRASAPLHPGIPSPNCMQSPIRPGQLLPANRNTPSPIDPDTIQVPVGYEPDPADLALSSIPGQEMFDPRKRKFSEEELKPQPMIKKARKVFIPDDLKDDKYWARRRKNNMAAKRSRDARRLKENQIAIRASFLEKENSALRQEVADLRKELGKCKNILAKYEARHGPL

SEQ ID NO: 14889 - protein, 465 aa, Homo sapiens
VEESAAGEQSSGTQIPRHLEEKDLKPIFEQFGRIFELTVIKDKYTGLHKGCAFLTYCARDSALKAQSALHEQKTLPGMNRPIQVKPADSESRGDRKLFVGMLGKQQTDEDVRKMFEPFGTIDECTVLRGPDGTSKGCAFVKFQTHAEAQAAINTLHSSRTLPGASSSLVVKFADTEKERGLRRMQQVATQLGMFSPIALQFGAYSAYTQALMQQQAALVAAHSAYLSPMATMAAVQMQHMAAINANGLIATPITPSSGTSTPPAIAATPVSAIPAALGVNGYSPVPTQPTGQPAPDALYPNGVHPYPAQSPAAPVDPLQQAYAGMQHYTAAYPAAYSLVAPAFPQPPALVAQQPPPPPQQQQQQQQQQQQQQQREGPDGCNIFIYHLPQEFTDSEILQMFVPFGHVISAKVFVDRATNQSKCFGFVSFDNPASAQAAIQAMNGFQIGMKRLKVQLKRPKDANRPY

SEQ ID NO: 14890 - protein, 1885 aa, Homo sapiens
MSGALLWPLLPLLLLLLSARDGVRAAQPQAPGYLIAAPSVFRAGVEEVISVTIFNSPREVTVQAQLVAQGEPVVQSQGAILDKGTIKLKVPTGLRGQALLKVWGRGWQAEEGPLFHNQTSVTVDGRGASVFIQTDKPVYRPQHRVLISIFTVSPNLRPVNEKLEAYILDPRGSRMIEWRHLKPFCCGITNMSFPLSDQPVLGEWFIFVEMQGHAYNKSFEVQKYVLPKFELLIDPPRYIQDLDACETGTVRARYTFGKPVAGALMINMTVNGVGYYSHEVGRPVLRTTKILGSRDFDICVRDMIPADVPEHFRGRVSIWAMVTSVDGSQQVAFDDSTPVQRQLVDIRYSKDTRKQFKPGLAYVGKVELSYPDGSPAEGVTVQIKAELTPKDNIYTSEVVSQRGLVGFEIPSIPTSAQHVWLETKVMALNGKPVGAQYLPSYLSLGSWYSPSQCYLQLQPPSHPLQVGEEAYFSVKSTCPCNFTLYYEVAARGNIVLSGQQPAHTTQQRSKRAAPALEKPIRLTHLSETEPPPAPEAEVDVCVTSLHLAVTPSMVPLGRLLVFYVRENGEGVADSLQFAVETFFENQVSVTYSANETQPGEVVDLRIRAARGSCVCVAAVDKSVYLLRSGFRLTPAQVFQELEDYDVSDSFGVSREDGPFWWAGLTAQRRRRSSVFPWPWGITKDSGFAFTETGLVVMTDRVSLNHRQDGGLYTDEAVPAFQPHTGSLVAVAPSRHPPRTEKRKRTFFPETWIWHCLNISDPSGEGTLSVKVPDSITSWVGEAVALSTSQGLGIAEPSLLKTFKPFFVDFMLPALIIRGEQVKIPLSVYNYMGTCAEVYMKLSVPKGIQFVGHPGKRHVTKKMCVAPGEAEPIWVVLSFSDLGLNNITAKALAYGDTNCCRDGRSSKHPEENHADRRVPIGVDHVRRSVMVEAEGVPRAYTYSAFFCPSERVHISTPNKYEFQYVQRPLRLTRFDVAVRAHNDARVALSSGPQDTAGMIEIVLGGHQNTRSWISTSKMGEPVASAHTAKILSWDEFRTFWISWRGGLIQVGHGPEPSNESVIVAWTLPRPPEVQFIGFSTGWGSMGEFRIWRKMEVDESYSEAFTLGVPHGAIPGSERATASIIGDVMGPTLNHLNNLLRLPFGCGEQNMIHFAPNVFVLKYLQKTQQLSPEVERETTDYLVQGYQRQLTYKRQDGSYSAFGERDASGSMWLTAFVLKSFAQARSFIFVDPRELAAAKSWIIQQQQADGSFLAVGRVLNKDIQGGIHGTVPLTAYVVVALLETGTASEEERGSTDKARHFLESAAPLAMDPYSCALTTYALTLLRSPAAPEALRKLRSLAIMRDGVTHWSLSNSWDVDKGTFLSFSDRVSQSVVSAEVEMTAYALLTYTLLGDVAAALPVVKWLSQQRNALGGFSSTQDTCVALQALAEYAILSYAGGINLTVSLASTNLDYQETFELHRTNQKVLQTAAIPSLPTGLFVSAKGDGCCLMQIDVTYNVPDPVAKPAFQLLVSLQEPEAQGRPPPMPASAAEGSRGDWPPADDDDPAADQHHQEYKVMLEVCTRWLHAGSSNMAVLEVPLLSGFRADIESLEQLLLDKHMGMKRYEVAGRRVLFYFDEIPSRCLTCVRFRALRECVVGRTSALPVSVYDYYEPAFEATRFYNVSTHSPLARELCAGPACNEVERAPARGPGWFPGESGPAVAPEEGAAIARCGCDHDCGAQGNPVCGSDGVVYASACRLREAACRQAAPLEPAPPSCCALEQRLPASSSSTYGDDLASVAPGPLQQDVKLNGAGLEVEDSDPEPEGEAEDRVTAGPRPPVSSGNLESSTQSASPFHRWGQTPAPQRHSGRVVGAHRPGLLSPVFVYSPAFQSGGEEGLWMSNTCTLR

SEQ ID NO: 14891 - protein, 3661 aa, Homo sapiens
MSRRAPGSRLSSGGGGGGTKYPRSWNDWQPRTDSASADPDNLKYSSSRDRGGSSSYGLQPSNSAVVSRQRHDDTRVHADIQNDEKGGYSVNGGSGENTYGRKSLGQELRVNNVTSPEFTSVQHGSRALATKDMRKSQERSMSYSDESRLSNLLRRITREDDRDRRLATVKQLKEFIQQPENKLVLVKQLDNILAAVHDVLNESSKLLQELRQEGACCLGLLCASLSYEAEKIFKWIFSKFSSSAKDEVKLLYLCATYKALETVGEKKAFSSVMQLVMTSLQSILENVDTPELLCKCVKCILLVARCYPHIFSTNFRDTVDILVGWHIDHTQKPSLTQQVSGWLQSLEPFWVADLAFSTTLLGQFLEDMEAYAEDLSHVASGESVDEDVPPPSVSLPKLAALLRVFSTVVRSIGERFSPIRGPPITEAYVTDVLYRVMRCVTAANQVFFSEAVLTAANECVGVLLGSLDPSMTIHCDMVITYGLDQLENCQTCGTDYIISVLNLLTLIVEQINTKLPSSFVEKLFIPSSKLLFLRYHKEKEVVAVAHAVYQAVLSLKNIPVLETAYKLILGEMTCALNNLLHSLQLPEACSEIKHEAFKNHVFNVDNAKFVVIFDLSALTTIGNAKNSLIGMWALSPTVFALLSKNLMIVHSDLAVHFPAIQYAVLYTLYSHCTRHDHFISSSLSSSSPSLFDGAVISTVTTATKKHFSIILNLLGILLKKDNLNQDTRKLLMTWALEAAVLMKKSETYAPLFSLPSFHKFCKGLLANTLVEDVNICLQACSSLHALSSSLPDDLLQRCVDVCRVQLVHSGTRIRQAFGKLLKSIPLDVVLSNNNHTEIQEISLALRSHMSKAPSNTFHPQDFSDVISFILYGNSHRTGKDNWLERLFYSCQRLDKRDQSTIPRNLLKTDAVLWQWAIWEAAQFTVLSKLRTPLGRAQDTFQTIEGIIRSLAAHTLNPDQDVSQWTTADNDEGHGNNQLRLVLLLQYLENLEKLMYNAYEGCANALTSPPKVIRTFFYTNRQTCQDWLTRIRLSIMRVGLLAGQPAVTVRHGFDLLTEMKTTSLSQGNELEVTIMMVVEALCELHCPEAIQGIAVWSSSIVGKNLLWINSVAQQAEGRFEKASVEYQEHLCAMTGVDCCISSFDKSVLTLANAGRNSASPKHSLNGESRKTVLSKPTDSSPEVINYLGNKACECYISIADWAAVQEWQNAIHDLKKSTSSTSLNLKADFNYIKSLSSFESGKFVECTEQLELLPGENINLLAGGSKEKIDMKKLLPNMLSPDPRELQKSIEVQLLRSSVCLATALNPIEQDQKWQSITENVVKYLKQTSRIAIGPLRLSTLTVSQSLPVLSTLQLYCSSALENTVSNRLSTEDCLIPLFSEALRSCKQHDVRPWMQALRYTMYQNQLLEKIKEQTVPIRSHLMELGLTAAKFARKRGNVSLATRLLAQCSEVQLGKTTTAQDLVQHFKKLSTQGQVDEKWGPELDIEKTKLLYTAGQSTHAMEMLSSCAISFCKSVKAEYAVAKSILTLAKWIQAEWKEISGQLKQVYRAQHQQNFTGLSTLSKNILTLIELPSVNTMEEEYPRIESESTVHIGVGEPDFILGQLYHLSSVQAPEVAKSWAALASWAYRWGRKVVDNASQGEGVRLLPREKSEVQNLLPDTITEEEKERIYGILGQAVCRPAGIQDEDITLQITESEDNEEDDMVDVIWRQLISSCPWLSELDESATEGVIKVWRKVVDRIFSLYKLSCSAYFTFLKLNAGQIPLDEDDPRLHLSHRVEQSTDDMIVMATLRLLRLLVKHAGELRQYLEHGLETTPTAPWRGIIPQLFSRLNHPEVYVRQSICNLLCRVAQDSPHLILYPAIVGTISLSSESQASGNKFSTAIPTLLGNIQGEELLVSECEGGSPPASQDSNKDEPKSGLNEDQAMMQDCYSKIVDKLSSANPTMVLQVQMLVAELRRVTVLWDELWLGVLLQQHMYVLRRIQQLEDEVKRVQNNNTLRKEEKIAIMREKHTALMKPIVFALEHVRSITAAPAETPHEKWFQDNYGDAIENALEKLKTPLNPAKPGSSWIPFKEIMLSLQQRAQKRASYILRLEEISPWLAAMTNTEIALPGEVSARDTVTIHSVGGTITILPTKTKPKKLLFLGSDGKSYPYLFKGLEDLHLDERIMQFLSIVNTMFATINRQETPRFHARHYSVTPLGTRSGLIQWVDGATPLFGLYKRWQQREAALQAQKAQDSYQTPQNPGIVPRPSELYYSKIGPALKTVGLSLDVSRRDWPLHVMKAVLEELMEATPPNLLAKELWSSCTTPDEWWRVTQSYARSTAVMSMVGYIIGLGDRHLDNVLIDMTTGEVVHIDYNVCFEKGKSLRVPEKVPFRMTQNIETALGVTGVEGVFRLSCEQVLHIMRRGRETLLTLLEAFVYDPLVDWTAGGEAGFAGAVYGGGGQQAESKQSKREMEREITRSLFSSRVAEIKVNWFKNRDEMLVVLPKLDGSLDEYLSLQEQLTDVEKLQGKLLEEIEFLEGAEGVDHPSHTLQHRYSEHTQLQTQQRAVQEAIQVKLNEFEQWITHYQAAFNNLEATQLASLLQEISTQMDLGPPSYVPATAFLQNAGQAHLISQCEQLEGEVGALLQQRRSVLRGCLEQLHHYATVALQYPKAIFQKHRIEQWKTWMEELICNTTVERCQELYRKYEMQYAPQPPPTVCQFITATEMTLQRYAADINSRLIRQVERLKQEAVTVPVCEDQLKEIERCIKVFLHENGEEGSLSLASVIISALCTLTRRNLMMEGAASSAGEQLVDLTSRDGAWFLEELCSMSGNVTCLVQLLKQCHLVPQDLDIPNPMEASETVHLANGVYTSLQELNSNFRQIIFPEALRCLMKGEYTLESMLHELDGLIEQTTDGVPLQTLVESLQAYLRNAAMGLEEETHAHYIDVARLLHAQYGELIQPRNGSVDETPKMSAGQMLLVAFDGMFAQVETAFSLLVEKLNKMEIPIAWRKIDIIREARSTQVNFFDDDNHRQVLEEIFFLKRLQTIKEFFRLCGTFSKTLSGSSSLEDQNTVNGPVQIVNVKTLFRNSCFSEDQMAKPIKAFTADFVRQLLIGLPNQALGLTLCSFISALGVDIIAQVEAKDFGAESKVSVDDLCKKAVEHNIQIGKFSQLVMNRATVLASSYDTAWKKHDLVRRLETSISSCKTSLQRVQLHIAMFQWQHEDLLINRPQAMSVTPPPRSAILTSMKKKLHTLSQIETSIATVQEKLAALESSIEQRLKWAGGANPALAPVLQDFEATIAERRNLVLKESQRASQVTFLCSNIIHFESLRTRTAEALNLDAALFELIKRCQQMCSFASQFNSSVSELELRLLQRVDTGLEHPIGSSEWLLSAHKQLTQDMSTQRAIQTEKEQQIETVCETIQNLVDNIKTVLTGHNRQLGDVKHLLKAMAKDEEAALADGEDVPYENSVRQFLGEYKSWQDNIQTVLFTLVQAMGQVRSQEHVEMLQEITPTLKELKTQSQSIYNNLVSFASPLVTDATNECSSPTSSATYQPSFAAAVRSNTGQKTQPDVMSQNARKLIQKNLATSADTPPSTVPGTGKSVACSPKKAVRDPKTGKAVQERNSYAVSVWKRVKAKLEGRDVDPNRRMSVAEQVDYVIKEATNLDNLAQLYEGWTAWV

SEQ ID NO: 14892 - protein, 1112 aa, Homo sapiens
MAAGKSGGSAGEITFLEALARSESKRDGGFKNNWSFDHEEESEGDTDKDGTNLLSVDEDEDSETSKGKKLNRRSEIVANSSGEFILKTYVRRNKSESFKTLKGNPIGLNMLSNNKKLSENTQNTSLCSGTVVHGRRFHHAHAQIPVVKTAAQSSLDRKERKEYPPHVQKVEINPVRLSRLQGVERIMKKTEESESQVEPEIKRKVQQKRHCSTYQPTPPLSPASKKCLTHLEDLQRNCRQAITLNESTGPLLRTSIHQNSGGQKSQNTGLTTKKFYGNNVEKVPIDIIVNCDDSKHTYLQTNGKVILPGAKIPKITNLKERKTSLSDLNDPIILSSDDDDDNDRTNRRESISPQPADSACSSPAPSTGKVEAALNENTCRAERELRSIPEDSELNTVTLPRKARMKDQFGNSIINTPLKRRKVFSQEPPDALALSCQSSFDSVILNCRSIRVGTLFRLLIEPVIFCLDFIKIQLDEPDHDPVEIILNTSDLTKCEWCNVRKLPVVFLQAIPAVYQKLSIQLQMNKEDKVWNDCKGVNKLTNLEEQYIILIFQNGLDPPANMVFESIINEIGIKNNISNFFAKIPFEEANGRLVACTRTYEESIKGSCGQKENKIKTVSFESKIQLRSKQEFQFFDEEEETGENHTIFIGPVEKLIVYPPPPAKGGISVTNEDLHCLNEGEFLNDVIIDFYLKYLVLEKLKKEDADRIHIFSSFFYKRLNQRERRNHETTNLSIQQKRHGRVKTWTRHVDIFEKDFIFVPLNEAAHWFLAVVCFPGLEKPKYEPNPHYHENAVIQKCSTVEDSCISSSASEMESCSQNSSAKPVIKKMLNKKHCIAVIDSNPGQEESDPRYKRNICSVKYSVKKINHTASENEEFNKGESTSQKVADRTKSENGLQNESLSSTHHTDGLSKIRLNYSDESPEAGKMLEDELVDFSEDQDNQDDSSDDGFLADDNCSSEIGQWHLKPTICKQPCILLMDSLRGPSRSNVVKILREYLEVEWEVKKGSKRSFSKDVMKGSNPKVPQQNNFSDCGVYVLQYVESFFENPILSFELPMNLANWFPPPRMRTKREEIRNIILKLQEDQSKEKRKHKDTYSTEAPLGEGTEQYVNSISD

SEQ ID NO: 14893 - protein, 777 aa, Homo sapiens
MFSLKPPKPTFRSYLLPPPQTDDKINSEPKIKKLEPVLLPGEIVVNEVNFVRKCIATDTSQYDLWGKLICSNFKISFITDDPMPLQKFHYRNLLLGEHDVPLTCIEQIVTVNDHKRKQKVLGPNQKLKFNPTELIIYCKDFRIVRFRFDESGPESAKKVCLAIAHYSQPTDLQLLFAFEYVGKKYHNSANKINGIPSGDGGGGGGGGNGAGGGSSQKTPLFETYSDWDREIKRTGASGWRVCSINEGYMISTCLPEYIVVPSSLADQDLKIFSHSFVGRRMPLWCWSHSNGSALVRMALIKDVLQQRKIDQRICNAITKSHPQRSDVYKSDLDKTLPNIQEVQAAFVKLKQLCVNEPFEETEEKWLSSLENTRWLEYVRAFLKHSAELVYMLESKHLSVVLQEEEGRDLSCCVASLVQVMLDPYFRTITGFQSLIQKEWVMAGYQFLDRCNHLKRSEKESPLFLLFLDATWQLLEQYPAAFEFSETYLAVLYDSTRISLFGTFLFNSPHQRVKQSTEFAISKNIQLGDEKGLKFPSVWDWSLQFTAKDRTLFHNPFYIGKSTPCIQNGSVKSFKRTKKSYSSTLRGMPSALKNGIISDQELLPRRNSLILKPKPDPAQQTDSQNSDTEQYFREWFSKPANLHGVILPRVSGTHIKLWKLCYFRWVPEAQISLGGSITAFHKLSLLADEVDVLSRMLRQQRSGPLEACYGELGQSRMYFNASGPHHTDTSGTPEFLSSSFPFSPVGNLCRRSILGTPLSKFLSGAKIWLSTETLANED

SEQ ID NO: 14894 - protein, 126 aa, Homo sapiens
MLLSLKPSEAPELDEDEGFGDWSQRPEQRQQHEGAQGALDSGEPPQCRSPEGEQEDRPGLHAYEKEDSDEVHLEELSLSKEGPGPEDTVQDNLGAAGAEEEQEEHQKCQQPRTPSPLVLEGTIEQS

SEQ ID NO: 14895 - protein, 377 aa, Homo sapiens
MSQWYELQQLDSKFLEQVHQLYDDSFPMEIRQYLAQWLEKQDWEHAANDVSFATIRFHDLLSQLDDQYSRFSLENNFLLQHNIRKSKRNLQDNFQEDPIQMSMIIYSCLKEERKILENAQRFNQCIEHEIKSLEDLQDEYDFKCKTLQNREHETNGVAKSDQKQEQLLLKKMYLMLDNKRKEVVHKIIELLNVTELTQNALINDELVEWKRRQQSACIGGPPNACLDQLQNWFTIVAESLQQVRQQLKKLEELEQKYTYEHDPITKNKQVLWDRTFSLFQQLIQSSFVVERQPCMPTHPQRPLVLKTGVQFTVKLRLLVKLQELNYNLKVKVLFDKDVNERNTVKGFRKFNILGTHTKVMNMEESTNGSLAAEFRHL

SEQ ID NO: 14896 - protein, 344 aa, Homo sapiens
MTRYHFAMNGKSFSVILEHFQDLVPKLMLHGTVFARMAPDQKTQLIEALQNVDYFVGMCGDGANDCGALKRAHGGISLSELEASVASPFTSKTPSISCVPNLIREGRAALITSFCVFKFMALYSIIQYFSVTLLYSILSNLGDFQFLFIDLAIILVVVFTMSLNPAWKELVAQRPPSGLISGALLFSVLSQIIICIGFQSLGFFWVKQQPWYEVWHPKSDACNTTGSGFWNSSHVDNETELDEHNIQNYENTTVFFISSFQYLIVAIAFSKGKPFRQPCYKNWQVLLLYILCRSQWIGGENAAYPGPWAVERRHQRQSTCIWRRSSWLIQNGHQNLRQPQKLKL

SEQ ID NO: 14897 - protein, 400 aa, Homo sapiens
MDFNMKKLASDAGIFFTRAVQFTEEKFGQAEKTELDAHFENLLARADSTKNWTEKILRQTEVLLQPNPSARVEEFLYEKLDRKVPSRVTNGELLAQYMADAASELGPTTPYGKTLIKVAEAEKQLGAAERDFIHTASISFLTPLRNFLEGDWKTISKERRLLQNRRLDLDACKARLKKAKAAEAKATTVPDFQETRPRNYILSASASALWNDEVDKAEQELRVAQTEFDRQAEVTRLLLEGISSTHVNHLRCLHEFVKSQTTYYAQCYRHMLDLQKQLGSSQGAIFPGTFVGTTEPASPPLSSTSPTTAAATMPVVPSVASLAPPGEASLCLEEVAPPASGTRKARVLYDYEAADSSELALLADELITVYSLPGMDPDWLIGERGNKKGKVPVTYLELLS

SEQ ID NO: 14898 - protein, 1185 aa, Homo sapiens
MCEVMPTINEGDRLGPPHGADADANFEQLMVNMLDEREKLLESLRESQETLAATQSRLQDAIHERDQLQRHLNSALPQEFATLTRELSMCREQLLEREEEISELKAERNNTRLLLEHLECLVSRHERSLRMTVVKRQAQSPSGVSSEVEVLKALKSLFEHHKALDEKVRERLRAALERVTTLEEQLAGAHQQVSALQQGAGVRDGAAEEEGTVELGPKRLWKEDTGRVEELQELLEKQNFELSQARERLVTLTTTVTELEEDLGTARRDLIKSEELSSKHQRDLREALAQKEDMEERITTLEKRYLAAQREATSIHDLNDKLENELANKESLHRQCEEKARHLQELLEVAEQKLQQTMRKAETLPEVEAELAQRIAALTKAEERHGNIEEHLRQLEGQLEEKNQELARTAVQVRQREKMNEDHNKRLSDTVDRLLSESNERLQLHLKERMAALEEKNTLIQELESSQRQIEEQHHHKGRLSEEIEKLRQEVDQLKGRGGPFVDGVHSRSHMGSAADVRFSLGTTTHAPPGVHRRYSALREESAKLALPLTVTLRSPTWMRMSQGVCCNLEYHSSGTLCGSSGPLPVPEMIQEEKESTELRAEEIETRVTSGSMEALNLKQLRKRGSIPTSLTALSLASASPPLSGRSTPKLTSRSAAQDLDRMGVMTLPSDLRKHRRKLLSPVSREENREDKATIKCETSPPSSPRTLRLEKLGHPALSQEEGKSALEDQGSNPSSSNSSQDSLHKGAKRKGIKSSIGRLFGKKEKGRLIQLSRDGATGHVLLTDSEFSMQEPMVPAKLGTQAEKDRRLKKKHQLLEDARRKGMPFAQWDGPTVVSWLELWVGMPAWYVAACRANVKSGAIMSALSDTEIQREIGISNALHRLKLRLAIQEMVSLTSPSAPPTSRTSSGNVWVTHEEMETLETSTKTDSEEGSWAQTLAYGDMNHEWIGNEWLPSLGLPQYRSYFMECLVDARMLDHLTKKDLRVHLKMVDSFHRTSLQYGIMCLKRLNYDRKELEKRREESQHEIKDVLVWTNDQVVHWVQSIGLRDYAGNLHESGVHGALLALDENFDHNTLALILQIPTQNTQARQVMEREFNNLLALGTDRKLDDGDDKVFRRAPSWRKRFRPREHHGRGGMLSASAETLPAGFRVSTLGTLQPPPAPPKKIMPEAHSHYLYGHMLSAFRD

SEQ ID NO: 14899 - protein, 487 aa, Homo sapiens
MEFSSPSREECPKPLSRVSIMAGSLTGLLLLQAVSWASGARPCIPKSFGYSSVVCVCNATYCDSFDPPTFPALGTFSRYESTRSGRRMELSMGPIQANHTGTGIGYNIIRVPMASCDFSIRTYTYADTPDDFQLHNFSLPEEDTKLKIPLIHRALQLAQRPVSLLASPWTSPTWLKTNGAVNGKGSLKGQPGDIYHQTWARYFVKFLDAYAEHKLQFWAVTAENEPSAGLLSGYPFQCLGFTPEHQRDFIARDLGPTLANSTHHNVRLLMLDDQRLLLPHWAKVVLTDPEAAKYVHGIAVHWYLDFLAPAKATLGETHRLFPNTMLFASEACVGSKFWEQSVRLGSWDRGMQYSHSIITNLLYHVVGWTDWNLALNPEGGPNWVRNFVDSPIIVDITKDTFYKQPMFYHLGHFSKFIPEGSQRVGLVASQKNDLDAVALMHPDGSAVVVVLNRSSKDVPLTIKDPAVGFLETISPGYSIHTYLWRRQ

SEQ ID NO: 14900 - protein, 642 aa, Homo sapiens
MLENYSNLVSVGYHVSKPDVIFKLEQGEEPWIVEEFSNQNYPDIDDALEKNKEIQDKHLTQTVFFSNKTLITERENVFGKTLNLGMNSVPSRKMPYKCNPGGNSLKTNSEVIVAKKSKENRKIPDGYSGFGKHEKSHLGMKKYRYNPMRKASNQNENLILHQNIQILKQPFDYNKCGKTFFKRAILITQKGRQTERKPNECNECRKTFSKRSTLIVHQRIHTGEKPYVCSDCRKTFRVKTSLTRHRRIHTGERPYECSECRKTFIDKSALIVHQKIHGGEKSYECNECGKTFFRKSALAEHFRSHTGEKPYECKECGNAFSKKSYLVVHQRTHRGEKPNECKECGKTFFCQSALTAHQRIHTGEKPYECSECEKTFFCQSALNVHRRSHTGEKPYECSQCGKFLCTKSALIAHQITHRGKKSYECNECGKFFCHKSTLTIHQRTHTGEKHGVFNKCGRISIVKSNCSQCKRMNTKENLYECSEHGHAVSKNSHLIVHQRTIWERPYECNECGRTYCRKSALTHHQRTHTGQRPYECNECGKTFCQKFSFVEHQRTHTGEKPYECNECGKSFCHKSAFRVHRRIHTGEKPYECNQCGKTYRRLWTLTEHQKIHTGEKPYECNKCEKTFRHKSNFLLHQKSHKE

SEQ ID NO: 14901 - protein, 955 aa, Homo sapiens
MEVTCLLLLALIPFHCRGQGVYAPAQAQIVHAGQACVVKEDNISERVYTIREGDTLMLQCLVTGHPRPQVRWTKTAGSASDKFQETSVFNETLRIERIARTQGGRYYCKAENGVGVPAIKSIRVDVQYLDEPMLTVHQTVSDVRGNFYQEKTVFLRCTVNSNPPARFIWKRGSDTLSHSQDNGVDIYEPLYTQGETKVLKLKNLRPQDYASYTCQVSVRNVCGIPDKAITFRLTNTTAPPALKLSVNETLVVNPGENVTVQCLLTGGDPLPQLQWSHGPGPLPLGALAQGGTLSIPSVQARDSGYYNCTATNNVGNPAKKTVNLLVRSMKNATFQITPDVIKESENIQLGQDLKLSCHVDAVPQEKVTYQWFKNGKPARMSKRLLVTRNDPELPAVTSSLELIDLHFSDYGTYLCMASFPGAPVPDLSVEVNISSETVPPTISVPKGRAVVTVREGSPAELQCEVRGKPRPPVLWSRVDKEAALLPSGLPLEETPDGKLRLERVSRDMSGTYRCQTARYNGFNVRPREAQVQLNVQFPPEVEPSSQDVRQALGRPVLLRCSLLRGSPQRIASAVWRFKGQLLPPPPVVPAAAEAPDHAELRLDAVTRDSSGSYECSVSNDVGSAACLFQVSAKAYSPEFYFDTPNPTRSHKLSKNYSYVLQWTQREPDAVDPVLNYRLSIRQLNQHNAVVKAIPVRRVEKGQLLEYILTDLRVPHSYEVRLTPYTTFGAGDMASRIIHYTEPINSPNLSDNTCHFEDEKICGYTQDLTDNFDWTRQNALTQNPKRSPNTGPPTDISGTPEGYYMFIETSRPRELGDRARLVSPLYNASAKFYCVSFFYHMYGKHIGSLNLLVRSRNKGALDTHAWSLSGNKGNVWQQAHVPISPSGPFQIIFEGVRGPGYLGDIAIDDVTLKKGECPRKQTDPNKVVVMPGSGAPCQSSPQLWGPMAIFLLALQR

SEQ ID NO: 14902 - protein, 1506 aa, Homo sapiens
MPQIIKMTRILTAFKVVRTLKTGFGFTNVTAHQKWKFSRPGIRLLSVKAQTAHIVLEDGTKMKGYSFGHPSSVAGEVVFNTGLGGYPEAITDPAYKGQILTMANPIIGNGGAPDTTALDELGLSKYLESNGIKVSGLLVLDYSKDYNHWLATKSLGQWLQEEKVPAIYGVDTRMLTKIIRDKGTMLGKIEFEGQPVDFVDPNKQNLIAEVSTKDVKVYGKGNPTKVVAVDCGIKNNVIRLLVKRGAEVHLVPWNHDFTKMEYDGILIAGGPGNPALAEPLIQNVRKILESDRKEPLFGISTGNLITGLAAGAKTYKMSMANRGQNQPVLNITNKQAFITAQNHGYALDNTLPAGWKPLFVNVNDQTNEGIMHESKPFFAVQFHPEVTPGPIDTEYLFDSFFSLIKKGKATTITSVLPKPALVASRVEVSKVLILGSGGLSIGQAGEFDYSGSQAVKAMKEENVKTVLMNPNIASVQTNEVGLKQADTVYFLPITPQFVTEVIKAEQPDGLILGMGGQTALNCGVELFKRGVLKEYGVKVLGTSVESIMATEDRQLFSDKLNEINEKIAPSFAVESIEDALKAADTIGYPVMIRSAYALGGLGSGICPNRETLMDLSTKAFAMTNQILVEKSVTGWKEIEYEVVRDADDNCVTVCNMENVDAMGVHTGDSVVVAPAQTLSNAEFQMLRRTSINVVRHLGIVGECNIQFALHPTSMEYCIIEVNARLSRSSALASKATGYPLAFIAAKIALGIPLPEIKNVVSGKTSACFEPSLDYMVTKIPRWDLDRFHGTSSRIGSSMKSVGEVMAIGRTFEESFQKALRMCHPSIEGFTPRLPMNKEWPSNLDLRKELSEPSSTRIYAIAKAIDDNMSLDEIEKLTYIDKWFLYKMRDILNMEKTLKGLNSESMTEETLKRAKEIGFSDKQISKCLGLTEAQTRELRLKKNIHPWVKQIDTLAAEYPSVTNYLYVTYNGQEHDVNFDDHGMMVLGCGPYHIGSSVEFDWCAVSSIRTLRQLGKKTVVVNCNPETVSTDFDECDKLYFEELSLERILDIYHQEACGGCIISVGGQIPNNLAVPLYKNGVKIMGTSPLQIDRAEDRSIFSAVLDELKVAQAPWKAVNTLNEALEFAKSVDYPCLLRPSYVLSGSAMNVVFSEDEMKKFLEEATRVSQEHPVVLTKFVEGAREVEMDAVGKDGRVISHAISEHVEDAGVHSGDATLMLPTQTISQGAIEKVKDATRKIAKAFAISGPFNVQFLVKGNDVLVIECNLRASRSFPFVSKTLGVDFIDVATKVMIGENVDEKHLPTLDHPIIPADYVAIKAPMFSWPRLRDADPILRCEMASTGEVACFGEGIHTAFLKAMLSTGFKIPQKGILIGIQQSFRPRFLGVAEQLHNEGFKLFATEATSDWLNANNVPATPVAWPSQEGQNPSLSSIRKLIRDGSIDLVINLPNNNTKFVHDNYVIRRTAVDSGIPLLTNFQVTKLFAEAVQKSRKVDSKSLFHYRQYSAGKAA

SEQ ID NO: 14903 - protein, 749 aa, Homo sapiens
MSMSGEVAKEWQELDDAEKVQREPLLTLVKEIVPYNMAHNAEHEACDLLMEIEQVDMLEKDIDENAYAKVCLYLTSCVNYVPEPENSALLRCALGVFRKFSRFPEALRLALMLNDMELVEDIFTSCKDVVVQKQMAFMLGRHGVFLELSEDVEEYEDLTEIMSNVQLNSNFLALARELDIMEPKVPDDIYKTHLENNRFGGSGSQVDSARMNLASSFVNGFVNAAFGQDKLLTDDGNKWLYKNKDHGMLSAAASLGMILLWDVDGGLTQIDKYLYSSEDYIKSGALLACGIVNSGVRNECDPALALLSDYVLHNSNTMRLGSIFGLGLAYAGSNREDVLTLLLPVMGDSKSSMEVAGVTALACGMIAVGSCNGDVTSTILQTIMEKSETELKDTYARWLPLGLGLNHLGKGEAIEAILAALEVVSEPFRSFANTLVDVCAYAGSGNVLKVQQLLHICSEHFDSKEKEEDKDKKEKKDKDKKEAPADMGAHQGVAVLGIALIAMGEEIGAEMALRTFGHLLRYGEPTLRRAVPLALALISVSNPRLNILDTLSKFSHDADPEVSYNSIFAMGMVGSGTNNARLAAMLRQLAQYHAKDPNNLFMVRLAQGLTHLGKGTLTLCPYHSDRQLMSQVAVAGLLTVLVSFLDVRNIILGKSHYVLYGLVAAMQPRMLVTFDEELRPLPVSVRVGQAVDVVGQAGKPKTITGFQTHTTPVLLAHGERAELATEEFLPVTPILEGFVILRKNPNYDL

SEQ ID NO: 14904 - protein, 1003 aa, Homo sapiens
SSGPNCAPGSSSSSSSDEAGDPNEAPSPDTLLGALARRQLNLGQLLEDTESYLQAFLAGAAGPLNGDHPGPGQSSSPDQAPPQLSKSKGLPKSAWGGGTPEAHRPGFGATSEGQGPLPFLSMFMGAGDAPLGSRPGHPHSSSQVKSKLQIGPPSPGEAQGPLLPSPARGLKFLKLPPTSEKSPSPGGPQLSPQLPRNSRIPCRNSGSDGSPSPLLARRGLGGGELSPEGAQGLPTSPSPCYTTPDSTQLRPPQSALSTTLSPGPVVSPCYENILDLSRSTFRGPSPEPPPSPLQVPTYPQLTLEVPQAPEVLRSPGVPPSPCLPESYPYGSPQEKSLDKAGSESPHPGRRTPGNSSKKPSQGSGRRPGDPGSTPLRDRLAALGKLKTGPEGALGSEKNGVPARPGTEKTRGPGKSGESAGDMVPSIHRPLEQLEAKGGIRGAVALGTNSLKQQEPGLMGDPGARVYSSHSMGARVDLEPVSPRSCLTKVELAKSRLAGALCPQVPRTPAKVPTSAPSLGKPNKSPHSSPTKLPSKSPTKVVPRPGAPLVTKESPKPDKGKGPPWADCGSTTAQSTPLVPGPTDPSQGPEGLAPHSAIEEKVMKGIEENVLRLQGQERAPGAEVKHRNTSSIASWFGLKKSKLPALNRRTEATKNKEGAGGGSPLRREVKMEARKLEAESLNISKLMAKAEDLRRALEEEKAYLSSRARPRPGGPAPGPNTGLGQVQGQLAGMYQGADTFMQQLLNRVDGKELPSKSWREPKPEYGDFQPVSSDPKSPWPACGPRNGLVGPLQGCGKPPGKPSSEPGRREEMPSEDSLAEPVPTSHFTACGSLTRTLDSGIGTFPPPDHGSSGTPSKNLPKTKPPRLDPPPGVPPARPPPLTKVPRRAHTLEREVPGIEELLVSGRHPSMPAFPALLPAAPGHRGHETCPDDPCEDPGPTPPVQLAKNWTFPNTRAAGSSSDPLMCPPRQLEGLPRTPMVRIAAEERERTREQEGVMWGDQFLQ

SEQ ID NO: 14905 - protein, 1310 aa, Homo sapiens
REIVTRNLSQPESPVLLPATEMASLLSLQEENQLLQQELSRVEDLLAQSRAERDELAIKYNAVSERDTEHSQDLESALIRLEEEQQRSASLAQVNAMLREQLDQAGSANQALSEDIRKVTNDWTRCRKELEHREAAWRREEESFNAYFSNEHSRLLLLWRQVVGFRRLVSEVKMFTERDLLQLGGELARTSRAVQEAGLGLSTGLRLAESRAEAALEKQALLQAQLEEQLRDKVLREKDLAQQQMQSDLDKADLSARVTELGLAVKRLEKQNLEKDQVNKDLTEKLEALESLRLQEQAALETEDGEGLQQTLRDLAQAVLSDSESGVQLSGSERTADASNGSLRGLSGQRTPSPPRRSSPGRGRSPRRGPSPACSDSSTLALIHSALHKRQLQVQDMRGRYEASQDLLGTLRKQLSDSESERRALEEQLQRLRDKTDGAMQAHEDAQREVQRLRSANELLSREKSNLAHSLQVAQQQAEELRQEREKLQAAQEELRRQRDRLEEEQEDAVQDGARVRRELERSHRQLEQLEGKRSVLAKELVEVREALSRATLQRDMLQAEKAEVAEALTKAEAGRVELELSMTKLRAEEASLQDSLSKLSALNESLAQDKLDLNRLVAQLEEEKSALQGRQRQAEQEATVAREEQERLEELRLEQEVARQGLEGSLRVAEQAQEALEQQLPTLRHERSQLQEQLAQLSRQLSGREQELEQARREAQRQVEALERAAREKEALAKEHAGLAVQLVAAEREGRTLSEEATRLRLEKEALEGSLFEVQRQLAQLEARREQLEAEGQALLLAKETLTGELAGLRQQIIATQEKASLDKELMAQKLVQAEREAQASLREQRAAHEEDLQRLQREKEAAWRELEAERAQLQSQLQREQEELLARLEAEKEELSEEIAALQQERDEGLLLAESEKQQALSLKESEKTALSEKLMGTRHSLATISLEMERQKRDAQSRQEQDRSTVNALTSELRDLRAQREEAAAAHAQEVRRLQEQARDLGKQRDSCLREAEELRTQLRLLEDARDGLRRELLEAQRKLRESQEGREVQRQEAGELRRSLGEGAKEREALRRSNEELRSAVKKAESERISLKLANEDKEQKLALLEEARTAVGKEAGELRTGLQEVERSRLEARRELQELRRQMKMLDSENTRLGRELAELQGRLALGERAEKESRRETLGLRQRLLKGEASLEVMRQELQVAQRKLQEQEGEFRTRERRLLGSLEEARGTEKQQLDHARGLELKLEAARAEAAELGLRLSAAEGRAQGLEAELARVEVQRRAAEAQLGGLRSALRRGLGLGRAPS

SEQ ID NO: 14906 - protein, 690 aa, Homo sapiens
MSTVEEDSDTVTVETVNSVTLTQDTEGNLILHCPQNEADEIDSEDSIEPPHKRLCLSSEDDQSIDDSTPCISVVALPLSENDQSFEVTMTATTEVADDEVTEGTVTQIQILQNEQLDEISPLGNEEVSAVSQAWFTTKEDKDSLTNKGHKWKQGMWSKEEIDILMNNIERYLKARGIKDATEIIFEMSKDERKDFYRTIAWGLNRPLFAVYRRVLRMYDDRNHVGKYTPEEIEKLKELRIKHGNDWATIGAALGRSASSVKDRCRLMKDTCNTGKWTEEEEKRLAEVVHELTSTEPGDIVTQGVSWAAVAERVGTRSEKQCRSKWLNYLNWKQSGGTEWTKEDEINLILRIAELDVADENDINWDLLAEGWSSVRSPQWLRSKWWTIKRQIANHKDVSFPASADSPATVDSETITLNSGTLQTFEILPSFHLQPTGTPGTYLLQTSSSQGLPLTLTASPTVTLTAAAPASPEQIIVHALSPEHLLNTSDNVTVQCHTPRVIIQTVATEDITSSISQAELTVDSDIQSSDFPEPPDALEADTFPDEIHHPKMTVEPSFNDAHVSKFSDQNSTELMNSVMVRTEEEISDTDLKQEESPSDLASAYVTEGLESPTIEEQVDQTIDDETILIVPSPHGFIQASDVIDTESVLPLTTLTDPILQHHQEESNIIGSSLGSPVSEDSKDVEDLVNCH

SEQ ID NO: 14907 - protein, 638 aa, Homo sapiens
MTLLIRVLLQERGAQDRRIQDLETELEKMEARLNAALREKTSLSANNATLEKQLIELTRTNELLKSKFSENGNQKNLRILSLELMKLRNKRETKMRGMMAKQEGMEMKLQVTQRSLEESQGKIAQLEGKLVSIEKEKIDEKSETEKLLEYIEEISCASDQVEKYKLDIAQLEENLKEKNDEILSLKQSLEENIVILSKQVEDLNVKCQLLEKEKEDHVNRNREHNENLNAEMQNLKQKFILEQQEREKLQQKELQIDSLLQQEKELSSSLHQKLCSFQEEMVKEKNLFEEELKQTLDELDKLQQKEEQAERLVKQLEEEAKSRAEELKLLEEKLKGKEAELEKSSAAHTQATLLLQEKYDSMVQSLEDVTAQFESYKALTASEIEDLKLENSSLQEKAAKAGKNAEDVQHQILATESSNQEYVRMLLDLQTKSALKETEIKEITVSFLQKITDLQNQLKQQEEDFRKQLEDEEGRKAEKENTTAELTEEINKWRLLYEELYNKTKPFQLQLDAFEVEKQALLNEHGAAQEQLNKIRDSYAKLLGHQNLKQKIKHVVKLKDENSQLKSEVSKLRCQLAKKKQSETKLQEELNKVLGIKHFDPSKAFHHESKENFALKTPLKEGNTNCYRAPMECQESWK

SEQ ID NO: 14908 - protein, 638 aa, Homo sapiens
MFGSSRYLGSSEQPRANSLGPSDRTLVLCSLVEGEDKVNPSEPHGLRMEEKWLLKGKLRNQRNQNKLLSPNKKQRKNHTSKLQELALLLPIALKTGTKKLTKKEILVHVLQYIQYLQRNIDAAKALFKCHITTGEGGLAGLGQKPAWGPARRRRHSTPSSSPSSQKSCLQGACQKPRKKKLTQASESQTRTPKPRRSLALNKPEKLVAPSPDQKGSGTGGTTTPPRCPDSCGHPRPASSSPPGDRKGGQSQLTLLDLAEDTIHCDISSCWCQGSVQDDAPFPALLAQEDVARIHFLNKTQPHPRQKLVFYDSSEDVDKGSLDADPWLPAWTPENSPQGSPLFLGPPQIDVWSGTGHPSEILGLSPSLFSSPGKLLPDEILEDDMEYLTQAAFFEEVCLDLESSPSAYTQEAPQEKDTASKAPKDPPESHSLHRSSVSLDHCYLSLSGNSKAPSSSSSSSSSSSSSEDSDSEPLWKQREDMQANPVGTPGSSEEDEDTTWTPTRLASPLLAAEKKATKGQVARAPVKPKEKKKGPCPPQMKKKCVNGFIMFCRMNRKQYIRSCPGTASTAATKELAQLWRVMTQQERRPYCTKARRFSRQHNRIVKQDGSSSEAEDWETPKPFYQLLAEKALPLPPHLQ

SEQ ID NO: 14909 - protein, 939 aa, Homo sapiens
MKVARFQKIPNGENETMIPVLTSKKASELPVSEVASILQADLQNGLNKCEVSHRRAFHGWNEFDISEDEPLWKKYISQFKNPLIMLLLASAVISVLMHQFDDAVSITVAILIVVTVAFVQEYRSEKSLEELSKLVPPECHCVREGKLEHTLARDLVPGDTVCLSVGDRVPADLRLFEAVDLSIDESSLTGETTPCSKVTAPQPAATNGDLASRSNIAFMGTLVRCGKAKGVVIGTGENSEFGEVFKMMQAEEAPKTPLQKSMDLLGKQLSFYSFGIIGIIMLVGWLLGKDILEMFTISVSLAVAAIPEGLPIVVTVTLALGVMRMVKKRAIVKKLPIVETLGCCNVICSDKTGTLTKNEMTVTHIFTSDGLHAEVTGVGYNQFGEVIVDGDVVHGFYNPAVSRIVEAGCVCNDAVIRNNTLMGKPTEGALIALAMKMGLDGLQQDYIRKAEYPFSSEQKWMAVKCVHRTQQDRPEICFMKGAYEQVIKYCTTYQSKGQTLTLTQQQRDVYQQEKARMGSAGLRVLALASGPELGQLTFLGLVGIIDPPRTGVKEAVTTLIASGVSIKMITGDSQETAVAIASRLGLYSKTSQSVSGEEIDAMDVQQLSQIVPKVAVFYRASPRHKMKIIKSLQKNGSVVAMTGDGVNDAVALKAADIGVAMGQTGTDVCKEAADMILVDDDFQTIMSAIEEGKGIYNNIKNFVRFQLSTSIAALTLISLATLMNFPNPLNAMQILWINIIMDGPPAQSLGVEPVDKDVIRKPPRNWKDSILTKNLILKILVSSIIIVCGTLFVFWRELRDNVITPRDTTMTFTCFVFFDMFNALSSRSQTKSVFEIGLCSNRMFCYAVLGSIMGQLLVIYFPPLQKVFQTESLSILDLLFLLGLTSSVCIVAEIIKKVERSREKIQKHVWLWERSGQQLVEIHPHLETGLPLTEDVSCV

SEQ ID NO: 14910 - protein, 1211 aa, Homo sapiens
MKNLLTEKCISSHNFHQKVIKQRMEKKVDSRYFKDGAVKKPYSAKTLSNKKSSASFGIRRELPSTSHLVQYRGTHTCTRQGRLRELRIRCVARKFLYLWIRMTFGRVFPSKARFYYEQRLLRKVFEEWKEEWWVFQHEWKLCVRADCHYRYYLYNLMFQTWKTYVRQQQEMRNKYIRAEVHDAKQKMRQAWKSWLIYVVVRRTKLQMQTTALEFRQRIILRVWWSTWRQRLGQVRVSRALHASALKHRALSLQVQAWSQWREQLLYVQKEKQKVVSAVKHHQHWQKRRFLKAWLEYLQVRRVKRQQNEMAERFHHVTVLQIYFCDWQQAWERRESLYAHHAQVEKLARKMALRRAFTHWKHYMLLCAEEAAQFEMAEEHHRHSQLLLHRFWNLWRSQIEQKKERELLPLLHAAWDHYRIALLCKCIELWLQYTQKRRYKQLLQARADGHFQQRALPAAFHTWNRLWRWRHQENVLSARATRFHRETLEKQVFSLWRQKMFQHRENRLAERMAILHAERQLLYRSWFMWHQQAAARHQEQEWQTVACAHHRHGRLKKAFCLWRESAQGLRTERTGRVRAAEFHMAQLLRWAWSQWRECLALRGAERQKLMRADLHHQHSVLHRALQAWVTYQGRVRSILREVAARESQHNRQLLRGALRRWKENTMARVDEAKKTFQASTHYRRTICSKVLVQWREAVSVQMYYRQQEDCAIWEAQKVLDRGCLRTWFQRWWDCSRRSAQQRLQLERAVQHHHRQLLLEGLARWKTHHLQCVRKRLLHRQSTQLLAQRLSRTCFRQWRQQLAARRQEQRATVRALWFWAFSLQAKVWATWLAFVLERRRKKARLQWALQAYQGQLLQEGATRLLRFAASMKASRQQLQAQQQVQAAHSLHRAVRRCATLWKQKVLGRGGKPQPLAAIAPSRKVTFEGPLLNRIAAGAGDGTLETKRPQASRPLGALGRLAAEEPHALELNTAHSARKQPRRPHFLLEPAQSQRPQKPQEHGLGMAQPAAPSLTRPFLAEAPTALVPHSPLPGALSSAPGPKQPPTASTGPELLLLPLSSFMPCGAAAPARVSAQRATPRDKPPVPSSLASVPDPHLLLPGDFSATRAGPGLSTAGSLDLEAELEEIQQQLLHYQTTKQNLWSCRRQASSLRRWLELNREEPGPEDQEVEQQVQKELEQVEMQIQLLAEELQAQRQPIGACVARIQALRQALC

SEQ ID NO: 14911 - protein, 722 aa, Homo sapiens
RGPGRRCLLALVLFCAWGTLAVVAQKPGAGCPSRCLCFRTTVRCMHLLLEAVPAVAPQTSILDLRFNRIREIQPGAFRRLRNLNTLLLNNNQIKRIPSGAFEDLENLKYLYLYKNEIQSIDRQAFKGLASLEQLYLHFNQIETLDPDSFQHLPKLERLFLHNNRITHLVPGTFNHLESMKRLRLDSNTLHCDCEILWLADLLKTYAESGNAQAAAICEYPRRIQGRSVATITPEELNCERPRITSEPQDADVTSGNTVYFTCRAEGNPKPEIIWLRNNNELSMKTDSRLNLLDDGTLMIQNTQETDQGIYQCMAKNVAGEVKTQEVTLRYFGSPARPTFVIQPQNTEVLVGESVTLECSATGHPPPRISWTRGDRTPLPVDPRVNITPSGGLYIQNVVQGDSGEYACSATNNIDSVHATAFIIVQALPQFTVTPQDRVVIEGQTVDFQCEAKGNPPPVIAWTKGGSQLSVDRRHLVLSSGTLRISGVALHDQGQYECQAVNIIGSQKVVAHLTVQPRVTPVFASIPSDTTVEVGANVQLPCSSQGEPEPAITWNKDGVQVTESGKFHISPEGFLTINDVGPADAGRYECVARNTIGSASVSMVLSVNVPDVSRNGDPFVATSIVEAIATVDRAINSTRTHLFDSRPRSPNDLLALFRYPRDPYTVEQARAGEIFERTLQLIQEHVQHGLMVDLNGTSQCQSLFFLLHGLSNGVEHASVKSHS

SEQ ID NO: 14912 - protein, 392 aa, Homo sapiens
MLASQGVLLHPYGVPMIVPAAPYLPGLIQGNQEAAAAPDTMAQPYASAQFAPPQNGIPAEYTAPHPHPAPEYTGQTTVPEHTLNLYPPAQTHSEQSPADTSAQTVSGTATQTDDAAPTDGQPQTQPSENTENKSQPKRLHVSNIPFRFRDPDLRQMFGQFGKILDVEIIFNERGSKGFGFVTFENSADADRAREKLHGTVVEGRKIEVNNATARVMTNKKTVNPYTNGWKLNPVVGAVYSPEFYAGTVLLCQANQEGSSMYSAPSSLVYTSAMPGFPYPAATAAAAYRGAHLRGRGRTVYNTFRAAAPPPPIPAYGGVVYQEPVYGNKLLQGGYAAYRYAQPTPATAAAYSDSYGRVYAADPYHHALAPAPTYGVGAMASIYRGGYNRFAPY

SEQ ID NO: 14913 - protein, 660 aa, Homo sapiens
IAKPQGTYQVLPPNTGSLYIDKDCSAVYCHESSSNIYYPFQKREQLRAGRYIMRHTSEVICEVLDPEGNTFQVMADGSISTILPEKKLEDDLNEKTEGYDSLSSMHLEKNHQQIYGEHVPRFFVMYADGSGMELLRDSDIEEYLSLAYKESNTVVLQEPVQEQPGTLTITVLRPFHEASPWQVKKEDTIVPPNLRSRSWETFPSVEKKTPGPPFGTQIWKGLCIESKQLVSAPGAILKSPSVLQMRQFIQHEVIKNEVKLRLQVSLKDYINYILKKEDELQEMMVKDSRTEEERGNAADLLKLVMSFPKMEETTKSHVTEVAAHLTDLFKQSLATPPKCPPDTFGKDFFEKTWRHTASSKRWKEKIDKTRKEIETTQNYLMDIKNRIIPPFFKSELNQLYQSQYNHLDSLSKKLPSFTKKNEDANETAVQDTSDLNLDFKPHKVSEQKSSSVPSLPKPEISADKKDFTAQNQTENLTKSPEEAESYEPVKIPTQSLLQDVAGQTRKEKVKLPHYLLSSKPKSQPLAKVQDSVGGKVNTSSVASAAINNAKSSLFGFHLLPSSVKFGVLKEGHTYATVVKLKNVGVDFCRFKVKQPPPSTGLKVTYKPGPVAAGMQTELNIELFATAVGEDGAKGSAHISHNIEIMTEHEVLFLPVEANIL

SEQ ID NO: 14914 - protein, 668 aa, Homo sapiens
MDLVLKRCLLHLAVIGALLAVGATKVPRNQDWLGVSRQLRTKAWNRQLYPEWTEAQRLDCWRGGQVSLKVSNDGPTLIGANASFSIALNFPGSQKVLPDGQVIWVNNTIINGSQVWGGQPVYPQETDDACIFPDGGPCPSGSWSQKRSFVYVWKTWGQYWQVLGGPVSGLSIGTGRAMLGTHTMEVTVYHRRGSRSYVPLAHSSSAFTITDQVPFSVSVSQLRALDGGNKHFLRNQPLTFALQLHDPSGYLAEADLSYTWDFGDSSGTLISRALVVTHTYLEPGPVTAQVVLQAAIPLTSCGSSPVPGTTDGHRPTAEAPNTTAGQVPTTEVVGTTPGQAPTAEPSGTTSVQVPTTEVISTAPVQMPTAESTGMTPEKVPVSEVMGTTLAEMSTPEATGMTPAEVSIVVLSGTTAAQVTTTEWVETTARELPIPEPEGPDASSIMSTESITGSLGPLLDGTATLRLVKRQVPLDCVLYRYGSFSVTLDIVQGIESAEILQAVPSGEGDAFELTVSCQGGLPKEACMEISSPGCQPPAQRLCQPVLPSPACQLVLHQILKGGSGTYCLNVSLADTNSLAVVSTQLIMPVPGILLTGQEAGLGQVPLIVGILLVLMAVVLASLIYRRRLMKQDFSVPQLPHSSSHWLRLPRIFCSCPIGENSPLLSGQQV

SEQ ID NO: 14915 - protein, 1002 aa, Homo sapiens
MADLEVYKNLSPEKVERCMSVMQSGTQMIKLKRGTKGLVRLFYLDEHRTRLRWRPSRKSEKAKILIDSIYKVTEGRQSEIFHRQAEGNFDPSCCFTIYHGNHMESLDLITSNPEEARTWITGLKYLMAGISDEDSLAKRQRTHDQWVKQTFEEADKNGDGLLNIEEIHQLMHKLNVNLPRRKVRQMFQEADTDENQGTLTFEEFCVFYKMMSLRRDLYLLLLSYSDKKDHLTVEELAQFLKVEQKMNNVTTDYCLDIIKKFEVSEENKVKNVLGIEGFTNFMRSPACDIFNPLHHEVYQDMDQPLCNYYIASSHNTYLTGDQLLSQSKVDMYARVLQEGCRCVEVDCWDGPDGEPVVHHGYTLTSKILFRDVVETINKHAFVKNEFPVILSIENHCSIQQQRKIAQYLKGIFGDKLDLSSVDTGECKQLPSPQSLKGKILVKGKKLPYHLGDDAEEGEVSDEDSADEIEDECKFKLHYSNGTTEHQVESFIRKKLESLLKESQIRDKEDPDSFTVRALLKATHEGLNAHLKQSPDVKESGKKSHGRSLMTNFGKHKKTTKSRSKSYSTDDEEDTQQSTGKEGGQLYRLGRRRKTMKLCRELSDLVVYTNSVAAQDIVDDGTTGNVLSFSETRAHQVVQQKSEQFMIYNQKQLTRIYPSAYRIDSSNFNPLPYWNAGCQLVALNYQSEGRMMQLNRAKFKANGNCGYVLKPQQMCKGTFNPFSGDPLPANPKKQLILKVISGQQLPKPPDSMFGDRGEIIDPFVEVEIIGLPVDCCKDQTRVVDDNGFNPVWEETLTFTVHMPEIALVRFLVWDHDPIGRDFVGQRTVTFSSLVPGYRHVYLEGLTEASIFVHITINEIYGKWSPLILNPSYTILHFLGATKNRQLQGLKGLFNKNPRHSSSENNSHYVRKRSIGDRILRRTASAPAKGRKKSKMGFQEMVEIKDSVSEATRDQDGVLRRTTRSLQARPVSMPVDRNLLGALSLPVSETAKDIEGKENSLVQI

SEQ ID NO: 14916 - protein, 604 aa, Homo sapiens
MTASPDYLVVLFGITAGATGAKLGSDEKELILLFWKVVDLANKKVGQLHEVLVRPDQLELTEDCKEETKIDVESLSSASQLDQALRQFNQSVSNELNIGVGTSFCLCTDGQLHVRQILHPEASKKNVLLPECFYSFFDLRKEFKKCCPGSPDIDKLDVATMTEYLNFEKSSSVSRYGASQVEDMGNIILAMISEPYNHRFSDPERVNYKFESGTCSKMELIDDNTVVRARGLPWQSSDQDIARFFKGLNIAKGGAALCLNAQGRRNGEALVRFVSEEHRDLALQRHKHHMGTRYIEVYKATGEDFLKIAGGTSNEVAQFLSKENQVIVRMRGLPFTATAEEVVAFFGQHCPITGGKEGILFVTYPDGRPTGDAFVLFACEEYAQNALRKHKDLLGKRYIELFRSTAAEVQQVLNRFSSAPLIPLPTPPIIPVLPQQFVPPTNVRDCIRLRGLPYAATIEDILDFLGEFATDIRTHGVHMVLNHQGRPSGDAFIQMKSADRAFMAAQKCHKKNMKDRYVEVFQCSAEEMNFVLMGGTLNRNGLSPPPCLSPPSYTFPAPAAVIPTEAAIYQPSVILNPRALQPSTAYYPAGTQLFMNYTAYYPSV

SEQ ID NO: 14917 - protein, 159 aa, Homo sapiens
MELRSGSVGSQAVARRMDGDSRDGGGGKDATGSEDYENLPTSASVSTHMTAGAMAGILEHSVMYPVDSVKTRMQSLSPDPKAQYTSIYGALKKIMRTEGFWRPLRGVNVMIMGAGPAHAMYFACYENMKRTLNDVFHHQGNSHLANGSRNFLRTPDRRG

SEQ ID NO: 14918 - protein, 609 aa, Homo sapiens
MAADKPADQGAEKHEGTGQSSGITDQEKELSTNAFQAFTVHSAVEEMDGLDDVENSMLYYNQAVILYHLRQYTEAISVGEKLYQFIEPFEEKFAQAVCFLLVDLYILTYQAEKALHLLAVLEKMISQGNNNKNGKNETGNNNNKDGSNHKAESGALIEAAKSKIHQYKVRAYIQMKSLKACKREIKSVMNTAGNSAPSLFLKSNFEYLRGNYRKAVKLLNSSNIAEHPGFMKTGECLRCMFWNNLGCIHFAMSKHNLGIFYFKKALQENDNVCAQLSAGSTDPGKKFSGRPMCTLLTNKRYELLYNCGIQLLHIGRPLAAFECLIEAVQVYHANPRLWLRLAECCIAANKGTSEQETKGLPSKKGIVQSIVGQGYHRKIVLASQSIQNTVYNDGQSSAIPVASMEFAAICLRNALLLLPEEQQDPKQENGAKNSNQLGGNTESSESSETCRCSILACSAYVALALGDNLMALNHADKLLQQPKLSGSLKFLGHLYAAEALISLDRISDAITHLNPENVTDVSLGISSNEQDQGSDKGENEAMESSGKRAPQCYPSSVNSARTVMLFNLGSAYCLRSEYDKARKCLHQAQWLMPPSTLGGRGRRIMRSGV

SEQ ID NO: 14919 - protein, 1451 aa, Homo sapiens
MSGSTQPVAQTWRATEPRYPPHSLSYPVQIARTHTDVGLLEYQHHSRDYASHLSPGSIIQPQRRRPSLLSEFQPGNERSQELHLRPESHSYLPELGKSEMEFIESKRPRLELLPDPLLRPSPLLATGQPAGSEDLTKDRSLTGKLEPVSPPSPPHTDPELELVPPRLSKEELIQNMDRVDREITMVEQQISKLKKKQQQLEEEAAKPPEPEKPVSPPPIESKHRSLVQIIYDENRKKAEAAHRILEGLGPQVELPLYNQPSDTRQYHENIKINQAMRKKLILYFKRRNHARKQWEQKFCQRYDQLMEAWEKKVERIENNPRRRAKESKVREYYEKQFPEIRKQRELQERMQSRVGQRGSGLSMSAARSEHEVSEIIDGLSEQENLEKQMRQLAVIPPMLYDADQQRIKFINMNGLMADPMKVYKDRQVMNMWSEQEKETFREKFMQHPKNFGLIASFLERKTVAECVLYYYLTKKNENYKSLVRRSYRRRGKSQQQQQQQQQQQQQQQQQPMPRSSQEEKDEKEKEKEAEKEEEKPEVENDKEDLLKEKTDDTSGEDNDEKEAVASKGRKTANSQGRRKGRITRSMANEANSEEAITPQQSAELASMELNESSRWTEEEMETAKKGLLEHGRNWSAIARMVGSKTVSQCKNFYFNYKKRQNLDEILQQHKLKMEKERNARRKKKKAPAAASEEAAFPPVVEDEEMEASGVSGNEEEMVEEAEALHASGNEVPRGECSGPATVNNSSDTESIPSPHTEAAKDTGQNGPKPPATLGADGPPPGPPTPPPEDIPAPTEPTPASEATGAPTPPPAPPSPSAPPPVVPKEEKEEETAAAPPVEEGEEQKPPAAEELAVDTGKAEEPVKSECTEEAEEGPAKGKDAEAAEATAEGALKAEKKEGGSGRATTAKSSGAPQDSDSSATCSADEVDEAEGGDKNRLLSPRPSLLTPTGDPRANASPQKPLDLKQLKQRAAAIPPIQVTKVHEPPREDAAPTKPAPPAPPPPQNLQPESDAPQQPGSSPRGKSRSPAPPADKEAEKPVFFPAFAAEAQKLPGDPPCWTSGLPFPVPPREVIKASPHAPDPSAFSYAPPGHPLPLGLHDTARPVLPRPPTISNPPPLISSAKHPSVLERQIGAISQGMSVQLHVPYSEHAKAPVGPVTMGLPLPMDPKKLAPFSGVKQEQLSPRGQAGPPESLGVPTAQEASVLRGTALGSVPGGSITKGIPSTRVPSDSAITYRGSITHGTPADVLYKGTITRIIGEDSPSRLDRGREDSLPKGHVIYEGKKGHVLSYEGGMSVTQCSKEDGRSSSGPPHETAAPKRTYDMMEGRVGRAISSASIEGLMGRAIPPERHSPHHLKEQHHIRGSITQGIPRSYVEAQEDYLRREAKLLKREGTPPPPPPSRDLTEAYKTQALGPLKLKPAHEGLVATVKEAGRSIHEIPREELRHTPELPLAP

SEQ ID NO: 14920 - protein, 1616 aa, Homo sapiens
MRKRKISVCQQTWALLCKNFLKKWRMKRESLMEWLNSLLLLLCLYIYPHSHQVNDFSSLLTMDLGRVDTFNESRFSVVYTPVTNTTQQIMNKVASTPFLAGKEVLGLPDEESIKEFTANYPEEIVRVTFTNTYSYHLKFLLGHGMPAKKEHKDHTAHCYETNEDVYCEVSVFWKEGFVALQAAINAAIIEITTNHSVMEELMSVTGKNMKMHSFIGQSGVITDLYLFSCIISFSSFIYYASVNVTRERKRMKALMTMMGLRDSAFWLSWGLLYAGFIFIMALFLALVIRSTQFIILSGFMVVFSLFLLYGLSLVALAFLMSILVKKSFLTGLVVFLLTVFWGCLGFTSLYRHLPASLEWILSLLSPFAFMLGMAQLLHLDYDLNSNAFPHPSDGSNLIVATNFMLAFDTCLYLALAIYFEKILPNEYGHRRPPLFFLKSSFWSQTQKTDHVALEDEMDADPSFHDSFEQAPPEFQGKEAIRIRNVTKEYKGKPDKIEALKDLVFDIYEGQITAILGHSGAGKSTLLNILSGLSVPTKGSVTIYNNKLSEMADLENLSKLTGVCPQSNVQFDFLTVRENLRLFAKIKGILPQEVDKEIQRVLLELEMKNIQDVLAQNLSGGQKRKLTFGIAILGDPQIFLLDEPTAGLDPFSRHQVWNLLKERKTDRVILFSTQFMDEADILADRKVFLSQGKLKCAGSSLFLKKKWGIGYHLSLQLNEICVEENITSLVKQHIPDAKLSAKSEGKLIYTLPLERTNKFPELYKDLDSYPDLGIENYGVSMTTLNEVFLKLEGKSTINESDIAILGEVQAEKADDTERLVEMEQVLSSLNKMRKTIGGVALWRQQICAIARVRLLKLKHERKALLALLLILMAGFCPLLVEYTMVKIYQNSYTWELSPHLYFLAPGQQPHDPLTQLLIINKTGASIDDFIQSVEHQNIALEVDAFGTRNGTDDPSYNGAITVCCNEKNYSFSLACNAKRLNCFPVLMDIVSNGLLGMVKPSVHIRTERSTFLENGQDNPIGFLAYIMFWLVLTSSCPPYIAMSSIDDYKNRARSQLRISGLSPSAYWFGQALVDVSLYFLVFVFIYLMSYISNFEDMLLTIIHIIQIPCAVGYSFSLIFMTYVISFIFRKGRKNSGIWSFCFYVVTVFSVAGFAFSIFESDIPFIFTFLIPPATMIGCLFLSSHLLFSSLFSEERMDVQPFLVFLIPFLHFIIFLFTLRCLEWKFGKKSMRKDPFFSSDVCQNPEEPEGEDEDVQMERVRTANALNSTNFDEKPVIIASCLRKEYAGKRKGCFSKRKNKIATRNVSFCVRKGEVLGLLGHNGAGKSTSIKVITGDTKPTAGQVLLKGSGGGDALEFLGYCPQENALWPNLTVRQHLEVYAAVKGLRKGDAEVAITRLVDALKLQDQLKSPVKTLSEGIKRKLCFVLSILGNPSVVLLDEPSTGMDPEGQQQMWQAIRATFRNTERGALLTTHYMAEAEAVCDRVAIMVSGRLRCIGSIQHLKSKFGKDYLLEMKVKNLAQVEPLHAEILRLFPQAARQERYSSLMVYKLPVEDVQPLAQAFFKLEKVKQSFDLEEYSLSQSTLEQVFLELSKEQELGDFEEDFDPSVKWKLLPQEEP

SEQ ID NO: 14921 - protein, 448 aa, Homo sapiens
MLDDRARMEAAKKEKVEQILAEFQLQEEDLKKVMRRMQKEMDRGLRLETHEEASVKMLPTYVRSTPEGSEVGDFLSLDLGGTNFRVMLVKVGEGEEGQWSVKTKHQMYSIPEDAMTGTAEMMKHKKLPLGFTFSFPVRHEDIDKGILLNWTKGFKASGAEGNNVVGLLRDAIKRRGDFEMDVVAMVNDTVATMISCYYEDHQCEVGMIVGTGCNACYMEEMQNVELVEGDEGRMCVNTEWGAFGDSGELDEFLLEYDRLVDESSANPGQQLYEKLIGGKYMGELVRLVLLRLVDENLLFHGEASEQLRTRGAFETRFVSQVESDTGDRKQIYNILSTLGLRPSTTDCDIVRRACESVSTRAAHMCSAGLAGVINRMRESRSEDVMRITVGVDGSVYKLHPSFKERFHASVRRLTPSCEITFIESEEGSGRGAALVSAVACKKACMLGQ

SEQ ID NO: 14922 - protein, 506 aa, Homo sapiens
MAWNSPSRRPVWQGGAPREDGGARGVWLPSSGQVSAQRTGRRLVGLEPTPTGSLTPRPPRPVPGMPRARKGNTLRKGGQRRGGGARSSAQADSGSSDDEAASEARSTASECPSLLSTTAEDSLGGDVVDEQGQQEDLEEKLKEYVDCLTDKSAKTRQGALESLRLALASRLLPDFLLERRLTLADALEKCLKKGKGEEQALAAAVLGLLCVQLGPGPKGEELFHSLQPLLVSVLSDSTASPAARLHCASALGLGCYVAAADIQDLVSCLACLESVFSRFYGLGGSSTSPVVPASLHGLLSAALQAWALLLTICPSTQISHILDRQLPRLPQLLSSESVNLRIAAGETIALLFELARDLEEEFVYEDMEALCSVLRTLATDSNKYRAKADRRRQRSTFRAVLHSVEGGECEEEIVRFGFEVLYMDSWARHRIYAAFKEVLGSGMHHHLQNNELLRDIFGLGPVLLLDATALKACKVPRFEKHLYNAAAFKARTKARSRVRDKRADIL

SEQ ID NO: 14923 - protein, 903 aa, Homo sapiens
MEPNDSTSTAVEEPDSLEVLVKTLDSQTRTFIVGAQMNVKEFKEHIAASVSIPSEKQRLIYQGRVLQDDKKLQEYNVGGKVIHLVERAPPQTHLPSGASSGTGSASATHGGGSPPGTRGPGASVHDRNANSYVMVGTFNLPSDGSAVDVHINMEQAPIQSEPRVRLVMAQHMIRDIQTLLSRMECRGGPQPQHSQPPPQPPAVTPEPVALSSQTSEPVESEAPPREPMEAEEVEERAPAQNPELTPGPAPAGPTPAPETNAPNHPSPAEYVEVLQELQRLESRLQPFLQRYYEVLGAAATTDYNNNHEGREEDQRLINLVGESLRLLGNTFVALSDLRCNLACTPPRHLHVVRPMSHYTTPMVLQQAAIPIQINVGTTVTMTGNGTRPPPTPNAEAPPPGPGQASSVAPSSTNVESSAEGAPPPGPAPPPATSHPRVIRISHQSVEPVVMMHMNIQDSGTQPGGVPSAPTGPLGPPGHGQTLGQQVPGFPTAPTRVVIARPTPPQARPSHPGGPPVSGTLGAGLGTNASLAQMVSGLVGQLLMQPVLVAQGTPGSPGGLGLESLSPEFFTSVVQGVLSSLLGSLGARAGSSESIAAFIQRLSGSSNIFEPGADGALGFFGALLSLLCQNFSMVDVVMLLHGHFQPLQRLQPQLRSFFHQHYLGGQEPTPSNIRMATHTLITGLEEYVRESFSLVQVQPGVDIIRTNLEFLQEQFNSIAAHVLHCTDSGFGARLLELCNQGLFECLALNLHCLGGQQMELAAVINGRIRRMSRGVNPSLVSWLTTMMGLRLQVVLEHMPVGPDAILRYVRRVGDPPQPLPEEPMEVQGAERASPEPQEWVPIIQQDIQSQRKVKPQPPLSDAYLSGMPAKRRKLRSDIQKRLQEDPNYSPQRFPNAQRAFADDP

SEQ ID NO: 14924 - protein, 326 aa, Homo sapiens
MAAPEPLRPRLCRLVRGEQGYGFHLHGEKGRRGQFIRRVEPGSPAEAAALRAGDRLVEVNGVNVEGETHHQVVQRIKAVEGQTRLLVVDQETDEELRRRQLTCTEEMAQRGLPPAHDPWEPKPDWAHTGSHSSEAGKKDVSGPLRELRPRLCHLRKGPQGYGFNLHSDKSRPGQYIRSVDPGSPAARSGLRAQDRLIEVNGQNVEGLRHAEVVASIKAREDEARLLVVDPETDEHFKRLRVTPTEEHVEGPLPSPVTNGTSPAQLNGGSACSSRSDLPGSDKDTEESGLHLSPTAAEAKEKARAMRVNKRAPQMDWNRKREIFSNF

SEQ ID NO: 14925 - protein, 1095 aa, Homo sapiens
MAEGAAGREDPAPPDAAGGEDDPRVGPDAAGDCVTAASGGRMRDRRSGVALPGAAGTPADSEAGLLEAARATPRRSSIIKDPSNQKCGGRKKTVSFSSMPSEKKISSANDCISFMQAGCELKKVRPNSRIYNRFFTLDTDLQALRWEPSKKDLEKAKLDISAIKEIRLGKNTETFRNNGLADQICEDCAFSILHGENYESLDLVANSADVANIWVSGLRYLVSRSKQPLDFMEGNQNTPRFMWLKTVFEAADVDGNGIMLEDTSVELIKQLNPTLKEAKIRLKFKEIQKSKEKLTTRVTEEEFCEAFCELCTRPEVYFLLVQISKNKEYLDANDLMLFLEAEQGVTHITEDICLDIIRRYELSEEGRQKGFLAIDGFTQYLLSSECDIFDPEQKKVAQDMTQPLSHYYINASHNTYLIEDQFRGPADINGYIRALKMGCRSVELDVSDGSDNEPILCNRNNMTTHVSFRSVIEVINKFAFVASEYPLILCLGNHCSLPQQKVMAQQMKKVFGNKLYTEAPLPSESYLPSPEKLKRMIIVKGKKLPSDPDVLEGEVTDEDEEAEMSRRMSVDYNGEQKQIRLCRELSDLVSICKSVQYRDFELSMKSQNYWEMCSFSETEASRIANEYPEDFVNYNKKFLSRIYPSAMRIDSSNLNPQDFWNCGCQIVAMNFQTPGPMMDLHTGWFLQNGGCGYVLRPSIMRDEVSYFSANTKGILPGVSPLALHIKIISGQNFPKPKGACAKGDVIDPYVCIEIHGIPADCSEQRTKTVQQNSDNPIFDETFEFQVNLPELAMIRFVVLDDDYIGDEFIGQYTIPFECLQPGYRHVPLRSFVGDIMEHVTLFVHIAITNRSGGGKAQKRSLSVRMGKKVREYTMLRNIGLKTIDDIFKIAVHPLREAIDMRENMQNAIVSIKELCGLPPIASLKQCLLTLSSRLITSDNTPSVSLVMKDSFPYLEPLGAIPDVQKKMLTAYDLMIQESRFLIEMADTVQEKIVQCQKAGMEFHEELHNLGAKEGLKGRKLNKATESFAWNITVLKGQGDLLKNAKNEAIENMKQIQLACLSCGLSKAPSSSAEAKSKRSLEAIEEKESSEENGKL

SEQ ID NO: 14926 - protein, 582 aa, Homo sapiens
MDFLLALVLVSSLYLQAAAEFDGRWPRQIVSSIGLCRYGGRIDCCWGWARQSWGQCQPFYVLRQRIARIRCQLKAVCQPRCKHGECIGPNKCKCHPGYAGKTCNQDLNECGLKPRPCKHRCMNTYGSYKCYCLNGYMLMPDGSCSSALTCSMANCQYGCDVVKGQIRCQCPSPGLQLAPDGRTCVDVDECATGRASCPRFRQCVNTFGSYICKCHKGFDLMYIGGKYQCHDIDECSLGQYQCSSFARCYNIRGSYKCKCKEGYQGDGLTCVYIPKVMIEPSGPIHVPKGNGTILKGDTGNNNWIPDVGSTWWPPKTPYIPPIITNRPTSKPTTRPTPKPTPIPTPPPPPPLPTELRTPLPPTTPERPTTGLTTIAPAASTPPGGITVDNRVQTDPQKPRGDVFIPRQPSNDLFEIFEIERGVSADDEAKDDPGVLVHSCNFDHGLCGWIREKDNDLHWEPIRDPAGGQYLTVSAAKAPGGKAARLVLPLGRLMHSGDLCLSFRHKVTGLHSGTLQVFVRKHGAHGAALWGRNGGHGWRQTQITLRGADIKSVVFKGEKRRGHTGEIGLDDVSLKKGHCSEER

SEQ ID NO: 14927 - protein, 156 aa, Homo sapiens
MMGSPVSHLLAGFCVWVVLGWVGGSVPNLGPAEQEQNHYLAQLFGLYGENGTLTAGGLARLLHSLGLGRVQGLRLGQHGPLTGRAASPAADNSTHRPQNPELSVDVWAGMPLGPSGWGDLEESKAPHLPRGPAPSGLDLLHRLLLLDHSLADHLNE

SEQ ID NO: 14928 - protein, 1253 aa, Homo sapiens
MLKTESSGERTTLRSASPHRNAYRTEFQALKSTFDKPKSDGEQKTKEGEGSQQSRGRKYGSNVNRIKNLFMQMGMEPNENAAVIAKTRGKGGHSSPQRRMKPKEFLEKTDGSVVKLESSVSERISRFDTMYDGPSYSKFTETRKMFERSVHESGQNNRYSPKKEKAGGSEPQDEWGGSKSNRGSTDSLDSLSSRTEAVSPTVSQLSAVFENTDSPSAIISEKAENNEYSVTGHYPLNLPSVTVTNLDTFGHLKDSNSWPPSNKRGVDTEDAHKSNATPVPEVASKSTSLASIPGEEIQQSKEPEDSTSNQQTPDSIDKDGPEEPCAESKAMPKSEIPSPQSQLLEDAEANLVGREAAKQQRKELAGGDFTSPDASASSCGKEVPEDSNNFDGSHVYMHSDYNVYRVRSRYNSDWGETGTEQDEEEDSDENSYYQPDMEYSEIVGLPEEEEIPANRKIKFSSAPIKVFNTYSNEDYDRRNDEVDPVAASAEYELEKRVEKLELFPVELEKDEDGLGISIIGMGVGADAGLEKLGIFVKTVTEGGAAQRDGRIQVNDQIVEVDGISLVGVTQNFAATVLRNTKGNVRFVIGREKPGQVSEVAQLISQTLEQERRQRELLEQHYAQYDADDDETGEYATDEEEDEVGPVLPGSDMAIEVFELPENEDMFSPSELDTSKLSHKFKELQIKHAVTEAEIQKLKTKLQAAENEKVRWELEKTQLQQNIEENKERMLKLESYWIEAQTLCHTVNEHLKETQSQYQALEKKYNKAKKLIKDFQQKELDFIKRQEAERKKIEDLEKAHLVEVQGLQVRIRDLEAEVFRLLKQNGTQVNNNNNIFERRTSLGEVSKGDTMENLDGKQTSCQDGLSQDLNEAVPETERLDSKALKTRAQLSVKNRRQRPSRTRLYDSVSSTDGEDSLERKPSNSFYNHMHITKLLPPKGLRTSSPESDSGVPPLTPVDSNVPFSSDHIAEFQEEPLDPEMGPLSSMWGDTSLFSTSKSDHDVEESPCHHQTTNKKILREKDDAKDPKSLRASSSLAVQGGKIKRKFVDLGAPLRRNSSKGKKWKEKEKEASRFSAGSRIFRGRLENWTPKPCSTAQTSTRSPCMPFSWFNDSRKGSYSFRNLPAPTSSLQPSPETLISDKKGSKNFTFNDDFSPSSTSSADLSGLGAEPKTPGLSQSLALSSDEALGMTASQDRAVVKKKLKEMKMSLEKARKAQEKMEKQREKLRRKEQEQMQRKSKKTEKMTSTTAEGAGEQ

SEQ ID NO: 14929 - protein, 692 aa, Homo sapiens
EVFASWKQQCLNRGKQDISERLISASLFLRFLCPAIMSPSLFNLMQEYPDDRTSRTLTLIAKVIQNLANFAKFGNKEEYMAFMNDFLEHEWGGMKRFLLEISNPDTISNTPGFDGYIDLGRELSVLHSLLWEVVSQLDKGENSFLQATVAKLGPLPRVLADITKSLTNPTPIQQQLRRFTEHNSSPNVSGSLSSGLQKIFEDPTDSDLHKLKSPSQDNTDSYFRGKTLLLVQQASSQSMTYSEKDERESSLPNGRSVSLMDLQDTHAAQVEHASVMLDVPIRLTGSQLSITQVASIKQLRETQSTPQSAPQVRRPLHPALNQPGGLQPLSFQNPVYHLNNPIPAMPKASIDSSLENLSTASSRSQSNSEDFKLSGPSNSSMEDFTKRSTQSEDFSRRHTVPDRHIPLALPRQNSTGQAQIRKVDQGGLGARAKAPPSLPHSASLRSTGSMSVVSAALVAEPVQNGSRSRQQSSSSRESPVPKVRAIQRQQTQQVQSPVDSATMSPVERTAAWVLNNGQYEEDVEETEQNLDEAKHAEKYEQEITKLKERLRVSSRRLEEYERRLLVQEQQMQKLLLEYKARLEDSEERLRRQQEEKDSQMKSIISRLMAVEEELKKDHAEMQAVIDAKQKIIDAQVINGDEIIQTGKTDRVPGFSQHQTDERADPSEGAVQHAGPQWHLPHQPHQAFHHGEW

SEQ ID NO: 14930 - protein, 289 aa, Homo sapiens
MLLLFLLFEGLCCPGENTADPFEIQILAGCRMNAPQIFLNMAYQGSDFLSFQGISWEPSPGAGIRAQNICKVLNRYLDIKEILQSLLGHTCPRFLAGLMEAGESELKRKVKPEAWLSCGPSPGPGRLQLVCHVSGFYPKPVWVMWMRGEQEQRGTQRGDVLPNADETWYLRATLDVAAGEAAGLSCRVKHSSLGGHDLIIHWGGYSIFLILICLTVIVTLVILVVVDSRLKKQSSNKNILSPHTPSPVFLMGANTQDTKNSRHQFCLAQVSWIKNRVLKKWKTRLNQLW

SEQ ID NO: 14931 - protein, 194 aa, Homo sapiens
MSLLAKPMSFETTAITFFIILLICLICILLLLVVFLYKCFQGRKGKETKKVPCTDANGGVDCAAAKVVTSNPEDHERILMQVMNLNVPMRPGILVQRQSKEVLATPLENRRDMEAEEENQINEKQEPENAGETGQEEDDGLQKIHTSVTRTPSVVESQKRPLKGVTFSREVIVVDLGNEYPTPRSYTREHKERK

SEQ ID NO: 14932 - protein, 817 aa, Homo sapiens
MYHSLSETRHPLQPEEQEVGIDPLSSYSNKSGGDSNKNGRRTSSTLDSEGTFNSYRKEWEELFVNNNYLATIRQKGINGQLRSSRFRSICWKLFLCVLPQDKSQWISRIEELRAWYSNIKEIHITNPRKVVGQQDLMINNPLSQDEGSLWNKFFQDKELRSMIEQDVKRTFPEMQFFQQENVRKILTDVLFCYARENEQLLYKQGMHELLAPIVFVLHCDHQAFLHASESAQPSEEMKTVLNPEYLEHDAYAVFSQLMETAEPWFSTFEHDGQKGKETLMTPIPFARPQDLGPTIAIVTKVNQIQDHLLKKHDIELYMHLNRLEIAPQIYGLRWVRLLFGREFPLQDLLVVWDALFADGLSLGLVDYIFVAMLLYIRDALISSNYQTCLGLLMHYPFIGDVHSLILKALFLRDPKRNPRPVTYQFHPNLDYYKARGADLMNKSRTNAKGAPLNINKVSNSLINFGRKLISPAMAPGSAGGPVPGGNSSSSSSVVIPTRTSAEAPSHHLQQQQQQQRLMKSESMPVQLNKGDVVTGSDAQVSVPVQTLTDLQGLSSKNISSSPSVESLPGGREFTGSPPSSATKKDSFFSNISRSRSHSKTMGRKESEEELEAQISFLQGQLNDLDAMCKYCAKVMDTHLVNIQDVILQENLEKEDQILVSLAGLKQIKDILKGSLRFNQSQLEAEENEQITIADNHYCSSGQGQGRGQGQSVQMSGAIKQASSETPGCTDRGNSDDFILISKDDDGSSARGSFSGQAQPLRTLRSTSGKSQAPVCSPLVFSDPLMGPASASSSNPSSSPDDDSSKDSGFTIVSPLDI

SEQ ID NO: 14933 - protein, 161 aa, Homo sapiens
MEELIWEQYTVTLQKDSKRGFGIAVSGGRDNPHFENGETSIVISDVLPGGPADGLLQENDRVVMVNGTPMEDVLHSFAVQQLRKSGKVAAIVVKRPRKVQVAALQASPPLDQDDRAFEVMDEFDGRSFRSGYSERSRLNSHGGRSRSWEDSPERGRPHERA

SEQ ID NO: 14934 - protein, 1128 aa, Homo sapiens
LVLKVVTVTRNLDPDDTARKKAPPPPKRAPTTALTLRSKSMTSELEELDKPEEIVPASKPSRAAENMAVEPRVATIKQRPSSRCFPAGSDMNSVYERQGIAVMTPTVPGSPKAPFLGIPRGTMRRQKSIDSRIFLSGITEEERQFLAPPMLKFTRSLSMPDTSEDIPPPPQSVPPSPPPPSPTTYNCPKSPTPRVYGTIKPAFNQNSAAKVSPATRSDTVATMMREKGMYFRRELDRYSLDSEDLYSRNAGPQANFRNKRGQMPENPYSEVGKIASKAVYVPAKPARRKGMLVKQSNVEDSPEKTCSIPIPTIIVKEPSTSSSGKSSQGSSMEIDPQAPEPPSQLRPDESLTVSSPFAAAIAGAVRDREKRLEARRNSPAFLSTDLGDEDVGLGPPAPRTRPSMFPEEGDFADEDSAEQLSSPMPSATPREPENHFVGGAEASAPGEAGRPLNSTSKAQGPESSPAVPSASSGTAGPGNYVHPLTGRLLDPSSPLALALSARDRAMKESQQGPKGEAPKADLNKPLYIDTKMRPSLDAGFPTVTRQNTRGPLRRQETENKYETDLGRDRKGDDKKNMLIDIMDTSQQKSAGLLMVHTVDATKLDNALQEEDEKAEVEMKPDSSPSEVPEGVSETEGALQISAAPEPTTVPGRTIVAVGSMEEAVILPFRIPPPPLASVDLDEDFIFTEPLPPPLEFANSFDIPDDRAASVPALSDLVKQKKSDTPQSPSLNSSQPTNSADSKKPASLSNCLPASFLPPPESFDAVADSGIEEVDSRSSSDHHLETTSTISTVSSISTLSSEGGENVDTCTVYADGQAFMVDKPPVPPKPKMKPIIHKSNALYQDALVEEDVDSFVIPPPAPPPPPGSAQPGMAKVLQPRTSKLWGDVTEIKSPILSGPKANVISELNSILQQMNREKLAKPGEGLDSPMGAKSASLAPRSPEIMSTISGTRSTTVTFTVRPGTSQPITLQSRPPDYESRTSGTRRAPSPVVSPTEMNKETLPAPLSAATASPSPALSDVFSLPSQPPSGDLFGLNPAGRSRSPSPSILQQPISNKPFTTKPVHLWTKPDVADWLESLNLGEHKEAFMDNEIDGSHLPNLQKEDLIDLGVTRVGHRMNIERALKQLLDR

SEQ ID NO: 14935 - protein, 114 aa, Homo sapiens
MLTRKIKLWDINAHITCRLCSGYLIDATTVTECLHTSQARQKQEPGPGAETILKISQKSHFTLKVLWVVSEQMRPRLGERNTGETPHSSHGAARPVAAVTVLTAGSFQISRGVP

SEQ ID NO: 14936 - protein, 468 aa, Homo sapiens
MMYFVIAAMKAQIEIIPCKICGDKSSGIHYGVITCEGCKGFFRRSQQSNATYSCPRQKNCLIDRTSRNRCQHCRLQKCLAVGMSRDAVKFGRMSKKQRDSLYAEVQKHRMQQQQRDHQQQPGEAEPLTPTYNISANGLTELHDDLSNYIDGHTPEGSKADSAVSSFYLDIQPSPDQSGLDINGIKPEPICDYTPASGFFPYCSFTNGETSPTVSMAELEHLAQNISKSHLETCQYLREELQQITWQTFLQEEIENYQNKQREVMWQLCAIKITEAIQYVVEFAKRIDGFMELCQNDQIVLLKAGSLEVVFIRMCRAFDSQNNTVYFDGKYASPDVFKSLGCEDFISFVFEFGKSLCSMHLTEDEIALFSAFVLMSADRSWLQEKVKIEKLQQKIQLALQHVLQKNHREDGILTKLICKVSTLRALCGRHTEKLMAFKAIYPDIVRLHFPPLYKELFTSEFEPAMQIDG

SEQ ID NO: 14937 - protein, 209 aa, Homo sapiens
YDACLQHLACLQDINKDDYKIILNTAVAEFFKSNQTTTDNLRQTLNQLKNQVHSAVEEMDGLDDVENSMLYYNQAVILYHLRQYTEAISVGEKLYQFIEPFEEKFAQAVCFLLVDLYILTYQAEKALHLLAVLEKMISQGNNNKNGKNETGNNNNKDGSNHKAESGALIEAAKSKIHQYKVRAYIQMKSLKACKREIKSVMNTAGNVNA

SEQ ID NO: 14938 - protein, 566 aa, Homo sapiens
MPCCSHRRCREDPGTSESQEMDPVAFDDVAVNFTQEEWALLDISQRKLYKEVMLETFRNLTSVGKSWKDQNIEYEYQNPRRNFRSLIEKKVNEIKDDSHCGETFTQVPDDRLNFQEKKASPEIKSCDSFVCGEVGLGNSSFNMNIRGDIGHKAYEYQEYGPKPCKCQQPKKAFRYHPSFRTPQRDHTGEKPYACKECGKTFISHSSIQRHVVMHSGDGPYKCKFCGKAFHCLSLYLIHERIHTGEKPYECKQCGKSFSYSATLRIHERTHTGEKPYECQQCGKAFHSPRCYRRHERIHTGEKAYQCKECGKAFTCPQYVRIHERTHSRKKPYECTQCGKALSSLTSFQTHIRMHSGERPYECKICGKGFCSANSFQRHEKTHSGEKPYKCKQCGKAFIHSSSLRYHERIHTGEKPYECKQCGKAFRSSSHLQLHGRTHTGEKPYECQECGKAFRSMKNLQSHERTQTHVRIHSGERPYKCKLCGKGFYCPKSLQRHEKTHTGEKLYECKQCGEAFSSSSSFRYHERTHTGEKPYKCKQCGKAFRAASVLRMHGRTHPEDKPYECKQ

SEQ ID NO: 14939 - protein, 483 aa, Homo sapiens
MALEIHMSDPMCLIENFNEQLKVNQEALEILSAITQPVVVVAIVGLYRTGKSYLMNKLAGKNKGFSVASTVQSHTKGIWIWCVPHPNWPNHTLVLLDTEGLGDVEKADNKNDIQIFALALLLSSTFVYNTVNKIDQGAIDLLHNVTELTDLLKARNSPDLDRVEDPADSASFFPDLVWTLRDFCLGLEIDGQLVTPDEYLENSLRPKQGSDQRVQNFNLPRLCIQKFFPKKKCFIFDLPAHQKKLAQLETLPDDELEPEFVQQVTEFCSYIFSHSMTKTLPGGIMVNGSRLKNLVLTYVNAISSGDLPCIENAVLALAQRENSAAVQKAIAHYDQQMGQKVQLPMETLQELLDLHRTSEREAIEVFMKNSFKDVDQSFQKELETLLDAKQNDICKRNLEASSDYCSALLKDIFGPLEEAVKQGIYSKPGGHNLFIQKTEELKAKYYREPRKGIQAEEVLQKYLKSKESVSHAILQTDQALTET

SEQ ID NO: 14940 - protein, 414 aa, Homo sapiens
MEDIQTNAELKSTQEQSVPAESAAVLNDYSLTKSHEMENVDSGEGPANEDEDIGDDSMKVKDEYSERDENVLKSEPMGNAEEPEIPYSYSREYNEYENIKLERHVVSFDSSRPTSGKMNCDVCGLSCISFNVLMVHKRSHTASAEARHIKAEMGSERALVLDRLASNVAKRKSSMPQKFIGEKRHCFDVNYNSSYMYEKESELIQTRMMDQAINNAISYLGAEALRPLVQTPPAPTSEMVPVISSMYPIALTRAEMSNGAPQELEKKSIHLPEKSVPSERGLSPNNSGHDSTDTDSNHEERQNHIYQQNHMVLSRARNGMPLLKEVPRSYELLKPPPICPRDSVKVINKEGEVMDVYRCDHCRVLFLDYVMFTIHMGCHGFRDPFECNMCGYRSHDRYEFSSHIARGEHRALLK

SEQ ID NO: 14941 - protein, 751 aa, Homo sapiens
MASKVTDAIVWYQKKIGAYDQQIWEKSVEQREIKFIKLGLRNKPKKTAHVKPDLIDVDLVRGSAFAKAKPESPWTSLTRKGIVRVVFFPFFFRWWLQVTSKVIFFWLLVLYLLQVAAIVLFCSTSSPHSIPLTEVIGPIWLMLLLGTVHCQIVSTRTPKPPLSTGGKRRRKLRKAAHLEVHREGDGSSTTDNTQEGAVQNHGTSTSHSVGTVFRDLWHAAFFLSGSKKAKNSIDKSTETDNGYVSLDGKKTVKSGEDGIQNHEPQCETIRPEETAWNTGTLRNGPSKDTQRTITNVSDEVSSEEGPETGYSLRRHVDRTSEGVLRNRKSHHYKKHYPNEDAPKSGTSCSSRCSSSRQDSESARPESETEDVLWEDLLHCAECHSSCTSETDVENHQINPCVKKEYRDDPFHQSHLPWLHSSHPGLEKISAIVWEGNDCKKADMSVLEISGMIMNRVNSHIPGIGYQIFGNAVSLILGLTPFVFRLSQATDLEQLTAHSASELYVIAFGSNEDVIVLSMVIISFVVRVSLVWIFFFLLCVAERTYKQRLLFAKLFGHLTSARRARKSEVPHFRLKKVQNIKMWLSLRSYLKRRGPQRSVDVIVSSAFLLTISVVFICCAQLLHVHEIFLDCHYNWELVIWCISLTLFLLRFVTLGSETSKKYSNTSILLTEQINLYLKMEKKPNKKEELTLVNNVLKLATKLLKELDSPFRLYGLTMNPLLYNITQVVILSAVSGVISDLLGFNLKLWKIKS

SEQ ID NO: 14942 - protein, 466 aa, Homo sapiens
MVRELIVPTEDPSGESLIISPEEFERIKWASHVLTREELEARDQAFKKEKEATMDAVMTRKKIMKQKEMVWNNNKKLSDLEEVAKERAQNLLQRANKLRMEQEEELKDMSKIILNAKCHAIRDAQILEKQQIQKELDTEEKRLDQMMEVERQKSIQRQEELERKRREERIRGRRQIVEQMEKNQEERSLLAEQREQEKEQMLEYMEQLQEEDLKDMERRQQQKLKMQAEIKRINDENQKQKAELLAQEKLADQMVMEFTKKKMAREAEFEAEQERIRREKEKEIARLRAMQEKAQDYQAEQDALRAKRNQEVADREWRRKEKENARKKMETEAELRKSRLEQVAFKEHALAVQVQRDRDEFERILRAQREQIEKERLEEEKKATGRLQHANELRRQVRENQQKEVQNRIATFEEGRRLKEEAQKRRERIDEIKRKKLEELRATGLPEKYCIEAERKANILPATSVN

SEQ ID NO: 14943 - protein, 535 aa, Homo sapiens
MSGYSSDRDRGRDRGFGAPRFGGSRAGPLSGKKFGNPGEKLVKKKWNLDELPKFEKNFYQEHPDLARRTAQEVETYRRSKEITVRGDGPICLVLAPTRELAQQVQQVAAEYCRACRLKSTCIYGGAPKGPQIRDLERGVEICIATPGRLIDFLECGKTNLRRTTYLVLDEADRMLDMGFEPQIRKIVDQIRPDRQTLMWSATWPKEVRQLAEDFLKDYIHINIGALELSANHNILQIVDVCHDVEKDEKLIRLMEEIMSEKENKTIVFVETKRRCDELTRKMRRDGWPAMGIHGDKSQQERDWVLNEFKHGKAPILIATDVASRGLDVEDVKFVINYDYPNSSEDYIHRIGRTARSTKTGTAYTFFTPNNIKQVSDLISVLREANQAINPKLLQLVEDRGSGRSRGRGGMKDDRRDRYSAGKRGGFNTFRDRENYDRGYSSLLKRDFGAKTQNGVYSAANYTNGSFGSNFVSAGIQTSFRTGNPTGTYQNGYDSTQQYGSNVPNMHNGMNQQAYAYPATAAAPMIGYPMPTGYSQ

SEQ ID NO: 14944 - protein, 184 aa, Homo sapiens
MSDKSELKAELERKKQRLAQIREEKKRKEEERKKKETDQKKEAVAPVQEESDLEKKRREAEALLQSMGLTPESPIVPPPMSPSSKSVSTPSEAGSQDSGDGAVGSRTLHWDTDPSVLQLHSDSDLGRGPIKLGMAKITQVDFPPREIVTYTKETQTPVMAQPKEDEEEDDDVVAPKPPIEPEEE

SEQ ID NO: 14945 - protein, 300 aa, Homo sapiens
MDGTMEDSEAVQRATALIEQRLAQEEENEKLRGDARQKLPMDLLVLEDEKHHGAQSAALQKVKGQERVRKTSLDLRREIIDVGGIQNLIELRKKRKQKKRDALAASHEPPPEPEEITGPVDEETFLKAAVEGKMKVIEKFLADGGSADTCDQFRRTALHRASLEGHMEILEKLLDNGATVDFQDRLDCTAMHWACRGGHLEVVKLLQSHGADTNVRDKEGDTALHDAVRLNRYKIIKLLLLHGADMMTKNLAGKTPTDLVQLWQADTRHALEHPEPGAEHNGLEGPNDSGRETPQPVPAQ

SEQ ID NO: 14946 - protein, 1133 aa, Homo sapiens
MTKKEEPPPSRVPRAVRVASLLSEGEELSGDDQGDEEEDDHAYEGVPNGGWHTSSLSLSLPSTIAAPHPMDGPPGGSTPVTPVIKAGWLDKNPPQGSYIYQKRWVRLDTDHLRYFDSNKDAYSKRFISVACISHVAAIGDQKFEVITNNRTFAFRAESDVERKEWMQALQQAMAEQRARARLSSAYLLGVPGSEQPDRAGSLELRGFKNKLYVAVVGDKVQLYKNLEEYHLGIGITFIDMSVGNVKEVDRRSFDLTTPYRIFSFSADSELEKEQWLEAMQGAIAEALSTSEVAERIWAAAPNRFCADCGAPQPDWASINLCVVICKRCAGEHRGLGAGVSKVRSLKMDRKVWTETLIEALCAAVTTTDLAETQALLGCGAGINCFSGDPEAPTPLALAEQAGQTLQMEFLRNNRTTEVPRLDSMKPLEKHYSVVLPTVSHSGFLYKTASAGKLLQDRRAREEFSRRWCVLGDGVLSYFENERAVTPNGEIRASEIVCLAVPPPDTHGFEHTFEVYTEGERLYLFGLESAEQAHEWVKCIAKAFVPPLAEDLLARDFERLGRLPYKAGLSLQRAQEGWFSLSGSELRAVFPEGPCEEPLQLRKLQELSIQGDSENQVLVLVERRRTLYIQGERRLDFMGWLGAIQKAAASMGDTLSEQQLGDSDIPVIVYRCVDYITQCGLTSEGIYRKCGQTSKTQRLLESLRQDARSVHLKEGEQHVDDVSSALKRFLRDLPDGLFTRAQRLTWLEASEIEDEEEKVSRYRELLVRLPPVNRATVKALISHLYCVQCFSDTNQMNVHNLAIVFGPTLFQTDGQDYKAGRVVEDLINHYVVVFSVDEEELRKQREEITAIVKMRVAGTASGTQHAGDFICTVYLEEKKAETEQHIKVPASMTAEELTLEILDRRNVGIREKDYWTCFEVNEREEAERPLHFAEKVLPILHGLGTDSHLVVKKHQAMEAMLLYLASRVGDTKHGMMKFREDRSLLGLGLPSGGFHDRYFILNSSCLRLYKEVRSHRPEKEWPIKSLKVYLGVKKKLRPPTCWGFTVVHETEKHEKQQWYLCCDTQMELREWFATFLFVQHDGLVWPSEPSRVSRAVPEVRLGSVSLIPLRGSENEMRRSVAAFTADPLSLLRNV

SEQ ID NO: 14947 - protein, 582 aa, Homo sapiens
MEVRASLQKVSGSSDSVATMNSEEFVLVPQYADDNSTKHEEKPQLKIVSNGDEQLEKAMEEILRDSEKRPSSLLVDCQSSSEISDHSFGDIPASQTNKPSLQLILDPSNTEISTPRPSSPGGLPEEDSVLFNKLTYLGCMKVSSPRNEVEALRAMATMKSSSQYPFPVTLYVPNVPEGSVRIIDQSSNVEIASFPIYKVLFCARGHDGTTESNCFAFTESSHGSEEFQIHVFSCEIKEAVSRILYSFCTAFKRSSRQVSDVKDSVIPTPDSDVFTFSVSLEVKEDDGKGNFRLLVIPIPFEYFSPVPKDRDKFYFKLKQGIEKKVVITVQQLSNKELAIERCFGMLLSPGRNVKNSDMHLLDMESMGKSYDGRAYVITGMWNPNAPVFLALNEETPKDKQVYMTVAVDMVVTEVVEPVRFLLETVVRVYPANERFWYFSRKTFTETFFMRLKQSEGKGHTNAGDAIYEVVSLQRESDKEEPVTPTSGGGPMSPQDDEAEEESDNELSSGTGDVSKDCPEKILYSWGELLGKWHSNLGARPKGLSTLVKSGVPEALRAEVWQLLAGCHDNQAMLDRYRILITK

SEQ ID NO: 14948 - protein, 545 aa, Homo sapiens
MFAEAAKTTRPCGMAEFKEKPEAPTEQLDVACGQENLPVGAWPPGAAPAPFQYTPDHVVGPGADIDPTQITFPGCICVKTPCLPGTCSCLRHGENYDDNSCLRDIGSGGKYAEPVFECNVLCRCSDHCRNRVVQKGLQFHFQVFKTHKKGWGLRTLEFIPKGSSLYCPVEKSNISCGNEKEPSMCGSAPSVFPSCKRLTLETMKMMLDKKQIRAIFLFEFKMGRKAAETTRNINNAFGPGTANERTVQWWFKKFCKGDESLEDEERSGRPSEVDNDQLRAIIEADPLTTTREVAEELNVNHSTVVRHLKQIGKVKKLDKWVPHELTENQKNRRFEVSSSLILRNHNEPFLDRIVTCDEKWILYDNRRRSAQWLDQEEAPKHFPKPILHPKKVMVTIWWSAAGLIHYSFLNPGETITSEKYAQEIDEMNQKLQRLQLALVNRKGPILLHDNARPHVAQPTLQKLNELGYEVLPHPPYSPDLLPTNYHVFKHLNNFLQGKRFHNQQDAENAFQEFVESQSTDFYATGINQLISRWQKCVDCNGSYFD

SEQ ID NO: 14949 - protein, 714 aa, Homo sapiens
MAGLTAAAPRPGVLLLLLSILHPSRPGGVPGAIPGGVPGGVFYPALGPGGKPLKPVPGGLAGAGLGAGLGAFPAVTFPGALVPGGVADAAAAYKAAKAGAGLGGVPGVGGLGVSAGAVVPQPGAGVKPGKVPGVGLPGVYPGGVLPGARFPGVGVLPGVPTGAGVKPKAPGVGGAFAGIPGVGPFGGPQPGVPLGYPIKAPKLPGGYGLPYTTGKLPYGYGPGGVAGAAGKAGYPTGTGVGPQAAAAAAAKAAAKFGAGAAGVLPGVGGAGVPGVPGAIPGIGGIAGVGTPAAAAAAAAAAKAAKYGAAAGLVPGGPGFGPGVVGVPGAGVPGVGVPGAGIPVVPGAGIPGAAVPGVVSPEAAAKAAAKAAKYGARPGVGVGGIPTYGVGAGGFPGFGVGVGGIPGVAGVPGVGGVPGVGGVPGVGISPEAQAAAAAKAAKYGVGTPAAAAAKAAAKAAQFGLVPGVGVAPGVGVAPGVGVAPGVGLAPGVGVAPGVGVAPGVGVAPGIGPGGVAAAAKSAAKVAAKAQLRAAAGLGAGIPGLGVGVGVPGLGVGAGVPGLGVGAGVPGFGAVPGALAAAKAAKYGAAVPGVLGGLGALGGVGIPGGVVGAGPAAAAAAAKAAAKAAQFGLVGAAGLGGLGVGGLGVPGVGGLGGIPPAAAAKAAKYGAAGLGGVLGGAGQFPLGGVAARPGFGLSPIFPGGACLGKACGRKRK

SEQ ID NO: 14950 - protein, 656 aa, Homo sapiens
SPPCAARAAAAPPPWRRPRPHWKVRVAAIEATGAVIHFGNGKSVDDVLSHFAQRLFDDVPQVRRAVASVVGGWLLCLRDRYSFFHKLIPLLLSSLNDEVPEVRQLAASLWEDVGLQWQKENEEDLKDKLDFAPPTPPHYPPHERRPVLGCRELVFRNLSKILPALCHDITDWVVGTRVKSAQLLPVLLLHAEDHATQHLEVVLRTLFQACTDEEAAVVQSCTRSAELVGTFVSPEVFLKLILSTLKKTPSASGLLVLASAMRGCPREALQPHLAAIATELAQAHICQASENDLYLERLLLCVQALVSVCHEDCGVASLQLLDVLLTIVALAGATGLRDKAQETMDSLAMVEGVSSCQDLYRKHIGPLLERVTASHLDWTAHSPELLQFSVIVAQSGPALGEALPHVVPTLRACLQPSQDPQMRLKLFSILSTVLLRATDTINSQGQFPSYLETVTKDILAPNLQWHAGRTAAAIRTAAVSCLWALTSSEVLSAEQIRDVQETLMPQVLTTLEEDSKMTRLISCRIINTFLKTSGGMTDPEKLIRIYPELLKRLDDVSNDVRMAAASTLVTWLQCVKGANAKSYYQSSVQYLYRELLVHLDDPERAIQDAILEVLKEGSGLFPDLLVRETEAVIHKHRSATYCEQLLQHVQAVPATQ

SEQ ID NO: 14951 - protein, 215 aa, Homo sapiens
MGLGVSAEQPAGGAEGFHLHGVQENSPAQQAGLEPYFDFIITIGHSRLNKENDTLKALLKANVEKPVKLEVFNMKTMRVREVEVVPSNMWGGQGLLGASVRFCSFRRASEQVWHVLDVEPSSPAALAGLRPYTDYVVGSDQILQESEDFFTLIESHEGKPLKLMVYNSKSDSCRESGMWHWLWVSTPDPNSAPQLPQEATWHPTTFCSTTWCPTT

SEQ ID NO: 14952 - protein, 728 aa, Homo sapiens
MKGDTRHLNGEEDAGGREDSILVNGACSDQSSDSPPILEAIRTPEIRGRRSSSRLSKREVSSLLSYTQDLTGDGDGEDGDGSDTPVMPKLFRETRTRSESPASLRRRATASAGTPWPSPPSSYLTIDLTDDTEDTHGTPQSSSTPYARLAQDSQQGGMESPQVEADSGDGDSSEYQDGKEFGIGDLVWGKIKGFSWWPAMVVSWKATSKRQAMSGMRWVQWFGDGKFSEVSADKLVALGLFSQHFNLATFNKLVSYRKAMYHALEKARVRAGKTFPSSPGDSLEDQLKPMLEWAHGGFKPTGIEGLKPNNTQPENKTRRRTADDSATSDYCPAPKRLKTNCYNNGKDRGDEDQSREQMASDVANNKSSLEDGCLSCGRKNPVSFHPLFEGGLCQTCRDRFLELFYMYDDDGYQSYCTVCCEGRELLLCSNTSCCRCFCVECLEVLVGTGTAAEAKLQEPWSCYMCLPQRCHGVLRRRKDWNVRLQAFFTSDTGLEYEAPKLYPAIPAARRRPIRVLSLFDGIATGYLVLKELGIKVGKYVASEVCEESIAVGTVKHEGNIKYVNDVRNITKKNIEEWGPFDLVIGGSPCNDLSNVNPARKGLYEGTGRLFFEFYHLLNYSRPKEGDDRPFFWMFENVVAMKVGDKRDISRFLECNPVMIDAIKVSAAHRARYFWGNLPGMNRIFGFPVHYTDVSNMGRGARQKLLGRSWSVPVIRHLFAPLKDYFACE

SEQ ID NO: 14953 - protein, 5388 aa, Homo sapiens
MAPIWGMDVPLPSDISLLLLFVFFIWRLWTLFSRNRSWKQVAAKINSETSKQHRLKKIQKLTGQRDPILYSSAQDPQWEENLRMACTEANLTCVSELPVGWTQEYILWSMERSLQQIFRYLESARSRLVEQDLPESQDMISSSTTSVLVAQKTVLCCCDYKKAKHSTDHSISFSSSCNDSSLSHLPVFSEGTTWEFRSHSLPISHKKQSSVFRNQGRTLPLFQLSEPQKSKIFQNLADLSPLQPQSSFINSISEPLNICKQKRKKNDERMSKSHLTSDHEPNSVSKERPRLPRWATFKLSPSVRRELEGHMSQKVFALRQQTAPLPLRKSWAMLNYITEVQGGVAESEKPQTQLSMPIHQNTEQNINNKSSDLPSFQLHVNAGVGSGSNSTETKLSQSLISDKQLQPGDGPQILGFKPLVTSMGSLPPRSLELNVIQEETPLLKNDPKHVLELSIEERVIGFPEKRIQQHKTQVTNVELTPRLSYQVKDSLKVTPLALLRVMDSMGMIPESHSEFAGLFSQLPSQVVKPMETMETVSITPKPPNQVIQSMEAAPRSQHQVMESERVATRLLNQVTDNKKVTPVALLQVMDSMGMINKSHPCIESVGMTPTPRYQVIESVKMNTLLNHQDTKPEKMNLRPQHAVTETVEMMPGPQHKVMESAGMTSGSQSQVMEQGKATPGLICQDTKSLEMISAPLHQVMGYVKGIPVALLQAMDFREIIPPAQPHVIESGGLTPSSQLQGRRSVHLVLPPEFQDINTVELTLRPPTEDTKSAELAPKPWLHDVRSEKVAPVLLLEDVKTPQMVECRRSIPETQVQGMKYGELNKGTQFKEVKAAEMSPKQNHEATEPERLTPWHQASESLEMISGPGYQGKEAKLTSDNCHQVEKSIGLTQPSLGTSPGPLSQTSESVEMSSVSFQDILKTMHQLGKAMGETPVSQHTTKESLDLIPGSEMQSVKSEGVTTEPQPHDMKFVYCNLGPCSEVTELSEIPPMSEYKETVGLALPQVAKTQGVIPVPPHSETGFLELTLGPGTQYEKSEPLLQNLKSMELTSESSPLLIGSKKLITEQKPHVMDLTPGPQLQGEKSKQLGLESQLQDMKHMNLIQQSTTGVVESEEMMPELPLQSMPLEDLTKREELQRVKSVDLNLGPSQPSVKSSELTSGPQLPSVRFSKIFPGPLLQGEKPVELISQPPHYGVKSDELTSDSPVQDIKLSDFIPEPTHQSVKFVQLTPESQPQDVKFVELSPGLFLQDVKFSDLIPEPKHQGFKHMQLTPGAQLEDIKSLDFVPESSLQSSQGTHIEDMKSVLSTEGSQFHSMKSAKLTSELPFQSVKSEEVNLGPWQQDIKFSELTSRPKLQGVNSADQTPGSMFHSVNFVEVVPKLGLQDSKLAKIFPGTQSMKQVGLNPELQLQDVKCFDLVPGTQPQGVKSLELNSGPQLQCVKVLEMTPGPKMQGVPPVTMAPGPEGEGVKPELLVPEPLFQGVKYVAGNQEPSLEAEVSYKLVSEPQMPDAESMELTPGPQLPSVNHSELTRQPQLQGIKSSELIQRPQLQNVNPVEWSPVLKLKGFRSEKLTSEPQLEDMTSAELISGPHLGDVKTMQLTPEPELEDVKSMTLTPEPQAGGVKLEEVTPGSKLQSELLTSGSHLEDMKSVTLTPGPCLESIKSMEITFPQPEGGKSVAITLGSQTEDVKSVEFTPDSELQGVKSVELTPCSRIQDLKTEELVLGTQLQDMKTAKLKLGLKMQGESMAFAPGPLLQGVKSMETLQRPQLQSVKPEELTSVPQMQDMKFVEITPCLKLRSLKSIKETQDPHLQCVKPVKLTPWQKRQAVKFVNITRGEEFEEVKSVDLALKQQFQGMAPVDLTLEPEQDGQISVNSQEQQCVNFEQVKKGSESEGVMSLELIPEPKSEGIKSVDLKSDLQSKGIKSSELTPESNMQDVKAKEFKHEPQLQSMKSPKLTPGPQLHQVKPLGSTVEPQIQSVKIVELNKELELGRMKSVQWITRPEFQGLKSVGLNLGSQSRSVKPAELKLSIQLGDMIASKLVLEPKLQGAKPMEFNRGPQLQCVKTSELSSGPQLQKGKMLASTSEPQLQGVKTVELNQDSQLTSVKSVQWIPGPEFQGVKTIGLNLGSQSQGVKPGESKSSIESGGVKSSQLTLGPKLQSVTSMEFNLGSQLHFVKAPELSQGPQLQKGKIPASTSEPYFQGVKTVELNQDSQLGNAKSVQWISGPEFQGVKTVGLNLGSQSRGVKPAELKSSTESGGVKSSELTLGPKLQGAKPVEFNFGPQLQCVKTPKMSRGPQLQKGKILASTSEPQLQGVKDVESNKDSQLGSVNSVQWIPGPEFQGVKSVLKCGSQSRVVTTVELKPSVQLRNVKSSELTPRPKLQSIQPLTSLQEHQLPGLKPIALKSGLQLRTVKSCGPISTSKLCDIKSMAFKPGLHSQDVKSSELTPRPQLHKVKPLEACPGTQLQDVKSPAFTQVPQFSGVKSGVLSQELPLQSDKTVALNSLLHLKSKKSSELAHQTELPGMKSEEFNSGPQWQCVKSSKLNPKTKSQDMKFRELNPSSQLKDIPYYDLTTRTKIQGVKSTDFKPGPQLQGVKSSESIPKTKLQEVKLMECNSGPRLQDLKSSRLIIGIKCQDIKSMDFSSGPHLQTVKSSEVIPGGKLQGVKSVEFKPSPKLQSEKSDLTLGRKFPGVKSVELESGPQLQDIKSSDLIMGIKLQDVKSMKFSSGQHFQGIKSSEVTSGTRLQSMKSMDFNSGQQTQSEKSSELIQGTNHQDVKSVEFHHGLKLQGVTSSELTPETKLQGGESVEFNSGPQWQDTKYSNSIMGTELQDVKSMEFSSGSHLQGMKSSEVIPATKLQKVKSVLMPRPMRQDVKSSELTVGTKVQDRTSLELSSTSQLQDRKLSMLTPGIHLQGVKSVEYNPGAKLEDMKSGLIKLQTVNSTEGNHDPELQVAKLSKLALESKIHSVAPSEFNAEKQQQDEKSHKLNPWPDLQSVKFMVFNPEPHLQHRKSSELCTGTKLQDVKSMKFNLQQQLQGVKSSELCLGTRLQGIQSLDFNPGPQLQGTKSAKLNPGPELQGIKSKVFCLGPHLQDVNSSVSIPEPPHQCVNSTGSNCGLPLQGVNSASIPAPKLQCISSNGCIPGPHLQGVNSAFIPQPKAHCVNSIGCNPGPYLQGMKSPELTPVSKLQGMKCSELNPGTEIQSETPMMFNPIPHLQGLKSELTPGSKLLRAAPMECNPGPQVQYVNSSELNPGLKLQCIDSMECKLAPHLQGVESGTKFQVMKFSELHPGPELQGIKSVVFNSVQHLQDVKCELTPGTKFQDITPKEFNSGPQLQGMNSEEFHSHLRQHNVRSVVFVPEPCSQDVKSVKSTLWPQPQSVNSSGLTSCFGSQCVKSVAFASKPCFQDVKPMELTPGAQQQGINYQELTSGWQDVKSMMLVPEPTRKFPSGPLLTSVRFSNLSPESQQQDVKSLEFTVEPKLQSVKHVKLSSVSLQQTIKSVELAPGSLPQRVKYGEQTPRTNYQIMESSELIPRPGHQFAKYAEMIPQPKYQIPKSANLISIPIYHATESSEMAQGLAYKGIDTVEKSVGLTPKLTGRAKESLGMLLQPDLQVPKFVDLTPMVRDQGSKFLGLTPEKSYQILETMELLSQSRPRVKDVGELYMKPLQQTVEYEGITPELKHYFTEAMGLTAEARIQANEFFGMTPKPTSQATGFAERSPRLCPQNLECVEVISEKRLQGEESVVLIPKSLHHVPDSASGMTPGLGHRVPESVELTSKSGVQVEKTLQLTPKPQHHVGSPGIISGLGHQVPESVNLTCKQWLQMEESLEVPLKQTSQVIGHEESVELTSEARQHREVSMGLTKSKNQSMKSPGTTPGPLGRIVEFMRISPEPLDQVTESARTQLQVAQSEEVILIDVPKVVQSVKVTPGPPFQIVKSVTIPRPTPQMVEYIELTPKLQYVRPSEHHTGPCLQDVKSTKLITKPKHQILETVELTGFQIVKTMLIPGPSLQIVKSEELAPGPIPQVVEPIGVALESGIEAINCVDLLPRPHLQELIVPAELTPSPCTQVKSAELTSPQTSPFEEHTILTHKQGLQAVKSTVIKTEPPKVMETEDLNLGHVCQNRDCQKLTSEELQVGTDFSRFLQSSSTTLISSSVRTASELGGLWDSGIQEVSRALDIKNPGTDILQPEETYIDPTMIQSLTFPLALHNQSSDKTANIVENPCPEILGVDVISKETTKRKQMEELENSLQRHLPQSWRSRSRTFQAESGVQKGLIKSFPGRQHNVWESHAWRQRLPRKYLSTMLMLGNILGTTMERKLCSQTSLAERATADTCQSIQNLFGIPAELMEPSQSLPEKGPVTISQPSVVKNYIQRHTFYHGHKKRMALRIWTRGSTSSIIQQYSGTRVRIKKTNSTFNGISQEVIQHMPVSCAGGQLPVLVKSESSLSIFYDREDLVPMEESEDSQSDSQTRISESQHSLKPNYLSQAKTDFSEQFQLLEDLQLKIAAKLLRSQIPPDVPPPLASGLVLKYPICLQCGRCSGLNCHHKLQTTSGPYLLIYPQLHLVRTPEGHGEVRLHLGFRLRIGKRSQISKYRERDRPVIRRSPISPSQRKAKIYTQASKSPTSTIDLQSGPSQSPAPVQVYIRRGQRSRPDLVEKTKTRAPGHYEFTQVHNLPESDSESTQNEKRAKVRTKKTSDSKYPMKRITKRLRKHRKFYTNSRTTIESPSRELAAHLRRKRIGATQTSTASLKRQPKKPSQPKFMQLLFQSLKRAFQTAHRVIASVGRKPVDGTRPDNLWASKNYYPKQNARDYCLPSSIKRDKRSADKLTPAGSTIKQEDILWGGTVQCRSAQQPRRAYSFQPRPLRLPKPTDSQSGIAFQTASVGQPLRTVQKDSSSRSKKNFYRNETSSQESKNLSTPGTRVQARGRILPGSPVKRTWHRHLKDKLTHKEHNHPSFYRERTPRGPSERTRHNPSWRNHRSPSERSQRSSLERRHHSPSQRSHCSPSRKNHSSPSERSWRSPSQRNHCSPPERSCHSLSERGLHSPSQRSHRGPSQRRHHSPSERSHRSPSERSHRSSSERRHRSPSQRSHRGPSERSHCSPSERRHRSPSQRSHRGPSERRHHSPSKRSHRSPARRSHRSPSERSHHSPSERSHHSPSERRHHSPSERSHCSPSERSHCSPSERRHRSPSERRHHSPSEKSHHSPSERSHHSPSERRRHSPLERSRHSLLERSHRSPSERRSHRSFERSHRRISERSHSPSEKSHLSPLERSRCSPSERRGHSSSGKTCHSPSERSHRSPSGMRQGRTSERSHRSSCERTRHSPSEMRPGRPSGRNHCSPSERSRRSPLKEGLKYSFPGERPSHSLSRDFKNQTTLLGTTHKNPKAGQVWRPEATR

SEQ ID NO: 14954 - protein, 589 aa, Homo sapiens
MAVPPGHGPFSGFPGPQEHTQVLPDVRLLPRRLPLAFRDATSAPLRKLSVDLIKTYKHINEVYYAKKKRRAQQAPPQDSSNKKEKKVLNHGYDDDNHDYIVRSGERWLERYEIDSLIGKGSFGQVVKAYDHQTQELVAIKIIKNKKAFLNQAQIELRLLELMNQHDTEMKYYIVHLKRHFMFRNHLCLVFELLSYNLYDLLRNTHFRGVSLNLTRKLAQQLCTALLFLATPELSIIHCDLKPENILLCNPKRSAIKIVDFGSSCQLGQRIYQYIQSRFYRSPEVLLGTPYDLAIDMWSLGCILVEMHTGEPLFSGSNEVDQMNRIVEVLGIPPAAMLDQAPKARKYFERLPGGGWTLRRTKELRKDLVLRMLEYEPAARISPLGALQHGFFRRTADEATNTGPAGSSASTSPAPLDTCPSSSTASSISSSGGSSGSSSDNRTYRYSNRYCGGPGPPITDCEMNSPQVPPSQPLRPWAGGDVPHKTHQAPASASSLPGTGAQLPPQPRYLGRPPSPTSPPPPELMDVSLVGGPADCSPPHPAPAPQHPAASALRTRMTGGRPPLPPPDDPATLGPHLGLRGVPQSTAASS

SEQ ID NO: 14955 - protein, 1292 aa, Homo sapiens
MKPATGLWVWVSLLVAAGTVQPSDSQSVCAGTENKLSSLSDLEQQYRALRKYYENCEVVMGNLEITSIEHNRDLSFLRSVREVTGYVLVALNQFRYLPLENLRIIRGTKLYEDRYALAIFLNYRKDGNFGLQELGLKNLTEILNGGVYVDQNKFLCYADTIHWQDIVRNPWPSNLTLVSTNGSSGCGRCHKSCTGRCWGPTENHCQTLTRTVCAEQCDGRCYGPYVSDCCHRECAGGCSGPKDTDCFACMNFNDSGACVTQCPQTFVYNPTTFQLEHNFNAKYTYGAFCVKKCPHNFVVDSSSCVRACPSSKMEVEENGIKMCKPCTDICPKACDGIGTGSLMSAQTVDSSNIDKFINCTKINGNLIFLVTGIHGDPYNAIEAIDPEKLNVFRTVREITGFLNIQSWPPNMTDFSVFSNLVTIGGRVLYSGLSLLILKQQGITSLQFQSLKEISAGNIYITDNSNLCYYHTINWTTLFSTINQRIVIRDNRKAENCTAEGMVCNHLCSSDGCWGPGPDQCLSCRRFSRGRICIESCNLYDGEFREFENGSICVECDPQCEKMEDGLLTCHGPGPDNCTKCSHFKDGPNCVEKCPDGLQGANSFIFKYADPDRECHPCHPNCTQGCNGPTSHDCIYYPWTGHSTLPQHARTPLIAAGVIGGLFILVIVGLTFAVYVRRKSIKKKRALRRFLETELVEPLTPSGTAPNQAQLRILKETELKRVKVLGSGAFGTVYKGIWVPEGETVKIPVAIKILNETTGPKANVEFMDEALIMASMDHPHLVRLLGVCLSPTIQLVTQLMPHGCLLEYVHEHKDNIGSQLLLNWCVQIAKGMMYLEERRLVHRDLAARNVLVKSPNHVKITDFGLARLLEGDEKEYNADGGKMPIKWMALECIHYRKFTHQSDVWSYGVTIWELMTFGGKPYDGIPTREIPDLLEKGERLPQPPICTIDVYMVMVKCWMIDADSRPKFKELAAEFSRMARDPQRYLVIQGDDRMKLPSPNDSKFFQNLLDEEDLEDMMDAEEYLVPQAFNIPPPIYTSRARIDSNRNQFVYRDGGFAAEQGVSVPYRAPTSTIPEAPVAQGATAEIFDDSCCNGTLRKPVAPHVQEDSSTQRYSADPTVFAPERSPRGELDEEGYMTPMRDKPKQEYLNPVEENPFVSRRKNGDLQALDNPEYHNASNGPPKAEDEYVNEPLYLNTFANTLGKAEYLKNNILSMPEKAKKAFDNPDYWNHSLPPRSTLQHPDYLQEYSTKYFYKQNGRIRPIVAENPEYLSEFSLKPGTVLPPPPYRHRNTVV

SEQ ID NO: 14956 - protein, 1047 aa, Homo sapiens
MAHCGQLTNWLCLAWERKESPDFLSIFLRYIDLTPKLHKICSDKTITQKTHCLLPLISSALSSIVLIQGWWQKTAHKYAYKGAKHIEQQNPQSRHRPRPAGALPQISRDSRQRCLLLRFLVRPRGFSFSFAEPAAAFPGATAMAASLSERLFSLELLVDWVRLEARLLPSPAAAVEQEEEEEEKEQGEASSPRGLCPAVAFRLLDFPTLLVYPPDGPGAPAAEPWPGVIRFGRGKSCLFRLQPATLHCRLLRTPLATLLLQLPPGRPTPTPQLLGACDISLATAAHRVVGPAASGCSHRHRGRFPLHNRVGERTGDIALAYRLTDLGSRLLSQLERPLTFTRTGGGAEVSPQTQQERQQLQQPASQPSPKEADKPLGELEIPEAQKDLKEMVKSKAECDNVGSVENGKTNSVVTCSGAGNGRNVSSLNEEVTELDMETNIFCPPPLYYTNLTQEKPPPAQAKITIEPQMNAPEEMDDASPEKKRVNPPAHRSCLKHPSSAAHEHPPMLVNPPHIQNIGATNQTCQTEQNRINTIRQLPLLNALLVELSLLYDQPVTSPAHIHPHLAWLYRTEDKKSPESSAKSTCRSEAKKDKRSVGGCEKSVSLQYKKNQIENYKEDKYSEKSSGALHKRVPKGRLLYGLTNTLRLRLKLTNPDMLVVHEKRELYRKRQSQMLGTKFRIPSSKVKLLSSAEQSQKPQLPEDKYLDSDASFTENSDTSRQISGVFDEPSTSKETKLKYATEKKTVDCSKNRINNVSLEEVVSPANSIIPERLTPTNILGGNVEMKIQSPCVFQQDAVVDRIVDKEIDIRQVKTTDNDILMADISDKRTGKNSCYENISELKYSDDLSSPCYSEDFCTSEDTSRSFKAHDSSSRTENPKHSQYTSKSSDTGVSKKKNSSDRSSILSPPFSAGSPVHSYRKFHISKTQDKSLEEASSISASDLSSTHWTEQKENQIDQNSMHNSEITKRAQDISVKTRSSWKSLEKSQSPQTSQVSSYLPSNVSELNVLDSSTSDHFEEGNDDVGSLNISKQCKDICELVINKLPGYTM

SEQ ID NO: 14957 - protein, 589 aa, Homo sapiens
MASLGPRTPAPSRSRGRRAMCWVSTISFMAAEEMHWPVPMKAIGAQNLLTMPGGVAKAGYLHKKGGTQLQLLKWPLRFVIIHKRCVYYFKSSTSASPQGAFSLSGYNRVMRAAEETTSNNVFPFKIIHISKKHRTWFFSASSEEERKSWMALLRREIGHFHEKKDLPLDTSDSSSDTDSFYGAVERPVDISLSPYPTDNEDYEHDDEDDSYLEPDSPEPGRLEDALMHPPAYPPPPVPTPRKPAFSDMPRAHSFTSKGPGPLLPPPPPKHGLPDVGLAAEDSKRDPLCPRRAEPCPRVPATPRRMSDPPLSTMPTAPGLRKPPCFRESASPSPEPWTPGHGACSTSSAAIMATATSRNCDKLKSFHLSPRGPPTSEPPPVPANKPKFLKIAEEDPPREAAMPGLFVPPVAPRPPALKLPVPEAMARPAVLPRPEKPQLPHLQRSPPDGQSFRSFSFEKPRQPSQADTGGDDSDEDYEKVPLPNSVFVNTTESCEVERLFKATSPRGEPQDGLYCIRNSSTKSGKVLVVWDETSNKVRNYRIFEKDSKFYLEGEVLFVSVGSMVEHYHTHVLPSHQSLLLRHPYGYTGPR

SEQ ID NO: 14958 - protein, 263 aa, Homo sapiens
MADKVLKEKRKLFIRSMGEAPQAVQDNPAMPTSSGSEGNVKLCSLEEAQRIWKQKSAEIYPIMDKSSRTRLALIICNEEFDSIPRRTGAEVDITGMTMLLQNLGYSVDVKKNLTASDMTTELEAFAHRPEHKTSDSTFLVFMSHGIREGICGKKHSEQVPDILQLNAIFNMLNTKNCPSLKDKPKVIIIQACRGDNVSWRHPTMGSVFIGRLIEHMQEYACSCDVEEIFRKVRFSFEQPDGRAQMPTTERVTLTRCFYLFPGH

SEQ ID NO: 14959 - protein, 903 aa, Homo sapiens
MNKAPQSTGPPPAPSPGLPQPAFPPGQTAPVVFSTPQATQMNTPSQPRQGRSTYVVPTQQYPVQPGAPGFYPGASPTEFGTYAGAYYPAQGVQQFPTGVAPTPVLMNQPPQIAPKRERKTIRIRDPNQGGKDITEEIMSGARTASTPTPPQTGGGLEPQANGETPQVAVIVRPDDRSQGAIIADRPGLPGPEHSPSESQPSSPSPTPSPSPVLEPGSEPNLAVLSIPGDTMTTIQMSVEESTPISRETGEPYRLSPEPTPLAEPILEVEVTLSKPVPESEFSSSPLQAPTPLASHTVEIHEPNGMVPSEDLEPEVESSPELAPPPACPSESPVPIAPTAQPEELLNGAPSPPAVDLSPVSEPEEQAKEVTASMAPPTIPSATPATAPSATSPAQEEEMEEEEEEEEGEAGEAGEAESEKGGEELLPPESTPIPANLSQNLEAAAATQVAVSVPKRRRKIKELNKKEAVGDLLDAFKEANPAVPEVENQPPAGSNPGPESEGSGVPPRPEEADETWDSKEDKIHNAENIQPGEQKYEYKSDQWKPLNLEEKKRYDREFLLGFQFIFASMQKPEGLPHISDVVLDKANKTPLRPLDPTRLQGINCGPDFTPSFANLGRTTLSTRGPPRGGPGGELPRGPAGLGPRRSQQGPRKEPRKIIATVLMTEDIKLNKAEKAWKPSSKRTAADKDRGEEDADGSKTQDLFRRVRSILNKLTPQMFQQLMKQVTQLAIDTEERLKGVIDLIFEKAISEPNFSVAYANMCRCLMALKVPTTEKPTVTVNFRKLLLNRCQKEFEKDKDDDEVFEKKQKEMDEAATAEERGRLKEELEEARDIARRRSLGNIKFIGELFKLKMLTEAIMHDCVVKLLKNHDEESLECLCRLLTTIGKDLDFEKAKPRMDQYFNQM

SEQ ID NO: 14960 - protein, 708 aa, Homo sapiens
MSFKDKDERISCLEAYVTLTSKSSRFTDETEILKMSQRHSGQAGTEAGNGADSPPIVNSKYSTFRDFCSTSSFQDSGYNELKSCSFDNIDKEYLGKKEKGPTLLYEHPETSGLGLTHPLESPTQKKKCILPRKEKDKTPELCETPKISGKKCLPRRRLNVSFALLKGDFESQNSSLESSISQVINLEKNIPSSASGFSRANNFSPLVTSTLKTEEVTSCSQKLRLNFSQQKTSTIDDSKDDCSLFEVECISPIQGNNFKDSITHDFSDSSLCINDENACPELLGSSVSGTTCGTDEDIFVTPISNLVANIRFNASQILSPSPEVRGSISTPEDSGFNSLSLEKSEDSLSDQEGSFQELLQKHKGTPKVGDTIRKTRHLGRSRRLSTLREQSSQSETEEEKQIVHPDSEKRAAAASAISEGQLSSDESGDLTFSLKNLSKTPALQLVHELFMKSKRKRLQENSGHEFLEQGDGEKIAVLQCILAGLIGKKMGIEKLDILTELKYRNLKHILAMVLESLTAESLCSVWKVSRNWREIVVQDKNANRRRKFYITQLKTDSEGAVLNVEDAATRLQLLNRSALRSVQAQARIPGSQREQGSTLSPWGEVLTPLASSSVTHLSSKQEEYVKVAKTLFTDEALKPCPRCQSPAKYQPYKKRGLCSRTACGFDFCVLCLCAYHGSEECSRGAAKPRNRKDALPGSAQSKRNLKRL

SEQ ID NO: 14961 - protein, 1778 aa, Homo sapiens
MDDKEPKRWPTLRDRLCSDGFLFPQYPIKPYHLKGIHRAVFYRDLEELKFVLLTRYDINKRDRKERTALHLACATGQPEMVHLLVSRRCELNLCDREDRTPLIKAVQLRQEACATLLLQNGADPNITDVFGRTALHYAVYNEDTSMIEKLLSYGANIEECSEDEYPPLFLAVSQRKVKMVEFLLKKKANINAVDYLGRSALIHAVTLGEKDIVILLLQHNIDVFSRDVYGKLAEDYASEAKNRVIFELIYEYERKKHEELSINSNPVSSQKQPALKATSGKEDSISNIATEIKDGQKSGTVSSQKQPALKGTSDKNDSVSNTATEIKDEQKSGTVSSQKQPALKDTSDKNDSVSNTATEIKDEQKSGTVLPAVEQCLNRSLYRPDAVAQPVTEDEFALESEIISKLYIPKRKIISPRSIEDVLPPVEEAVDRCLYLLDRFAQAVTKDKFALESENISEPYFTNRRTISQQSAEKLDAACGIDKTENGTLFEDQNVDKEGKALPATGQKANVSPEQPPLFTHTVKDSDHISTRFLGSMDSLTSSEESSERPPLSTLTLKEADPSSKAAMRRKDSPPPGKVSSQKQPAEKATSDDKDSVSNIATEIKEGPISGTVSSQKQPAEKATSDEKDSVSNIATEIKEGQQSGTVSPQKQSAWKVIFKKKVSLLNIATRITGGGKSGTVSSQKQPPSKATSDKTDSALNIATEIKDGLQCGTVSSQKQPALKATTDEEDSVSNIATEIKDGEKSGTVSSQKQPALKATTDEEDSVSIIATEIKDGEKSGTVSSRKKPALKATSDEKDSFSNITREKKDGEISRTVTSEKPAGLKATSDEEDSVLNIARGKEDGEKTRRVSSRKKPALKATSDEKDSFSNITREKKDGETSRTVSSQKPPALKATSDEEDSVLNIAREKKDGEKSRTVSSEKPSGLKATSDEKDSVLNIARGKKHGEKTRRVSSHKQPALKATSDKENSVPNMATETKDEQISGTVSSQKQPALKATSDKKDSVSNIPTEIKDGQQSGTVSSQKQLAWKATSVKKDSVSNIATEIKDGQIRGTVSSQRQPALKATGDEKDSVSNIAREIKDGEKSGTVSPQKQSAQKVIFKKKVSLLNIATRITGGWKSGTEYPENLPTLKATIENKNSVLNTATKMKDVQTSTPEQDLEMASEGEQKRLEEYENNQPQVKNQIHSRDDLDDIIQSSQTVSEDGDSLCCNCKNVILLIDQHEMKCKDCVHLLKIKKTFCLCKRLTELKDNHCEQLRVKIRKLKNKASVLQKRLSEKEEIKSQLKHETLELEKELCSLRFAIQQEKKKRRNVEELHQKVREKLRITEEQYRIEADVTKPIKPALKSAEVELKTGGNNSNQVSETDEKEDLLHENRLMQDEIARLRLEKDTIKNQNLEKKYLKDFEIVKRKHEDLQKALKRNEETLAETIACYSGQLAALTDENTTLRSKLEKQRESGQRLETEMQSYRCRLNAALCDHDQSHSSKRDQELAFQGTVDKCCHLQENLNSHVLILSLQLSKAESKFRVLETELHYTGEALKEKALVFEHVQSELKQKQSQMKDIEKMYKSGYNTMEKCIEKQERFCQLKKQNMLLQQQLDDARNKADNQEKAILNIQARCDARVENLQAECRKHRLLLEEDNKMLVNELNHSKEKKCQYEKEKAEREVAVRQLQQKQDDVLNKRSATKALLDASSRHCIYLENGMQDSRKKLDQMRSQFQEIQDQLTATIRCTKEMEGDAQKLEVENVMMRKIIKKQDEQIERFEKILQHSSLMLQVFES

SEQ ID NO: 14962 - protein, 721 aa, Homo sapiens
MAAFGLLSYEQRPLKRPRLGPPDVYPQDPKQKEDELTAVNVKQGFNNQPAFTGDEHGSARNIVINPSKIGAYFSSILAEKLKLNTFQDTGKKKPQVNAKDNYWLVTARSQSAIHSWFSDLAGNKPLSILAKKVPILSKKEDVFAYLAKYSVPMVRATWLIKMTCAYYSAISEAKIKKRQAPDPNLEWTQISTRYLREQLAKISDFYHMASSTGDGPVPVPPEVEQAMKQWEYNEKLAFHMFQEGMLEKHEYLTWILDVLEKIRPMDDDLLKLLLPLMLQYSDEFVQSAYLSRRLAYFCARRLSLLLSDSPNLLAAHSPHMMIGPNNSSIGAPSPGPPGPGMSPVQLAFSDFLSCAQHGPLVYGLSCMLQTVTLCCPSALVWNYSTNENKSANPGSPLDLLQVAPSSLPMPGGNTAFNQQVRARIYEVEQQIKQRGRAVEVRWSFDKCQESTAGVTISRVLHTLEVLDRHCFDRTDSSNSMETLYHKIFWANQNKDNQEVAPNDEAVVTLLCEWAVSCKRSGKHRAMAVAKLLEKRQAEIEAERCGESEVLDEKESISSSSLAGSSLPVFQNVLLRFLDTQAPSLSDPNSECEKVEFVNLVLLFCEFIRHDVFSHDAYMCTLISRGDLSVTASTRPRSPVGENADEHYSKDHDVKMEIFSPMPGESCENANTSLGRRMSVNCEKLVKREKPRELIFPSNYDLLRHLQYATHFPIPLVSHCFS

SEQ ID NO: 14963 - protein, 884 aa, Homo sapiens
MTRHADRIISLFTFAVGVNICLGFTAHRIKRAEGWEEGPPTVLSDSPWTNISGSCKGRCFELQEAGPPDCRCDNLCKSYTSCCHDFDELCLKTARGWECTKDRCGEVRNEENACHCSEDCLARGDCCTNYQVVCKGESHWVDDDCEEIKAAECPAGFVRPPLIIFSVDGFRASYMKKGSKVMPNIEKLRSCGTHSPYMRPVYPTKTFPNLYTLATGLYPESHGIVGNSMYDPVFDATFHLRGREKFNHRWWGGQPLWITATKQGVKAGTFFWSVVIPHERRILTILQWLTLPDHERPSVYAFYSEQPDFSGHKYGPFGPEMTNPLREIDKIVGQLMDGLKQLKLHRCVNVIFVGDHGMEDVTCDRTEFLSNYLTNVDDITLVPGTLGRIRSKFSNNAKYDPKAIIANLTCKKPDQHFKPYLKQHLPKRLHYANNRRIEDIHLLVERRWHVARKPLDVYKKPSGKCFFQGDHGFDNKVNSMQTVFVGYGSTFKYKTKVPPFENIELYNVMCDLLGLKPAPNNGTHGSLNHLLRTNTFRPTMPEEVTRPNYPGIMYLQSDFDLGCTCDDKVEPKNKLDELNKRLHTKGSTEAETRKFRGSRNENKENINGNFEPRKERHLLYGRPAVLYRTRYDILYHTDFESGYSEIFLMPLWTSYTVSKQAEVSSVPDHLTSCVRPDVRVSPSFSQNCLAYKNDKQMSYGFLFPPYLSSSPEAKYDAFLVTNMVPMYPAFKRVWNYFQRVLVKKYASERNGVNVISGPIFDYDYDGLHDTEDKIKQYVEGSSIPVPTHYYSIITSCLDFTQPADKCDGPLSVSSFILPHRPDNEESCNSSEDESKWVEELMKMHTARVRDIEHLTSLDFFRKTSRSYPEILTLKTYLHTYESEI

SEQ ID NO: 14964 - protein, 889 aa, Homo sapiens
MAADVVGDVYVLVEHPFEYTGKDGRRVAIRPNERYRLLRRSTEHWWHVRREPGGRPFYLPAQYVRELPALGNPAAAAPPGPHPSPAAPEPLAYDYRFVSAAATAGPDGAPEESGGRASSLCGPAQRGAATQRSSLAPGLPACLYLRPAAPVRPAQSLNDLACAAVSPPAGLLGSSGSFKACSVAGSWVCPRPLARSDSENVYEVIQDLHVPPPEESAEQVDDPPEPVYANIERQPRATSPGAAAAPLPSPVWETHTDAGTGRPYYYNPDTGVTTWESPFEAAEGAASPATSPASVDSHVSLETEWGQYWDEESRRVFFYNPLTGETAWEDEAENEPEEELEMQPGLSPGSPGDPRPPTPETDYPESLTSYPEEDYSPVGSFGEPGPTSPLTTPPGWSCHVSQDKQMLYTNHFTQEQWVRLEDPHGKPYFYNPEDSSVRWELPQVPVPAPRSIHKSSQDGDTPAQASPPEEKVPAELDEVGSWEEVSPATAAVRTKTLDKAGVLHRTKTADKGKRLRKKHWSASWTVLEGGVLTFFKDSKTSAAGGLRQPSKFSTPEYTVELRGATLSWAPKDKSSRKNVLELRSRDGSEYLIQHDSEAIISTWHKAIAQGIQELSAELPPEESESSRVDFGSSERLGSWQEKEEDARPNAAAPALGPVGLESDLSKVRHKLRKFLQRRPTLQSLREKGYIKDQVFGCALAALCERERSRVPRFVQQCIRAVEARGLDIDGLYRISGNLATIQKLRYKVDHDERLDLDDGRWEDVHVITGALKLFFRELPEPLFPFSHFRQFIAAIKLQDQARRSRCVRDLVRSLPAPNHDTLRMLFQHLCRVIEHGEQNRMSVQSVAIVFGPTLLRPEVEETSMPMTMVFQNQVVELILQQCADIFPPH

SEQ ID NO: 14965 - protein, 334 aa, Homo sapiens
MAYHSFLVEPISCHAWNKDRTQIAICPNNHEVHIYEKSGAKWTKVHELKEHNGQVTGIDWAPESNRIVTCGTDRNAYVWTLKGRTWKPTLVILRINRAARCVRWAPNENKFAVGSGSRVISICYFEQENDWWVCKHIKKPIRSTVLSLDWHPNNVLLAAGSCDFKCRIFSAYIKEVEERPAPTPWGSKMPFGELMFESSSSCGWVHGVCFSASGSRVAWVSHDSTVCLADADKKMAVATLASETLPLLALTFITDNSLVAAGHDCFPVLFTYDAAAGMLSFGGRLDVPKQSSQRGLTARERFQNLDKKASSEGGTAAGAGLDSLHKNSVSQISV

SEQ ID NO: 14966 - protein, 182 aa, Homo sapiens
AKSGVAGGILLVVPNVMGMMCWSPPLDKMGNSVKGIHFCHDLVSLCNFHNYDNLRHFAKKLDPRREGGDQRVKSVINLLFAAYTGDVSALRRFALSAMDMEQRDYDSRTALHVAAAEGGITLPWMKHCTLDTMMYLKFSKNTKSSTHLKEILTTGRKIKPSIRILMDCCNGLKSQDLNHLPI

SEQ ID NO: 14967 - protein, 1364 aa, Homo sapiens
MAQALLVPPGPESFRLFTRESLAAIEKRAAEEKAKKPKKEQDNDDENKPKPNSDLEAGKNLPFIYGDIPPEMVSEPLEDLDPYYINKKTFIVMNKGKAIFRFSATSALYILTPLNPVRKIAIKILVHSLFSMLIMCTILTNCVFMTLSNPPDWTKNVEYTFTGIYTFESLIKILARGFCLEDFTFLRDPWNWLDFSVIVMAYVTEFVDLGNVSALRTFRVLRALKTISVIPGLKTIVGALIQSVKKLSDVMILTVFCLSVFALIGLQLFMGNLRNKCLQWPPSDSAFETNTTSYFNGTMDSNGTFVNVTMSTFNWKDYIGDDSHFYVLDGQKDPLLCGNGSDAGQCPEGYICVKAGRNPNYGYTSFDTFSWAFLSLFRLMTQDYWENLYQLTLRAAGKTYMIFFVLVIFLGSFYLVNLILAVVAMAYEEQNQATLEEAEQKEAEFQQMLEQLKKQQEEAQAVAAASAASRDFSGIGGLGELLESSSEASKLSSKSAKEWRNRRKKRRQREHLEGNNKGERDSFPKSESEDSVKRSSFLFSMDGNRLTSDKKFCSPHQSLLSIRGSLFSPRRNSKTSIFSFRGRAKDVGSENDFADDEHSTFEDSESRRDSLFVPHRHGERRNSNGTTTETEVRKRRLSSYQISMEMLEDSSGRQRAVSIASILTNTMEELEESRQKCPPCWYRFANVFLIWDCCDAWLKVKHLVNLIVMDPFVDLAITICIVLNTLFMAMEHYPMTEQFSSVLTVGNLVFTGIFTAEMVLKIIAMDPYYYFQEGWNIFDGIIVSLSLMELGLSNVEGLSVLRSFRLLRVFKLAKSWPTLNMLIKIIGNSVGALGNLTLVLAIIVFIFAVVGMQLFGKSYKECVCKINDDCTLPRWHMNDFFHSFLIVFRVLCGEWIETMWDCMEVAGQTMCLIVFMLVMVIGNLVVLNLFLALLLSSFSSDNLAATDDDNEMNNLQIAVGRMQKGIDYVKNKMRECFQKAFFRKPKVIEIHEGNKIDSCMSNNTGIEISKELNYLRDGNGTTSGVGTGSSVEKYVIDENDYMSFINNPSLTVTVPIAVGESDFENLNTEEFSSESELEESKEKLNATSSSEGSTVDVVLPREGEQAETEPEEDLKPEACFTEGCIKKFPFCQVSTEEGKGKIWWNLRKTCYSIVEHNWFETFIVFMILLSSGALAFEDIYIEQRKTIKTMLEYADKVFTYIFILEMLLKWVAYGFQTYFTNAWCWLDFLIVDVSLVSLVANALGYSELGAIKSLRTLRALRPLRALSRFEGMRVVVNALVGAIPSIMNVLLVCLIFWLIFSIMGVNLFAGKFYHCVNMTTGNMFDISDVNNLSDCQALGKQARWKNVKVNFDNVGAGYLALLQV

SEQ ID NO: 14968 - protein, 470 aa, Homo sapiens
MLRAAARFGPRLGRRLLSAAATQAVPAPNQQPEVFCNQIFINNEWHDAVSRKTFPTVNPSTGEVICQVAEGDKALETLDNGKPYVISYLVDLDMVLKCLRYYAGWADKYHGKTIPIDGDFFSYTRHEPVGVCGQIIPWNFPLLMQAWKLGPALATGNVVVMKVAEQTPLTALYVANLIKEAGFPPGVVNIVPGFGPTAGAAIASHEDVDKVAFTGSTEIGRVIQVAAGSSNLKRVTLELGGKSPNIIMSDADMDWAVEQAHFALFFNQGQCCCAGSRTFVQEDIYDEFVERSVARAKSRVVGNPFDSKTEQGPQVDETQFKKILGYINTGKQEGAKLLCGGGIAADRGYFIQPTVFGDVQDGMTIAKEEIFGPVMQILKFKTIEEVVGRANNSTYGLAAAVFTKDLDKANYLSQALQAGTVWVNCYDVFGAQSPFGGYKMSGSGRELGEYGLQAYTEVKTVTVKVPQKNS

SEQ ID NO: 14969 - protein, 451 aa, Homo sapiens
MAATEISVLSEQFTKIKELELMPEKGLKEEEKDGVCREKDHRSPSELEAERTSGAFQDSVLEEEVELVLAPSEESEKYILTLQTVHFTSEAVELQDMSLLSIQQQEGVQVVVQQPGPGLLWLEEGPRQSLQQCVAISIQQELYSPQEMEVLQFHALEENVMVASEDSKLAVSLAETTGLIKLEEEQEKNQLLAERTKEQLFFVETMSGDERSDEIVLTVSNSNVEEQEDQPTAGQADAEKAKSTKNQRKTKGAKGTFHCDVCMFTSSRMSSFNRHMKTHTSEKPHLCHLCLKTFRTVTLLRNHVNTHTGTRPYKCNDCNMAFVTSGELVRHRRYKHTHEKPFKCSMCKYASVEASKLKRHVRSHTGERPFQCCQCSYASRDTYKLKRHMRTHSGEKPYECHICHTRFTQSGTMKIHILQKHGENVPKYQCPHCATIIARKSDLRFLGLPFP

SEQ ID NO: 14970 - protein, 601 aa, Homo sapiens
MVCGCSALLPLPNPRPTMPATPNFLANPSSSSRWIPLQPMPVAWAFVQKTSALLWLLLLGTSLSPAWGQAKIPLETVKLWADTFGGDLYNTVTKYSGSLLLQKKYKDVESSLKIEEVDGLELVRKFSEDMENMLRRKVEAVQNLVEAAEEADLNHEFNESLVFDYYNSVLINERDEKGNFVELGAEFLLESNAHFSNLPVNTSISSVQLPTNVYNKDPDILNGVYMSEALNAVFVENFQRDPTLTWQYFGSATGFFRIYPGIKWTPDENGVITFDCRNRGWYIQAATSPKDIVILVDVSGSMKGLRMTIAKHTITTILDTLGENDFINIIAYNDYVHYIEPCFKGILVQADRDNREHFKLLVEELMVKGVGVVDQALREAFQILKQFQEAKQGSLCNQAIMLISDGAVEDYEPVFEKYNWPDCKVRVFTYLIGREVSFADRMKWIACNNKGYYTQISTLADTQENVMEYLHVLSRPMVINHDHDIIWTEAYMDSKLLSSQAQSLTLLTTVAMPVFSKKNETRSHGILLGVVGSDVALRELMKLAPRYKMPSTNSRPNAPPPWTLAAWSARIRLSEHQQWLHPLPSRPPAPVQRGEETKTQT

SEQ ID NO: 14971 - protein, 1189 aa, Homo sapiens
MDLPRGLVVAWALSLWPGFTDTFNMDTRKPRVIPGSRTAFFGYTVQQHDISGNKWLVVGAPLETNGYQKTGDVYKCPVIHGNCTKLNLGRVTLSNVSERKDNMRLGLSLATNPKDNSFLACSPLWSHECGSSYYTTGMCSRVNSNFRFSKTVAPALQRCQTYMDIVIVLDGSNSIYPWVEVQHFLINILKKFYIGPGQIQVGVVQYGEDVVHEFHLNDYRSVKDVVEAASHIEQRGGTETRTAFGIEFARSEAFQKGGRKGAKKVMIVITDGESHDSPDLEKVIQQSERDNVTRYAVAVLGYYNRRGINPETFLNEIKYIASDPDDKHFFNVTDEAALKDIVDALGDRIFSLEGTNKNETSFGLEMSQTGFSSHVVEDGVLLGAVGAYDWNGAVLKETSAGKVIPLRESYLKEFPEELKNHGAYLGYTVTSVVSSRQGRVYVAGAPRFNHTGKVILFTMHNNRSLTIHQAMRGQQIGSYFGSEITSVDIDGDGVTDVLLVGAPMYFNEGRERGKVYVYELRQNLFVYNGTLKDSHSYQNARFGSSIASVRDLNQDSYNDVVVGAPLEDNHAGAIYIFHGFRGSILKTPKQRITASELATGLQYFGCSIHGQLDLNEDGLIDLAVGALGNAVILWSRPVVQINASLHFEPSKINIFHRDCKRSGRDATCLAAFLCFTPIFLAPHFQTTTVGIRYNATMDERRYTPRAHLDEGGDRFTNRAVLLSSGQELCERINFHVLDTADYVKPVTFSVEYSLEDPDHGPMLDDGWPTTLRVSVPFWNGCNEDEHCVPDLVLDARSDLPTAMEYCQRVLRKPAQDCSAYTLSFDTTVFIIESTRQRVAVEATLENRGENAYSTVLNISQSANLQFASLIQKEDSDGSIECVNEERRLQKQVCNVSYPFFRAKAKVAFRLDFEFSKSIFLHHLEIELAAGSDSNERDSTKEDNVAPLRFHLKYEADVLFTRSSSLSHYEVKPNSSLERYDGIGPPFSCIFRIQNLGLFPIHGMMMKITIPIATRSGNRLLKLRDFLTDEVANTSCNIWGNSTEYRPTPVEEDLRRAPQLNHSNSDVVSINCNIRLVPNQEINFHLLGNLWLRSLKALKYKSMKIMVNAALQRQFHSPFIFREEDPSRQIVFEISKQEDWQVPIWIIVGSTLGGLLLLALLVLALWKLGFFRSARRRREPGLDPTPKVLE

SEQ ID NO: 14972 - protein, 632 aa, Homo sapiens
MQREEGFNTKMADGPDEYDTEAGCVPLLHPEEIKPQSHYNHGYGEPLGRKTHIDDYSTWDIVKATQYGIYERCRELVEAGYDVRQPDKENVTLLHWAAINNRIDLVKYYISKGAIVDQLGGDLNSTPLHWATRQGHLSMVVQLMKYGADPSLIDGEGCSCIHLAAQFGHTSIVAYLIAKGQDVDMMDQNGMTPLMWAAYRTHSVDPTRLLLTFNVSVNLGDKYHKNTALHWAVLAGNTTVISLLLEAGANVDAQNIKGESALDLAKQRKNVWMINHLQEARQAKGYDNPSFLRKLKADKEFRQKVMLGTPFLVIWLVGFIADLNIDSWLIKGLMYGGVWATVQFLSKSFFDHSMHSALPLGIYLATKFWMYVTWFFWFWNDLNFLFIHLPFLANSVALFYNFGKSWKSDPGIIKATEEQKKKTIVELAETGSLDLSIFCSTCLIRKPVRSKHCGVCNRCIAKFDHHCPWVGNCVGAGNHRYFMGYLFFLLFMICWMIYGCISYWGLHCETTYTKDGFWTYITQIATCSPWMFWMFLNSVFHFMWVAVLLMCQMYQISCLGITTNERMNARRYKHFKVTTTSIESPFNHGCVRNIIDFFEFRCCGLFRPVIVDWTRQYTIEYDQISGSGYQLV

SEQ ID NO: 14973 - protein, 807 aa, Homo sapiens
MSENSSDSDSSCGWTVISHEGSDIEMLNSVTPTDSCEPAPECSSLEQEELQALQIEQGESSQNGTVLMEETAYPALEETSSTIEAEEQKIPEDSIYIGTASDDSDIVTLEPPKLEEIGNQEVVIVEEAQSSEDFNMGSSSSSQYTFCQPETVFSSQPSDDESSSDETSNQPSPAFRRRRARKKTVSASESEDRLVAEQETEPSKELSKRQFSSGLNKCVILALVIAISMGFGHFYGTIQIQKRQQLVRKIHEDELNDMKDYLSQCQQEQESFIDYKSLKENLARCWTLTEAEKMSFETQKTNLATENQYLRVSLEKEEKALSSLQEELNKLREQIRILEDKGTSTELVKENQKLKQHLEEEKQKKHSFLSQRETLLTEAKMLKRELERERLVTTALRGELQQLSGSQLHGKSDSPNVYTEKKEIAILRERLTELERKLTFEQQRSDLWERLYVEAKDQNGKQGTDGKKKGGRGSHRAKNKSKETFLGSVKETFDAMKNSTKEFVRHHKEKIKQAKEAVKENLKKFSDSVKSTFRHFKDTTKNIFDEKGNKRFGATKEAAEKPRTVFSDYLHPQYKAPTENHHNRGPTMQNDGRKEKPVHFKEFRKNTNSKKCSPGHDCRENSHSFRKACSGVFDCAQQESMSLFNTVVNPIRMDEFRQIIQRYMLKELDTFCHWNELDQFINKFFLNGVFIHDQKLFTDFVNDVKDYLRNMKEYEVDNDGVFEKLDEYIYRHFFGHTFSPPYGPSRPDKKQRMVNIENSRHRKQEQKHLQPQPYKREGKWHKYGRTNGRQMANLEIELGQLPFDPQY

SEQ ID NO: 14974 - protein, 822 aa, Homo sapiens
NRLQDEDASSTQQRRQIFRVNKDASGRSTNSHQSSTENELKYSEPRPWSSTDSDSSLRNLKPAVTKASSFSGISVLTRGDSSGSSKSIGRLSKTGSESSGSVGSSTGSLSHIQQPLPGTALSQSSHGAPVVYPTVSTHSSLSFDGGLNGQVASPSTSFFLLPLEAAGIPPGSILINPQTGQPFINPDGSPVVYNPPMTQQPVRSQVPGPPQPPLPAPPQQPAANHIFSQPVHPLQSSSQPVQYSTAPYPSPFLPVSPTQQYSVQDNLGSQFSHMSLARQPSADGSDPHAAMFQSTVVLQSPQQSGYIMTAAPPPHPPPPPPPPPPPPPLPPGQPVPTAGYPASGHPVSQPVLQQQGYIQQPSPQMPACYCAPGHYHSSQPQYRPVPSVHYNSHLNQPLPQPAQQTGYQVIPNQQQNYQGIVGVQQPQSQSLVSGQPNSIGNQIQGVVIPYTSVPTYQVSLPQGSQGIPHQTYQQPVMFPNQSNQGSMPTTGMPVYYSVIPPGQQNNLSSSVGYLQHPGSEQVQFPRTTSPCSSQQLQGHQCTAGPPPPPGGGMVMMQLSVPNNPQSCAHSPPQWKQNKYYCDHQRGQKCVEFSSVDNIVQHSPQLSSPIISPAQSPAPAQLSTLKTVRPSGPPLSIMPQFSRPFVPGQGDSRYPLLGQPLQYNPPAVLHGHIPNQQGQPGSRHGNRGRRQAKKAASTDLGAGETVVGKVLEITELPDGITRMEAEKLFGELFKIGAKIRWLRDPQSQPRRHPLCCGSGDNTANPERSKPSDLASTYTVLATFPSISAAQNALKKQINSVNKFKLRTSKKHYDFHILERASSQ

SEQ ID NO: 14975 - protein, 179 aa, Homo sapiens
INFPKKACPCASSAQVLQELLSRIEMLEREVSVLRDQCNANCCQESAATVAPPEDLRVAGISDRSIELEWDGPMAVTEYVISYQPTALGGLQLQQRVPGDWSGVTITELEPGLTYNISVYAVISNILSLPITAKVATHLSTPQGLQFKTITETTVEVQWEPFSFSFDGWEISFIPKNNE

SEQ ID NO: 14976 - protein, 791 aa, Homo sapiens
KKGYTPLHAAASNGQINVVKHLLNLGVEIDEINVYGNTALHIACYNGQDAVVNELIDYGANVNQPNNNGFTPLHFAAASTHGALCLELLVNNGADVNIQSKDGKSPLHMTAVHGRFTRSQTLIQNGGEIDCVDKDGNTPLHVAARYGHELLINTLITSGADTAKCGIHSMFPLHLAALNAHSDCCRKLLSSGQKYSIVSLFSNEHVLSAGFEIDTPDKFGRTCLHAAAAGGNVECIKLLQSSGADFHKKDKCGRTPLHYAAANCHFHCIETLVTTGANVNETDDWGRTALHYAAASDMDRNKTILGNAHDNSEELERARELKEKEATLCLEFLLQNDANPSIRDKEGYNSIHYAAAYGHRQCLELLLERTNSGFEESDSGATKSPLHLAAYNGHHQALEVLLQSLVDLDIRDEKGRTALDLAAFKGHTECVEALINQGASIFVKDNVTKRTPLHASVINGHTLCLRLLLEIADNPEAVDVKDAKGQTPLMLAVAYGHIDAVSLLLEKEANVDTVDILGCTALHRGIMTGHEECVQMLLEQEVSILCKDSRGRTPLHYAAARGHATWLSELLQMALSEEDCCFKDNQGYTPLHWACYNGNENCIEVLLEQKCFRKFIGNPFTPLHCAIINDHGNCASLLLGAIDSSIVSCRDDKGRTPLHAAAFADHVECLQLLLRHSAPVNAVDNSGKTALMMAAENGQAGAVDILVNSAQADLTVKDKDLNTPLHLACSKGHEKCALLILDKIQDESLINEKNNALQTPLHVAARNGLKVVVEELLAKGACVLAVDENGC

SEQ ID NO: 14977 - protein, 507 aa, Homo sapiens
MSGGEQKPERYYVGVDVGTGSVRAALVDQSGVLLAFADQPIKNWEPQFNHHEQSSEDIWAACCVVTKKVVQGIDLNQIRGLGFDATCSLVVLDKQFHPLPVNQEGDSHRNVIMWLDHRAVSQVNRINETKHSVLQYVGGVMSVEMQAPKLLWLKENLREICWDKAGHFFDLPDFLSWKATGVTARSLCSLVCKWTYSAEKGWDDSFWKMIGLEDFVADNYSKIGNQVLPPGASLGNGLTPEAARDLGLLPGIAVAASLIDAHAGGLGVIGADVRGHGLICEGQPVTSRLAVICGTSSCHMGISKDPIFVPGVWGPYFSAMVPGFWLNEGGQSVTGKLIDHMVQGHAAFPELQVKATARCQSIYAYLNSHLDLIKKAQPVGFLTVDLHVWPDFHGNRSPLADLTLKGMVTGLKLSQDLDDLAILYLATVQAIALGTRFIIEAMEAAGHSISTLFLCGGLSKNPLFVQMHADITGMPVVLSQEVESVLVGAAVLGACASGDFASVQWGK

SEQ ID NO: 14978 - protein, 905 aa, Homo sapiens
MAGRVPSLLVLLVFPSSCLAFRSPLSVFKRFKETTRPFSNECLGTTRPVVPIDSSDFALDIRMPGVTPKQSDTYFCMSMRIPVDEEAFVIDFKPRASMDTVHHMLLFGCNMPSSTGSYWFCDEGTCTDKANILYAWARNAPPTRLPKGVGFRVGGETGSKYFVLQVHYGDISAFRDNNKDCSGVSLHLTRLPQPLIAGMYLMMSVDTVIPAGEKVVNSDISCHYKNYPMHVFAYRVHTHHLGKVVSGYRVRNGQWTLIGRQSPQLPQAFYPVGHPVDVSFGDLLAARCVFTGEGRTEATHIGGTSSDEMCNLYIMYYMEAKHAVSFMTCTQNVAPDMFRTIPPEANIPIPVKSDMVMMHEHHKETEYKDKIPLLQQPKREEEEVLDQGDFYSLLSKLLGEREDVVHVHKYNPTEKAESESDLVAEIANVVQKKDLGRSDAREGAEHERGNAILVRDRIHKFHRLVSTLRPPESRVFSLQQPPPGEGTWEPEHTGDFHMEEALDWPGVYLLPGQVSGVALDPKNNLVIFHRGDHVWDGNSFDSKFVYQQIGLGPIEEDTILVIDPNNAAVLQSSGKNLFYLPHGLSIDKDGNYWVTDVALHQVFKLDPNNKEGPVLILGRSMQPGSDQNHFCQPTDVAVDPGTGAIYVSDGYCNSRIVQFSPSGKFITQWGEESSGSSPLPGQFTVPHSLALVPLLGQLCVADRENGRIQCFKTDTKEFVREIKHSSFGRNVFAISYIPGLLFAVNGKPHFGDQEPVQGFVMNFSNGEIIDIFKPVRKHFDMPHDIVASEDGTVYIGDAHTNTVWKFTLTEKLEHRSVKKAGIEVQEIKDSEHKLETSSGRVLGRFRGKGSGGLNLGNFFASRKGYSRKGFDRLSTEGSDQEKEDDGSESEEEYSAPLPALAPSSS

SEQ ID NO: 14979 - protein, 90 aa, Homo sapiens
MSNPSAPPPYEDRNPLYPGPPPPGGYGQPSVLPGGYPAYPGYPQPGYGHPAGYPQPMPPTHPMPMNYGPGHGYDGEERAVSDSFGPGEWD

SEQ ID NO: 14980 - protein, 1620 aa, Homo sapiens
MNPREEKVKIITEEFIENDEDADMGRQNKNSKVRRQPRKKQPPTAVPKEMVSEKSHLGNPQEPVQEEPKTRLLSMTVRRGPRSLPPIPSTSRTGFAEFSMRGRMREKLQAARSKAESALLQEIPTPRPRRLRSPSKKELETEFGTEPGKEVERTQQEVDSQSYSRVKFHDSARKIKPKPQVPPGFPSAEEAYNFFTFNFDPEPEGSEEKPKARHRAGTNQEEEEGEEEEPPAQGGGKEMDEEELLNGDDAEDFLLGLDHVADDFVAVRPADYESIHDRLQMEREMLFIPSRQTVPTYKKLPENVQPRFLEDEGLYTGVRPEVARTNQNIMENRLLMQDPERRWFGDDGRILALPNPIKPFPSRPPVLTQEQSIKAELETLYKKAVKYVHSSQHVIRSGDPPGNFQLDIDISGLIFTHHPCFSREHVLAAKLAQLYDQYLARHQRNKAKFLTDKLQALRNAVQTGLDPEKPHQSLDTIQKTINEYKSEIRQTRKFRDAEQEKDRTLLKTIIKVWKEMKSLREFQRFTNTPLKLVLRKEKADQKADEEAYEAEIQAEISELLEEHTEEYAQKMEEYRTSLQQWKAWRKVQRAKKKKRKQAAEEHPGDEIAEPYPEEDLVKPSPPEPTDRAVIEQEVRERAAQSRRRPWEPTLVPELSLAGSVTPNDQCPRAEVSRREDVKKRSVYLKVLFNNKEVSRTVSRPLGADFRVHFGQIFNLQIVNWPESLTLQVYETVGHSSPTLLAEVFLPIPETTVVTGRAPTEEVEFSSNQHVTLDHEGVGSGVPFSFEADGSNQLTLMTSGKVSHSVAWAIGENGIPLIPPLSQQNIGFRSALKKADAISSIGTSGLTDMKKLAKWAAESKLDPNDPNNAPLMQLISVATSGESYVPDFFRLEQLQQEFNFVSDQELNRSKRFRLLHLRSQEVPEFRNYKQVPVYDREIMEKVFQDYEKRLRDRNVIETKEHIDTHRAIVAKYLQQVRESVINRFLIAKQYFLLADMIVEEEVPNISILGLSLFKLAEQKRPLRPRRKGRKKVTAQNLSDGDIKLLVNIVRAYDIPVRKPAVSKFQQPSRSSRMFSEKHAASPSTYSPTHNADYPLGQVLVRPFVEVSFQRTVCHTTTAEGPNPSWNEELELPFRAPNGDYSTASLQSVKDVVFINIFDEVLHDVLEDDRERGSGIHTRIERHWLGCVKMPFSTIYFQARIDGTFKIDIPPVLLGYSKERNMILERGFDSVRSLSEGSYITLFITIEPQLVPGESIREKFESQEDEKLLQATEKFQAECALKFPNRQCLTTVIDISGKTVFITRYLKPLNPPQELLNVYPNNLQATAELVARYVSLIPFLPDTVSFGGICDLWSTSDQFLDLLAGDEEEHAVLLCNYFLSLGKKAWLLMGNAIPEGPTAYVLTWEQGRYLIWNPCSGHFYGQFDTFCPLKNVGCLIGPDNIWFNIQRYESPLRINFDVTRPKLWKSFFSRSLPYPGLSSVQPEELIYQRSDKAAAAELQDRIEKILKEKIMDWRPRHLTRWNRYCTSTLRHFLPLLEKSQGEDVEDDHRAELLKQLGDYRFSGFPLHMPYSEVKPLIDAVYSTGVHNIDVPNVEFALAVYIHPYPKNVLSVWIYVASLIRNR

SEQ ID NO: 14981 - protein, 140 aa, Homo sapiens
QLEEERAFLRSKTQSLDEEQKQQILELEKKVNEAKRTQQEYYERELKNLQSRLEEEVTQLNEAHSKTLEELAWKHHMAIEAVHSNAIRDKKKLQMDLEEQHNKDKLNLEEDKNQLQQELENLKEVLEDKLNTANQEARIL

SEQ ID NO: 14982 - protein, 526 aa, Homo sapiens
MRPPQCLLHTPSLASPLLLLLLWLLGGGVGAEGREDAELLVTVRGGRLRGIRLKTPGGPVSAFLGIPFAEPPMGPRRFLPPEPKQPWSGVVDATTFQSVCYQYVDTLYPGFEGTEMWNPNRELSEDCLYLNVWTPYPRPTSPTPVLVWIYGGGFYSGASSLDVYDGRFLVQAERTVLVSMNYRVGAFGFLALPGSREAPGNVGLLDQRLALQWVQENVAAFGGDPTSVTLFGESAGAASVGMHLLSPPSRGLFHRAVLQSGAPNGPWATVGMGEARRRATQLAHLVGCPPGGTGGNDTELVACLRTRPAQVLVNHEWHVLPQESVFRFSFVPVVDGDFLSDTPEALINAGDFHGLQLAGRLAAQGARVYAYVFEHRASTLSWPLWMGVPHGYEIEFIFGIPLDPSRNYTAEEKIFAQRLMRYWANFARTGDPNEPRDPKAPQWPPYTAGAQQYVSLDLRPLEVRRGLRAQACAFWNRFLPKLLSATDTLDEAERQWKAEFHRWSSYMVHWKNQFDHYSKQDRCSDL

SEQ ID NO: 14983 - protein, 300 aa, Homo sapiens
PIILAVNKCDKAEADPEKVKKELLAYDVVCEDYGGDVQAVPVSALTGDNLMALAEATVALAEMLELKADPNGPVEGTVIESFTDKGRGLVTTAIIQRGTLRKGSVLVAGKCWAKPRAREVVDWRKYEQEQEKGQEDLKIIEEKRKEHKEAHQKAREKYGHLLWKKRSILRFLERKEQIPLKPKEKRERDSNVLSVIIKGDVDGSVEAILNIIDTYDASHECELELVHFGVGDVSANDVNLAETFDGVIYGFNVNAGNVIQQSAAKKGVKIKLHKIIYRLVEDLQEELSSRLPCAVEEHPV

SEQ ID NO: 14984 - protein, 205 aa, Homo sapiens
MTPPERLFLPRVCGTTLHLLLLGLLLVLLPGAQGLPGVGLTPSAAQTARQHPKMHLAHSTLKPAAHLIGDPSKQNSLLWRANTDRAFLQDGFSLSNNSLLVPTSGIYFVYSQVVFSGKAYSPKATSSPLYLAHEVQLFSSQYPFHVPLLSSQKMVYPGLQEPWLHSMYHGAAFQLTQGDQLSTHTDGIPHLVLSPSTVFFGAFAL

SEQ ID NO: 14985 - protein, 867 aa, Homo sapiens
MQEPGQIVETYTEEDPEGAMSVVSVETSDDGTTRRTETTVKKVVKTVTTRTVQPVAMGPDGLPVDASSVSNNYIQTLGRDFRKNGNGGPGPYVGQAGTATLPRNFHYPPDGYSRHYEDGYPGGSDNYGSLSRVTRIEERYRPSMEGYRAPSRQDVYGPQPQVRVGGSSVDLHRFHPEPYGLEDDQRSMGYDDLDYGMMSDYGTARRTGTPSDPRRRLRSYEDMIGEEVPSDQYYWAPLAQHERGSLASLDSLRKGGPPPPNWRQPELPEVIAMLGFRLDAVKSNAAAYLQHLCYRNDKVKTDVRKLKGIPVLVGLLDHPKKEVHLGACGALKNISFGRDQDNKIAIKNCDGVPALVRLLRKARDMDLTEVITGTLWNLSSHDSIKMEIVDHALHALTDEVIIPHSGWEREPNEDCKPRHIEWESVLTNTAGCLRNVSSERSEARRKLRECDGLVDALIFIVQAEIGQKDSDSKLVENCVCLLRNLSYQVHREIPQAERYQEAAPNVANNTGPHAASCFGAKKGKDEWFSRGKKPIEDPANDTVDFPKRTSPARGYELLFQPEVVRIYISLLKESKTPAILEASAGAIQNLCAGRWTYGRYIRSALRQEKALSAIADLLTNEHERVVKAASGALRNLAVDARNKELIGKHAIPNLVKNLPGGQQNSSWNFSEDTVISILNTINEVIAENLEAAKKLRETQGIEKLVLINKSGNRSEKEVRAAALVLQTIWGYKELRKPLEKEGWKKSDFQVNLNNASRSQSSHSYDDSTLPLIDRNQKSDKKPDREEIQMSNMGSNTKSLDNNYSTPNERGDHNRTLDRSGDLGDMEPLKGTTPLMQDEGQESLEEELDVLVLDDEGGQVSYPSMQKI

SEQ ID NO: 14986 - protein, 1059 aa, Homo sapiens
ARVRDPRTYDRRYWCDAEYDAYRREHSAFGDRPEKRDNNWRYDPRFTGSFDDDPDPHRDPYGEEVDRRSVHSEHSARSLHSAHSLASRRSSLSSHSHQSQIYRSHNVAAGSYEAPLPPGSFHGDFAYGTYRSNFSSGPGFPEYGYPADTVWPAMEQVSSRPTSPEKFSVPHVCARFGPGGQLIKVIPNLPSEGQPALVEVHSMEALLQHTSEQEEMRAFPGPLAKDDTHKVDVINFAQNKAMKCLQNENLIDKESASLLWNFIVLLCRQNGTVVGTDIAELLLRDHRTVWLPGKSPNEANLIDFTNEAVEQVEEEESGEAQLSFLTGGPAAAASSLERETERFRELLLYGRKKDALESAMKNGLWGHALLLASKMDSRTHARVMTRFANSLPINDPLQTVYQLMSGRMPAASTCCGDEKWGDWRPHLAMVLSNLNNNMDVESRTMATMGDTLASRGLLDAAHFCYLMAQAGFGVYTKKTTKLVLIGSNHSLPFLKFATNEAIQRTEAYEYAQSLGAETCPLPSFQVFKFIYSCRLAEMGLATQAFHYCEAIAKSILTQPHLYSPVLISQLVQMASQLRLFDPQLKEKPEEESLAAPTWLVHLQQVERQIKEGAGVWHQDGALPQQCPGTPSSEMEQLDRPGLSQPGALGIANPLLAVPAPSPEHSSPSVRLLPSAPQTLPDGPLASPARVPMFPVPLPPGPLEPGPGCVTPGPALGFLEPSGPGLPPGVPPLQERRHLLQEARSPDPGIVPQEAPVGNSLSELSEENFDGKFANLTPSRTVPDSEAPPGWDRADSGPTQPPLSLSPAPETKRPGQAAKKETKEPKKGESWFFRWLPGKKKTEAYLPDDKNKSIVWDEKKNQWVNLNEPEEEKKAPPPPPTSMPKTVQAAPPALPGPPGAPVNMYSRRAAGTRARYVDVLNPSGTQRSEPALAPADFVAPLAPLPIPSNLFVPTPDAEEPQLPDGTGREGPAAARGLANPEPAPEPKVLSSAASLPGSELPSSRPEGSQGGEAPGDLPAAGGPPSGAMPFYNPAQLAQACATSGSSRLGRIGQRKHLVLN

SEQ ID NO: 14987 - protein, 250 aa, Homo sapiens
ADSRGSLISTDSGNSLPERNSEKSNSLDKHQQSSTLGNSVVRCDKLDQSEIKSLLMCFLYILKSMSDDALFTYWNKASTSELMDFFTISEVCLHQFQYMGKRYIASVRKISSVLGISVDNGYGHSDADVLHQSLLEANIATEVCLTALDTLSLFTLAFKNQLLADHGHNPLMKKVFDVYLCFLQKHQSETALKNVFTALRSLIYKFPSTFYEGRADMCAALCYEILKCCNSKLSSIRTEASQLLYFLMRN

SEQ ID NO: 14988 - protein, 269 aa, Homo sapiens
MSAPSATPIFAPGENCSPAWGAAPAAYDAADTHLRILGKPVMERWETPYMHALAAAASSKGGRVLEVGFGMAIAASKVQEAPIDEHWIIECNDGVFQRLRDWAPRQTHKVIPLKGLWEDVAPTLPDGHFDGILYDTYPLSEETWHTHQFNFIKNHAFRLLKPGGVLTYCNLTSWGELMKSKYSDITIMFEVRPPEVPHGSPGSDLGWGWEGAAGATLLPGEGPFLTPWVGWTVLVHLEIKVLCLAQWLPGAVAQVYNPSTVEGRGGQIA

SEQ ID NO: 14989 - protein, 115 aa, Homo sapiens
NTVSETAKDLVSKMLHVDPHQRLTAKQVLQHPWVTQKDKLPQSQLSHQDLQLVKGAMAATYSALNSSKPTPQLKPIESSILAQRRVRKLPSTTLMDSSRLRLCWWKAIHCINFFL

SEQ ID NO: 14990 - protein, 420 aa, Homo sapiens
MDSSAAPTNASNCTDALAYSSCSPAPSPGSWVNLSHLDGNLSDPCGPNRTDLGGRDSLCPPTGSPSMITAITIMALYSIVCVVGLFGNFLVMYVIVRYTKMKTATNIYIFNLALADALATSTLPFQSVNYLMGTWPFGTILCKIVISIDYYNMFTSIFTLCTMSVDRYIAVCHPVKALDFRTPRNAKIINVCNWILSSAIGLPVMFMATTKYRQGSIDCTLTFSHPTWYWENLLKICVFIFAFIMPVLIITVCYGLMILRLKSVRMLSGSKEKDRNLRRITRMVLVVVAVFIVCWTPIHIYVIIKALVTIPETTFQTVSWHFCIALGYTNSCLNPVLYAFLDENFKRCFREFCIPTSSNIEQQNSTRIRQNTRDHPSTANTVDRTNHQVELNLDCHCENAKPWPLSYNAGQSPFPFPGRV

SEQ ID NO: 14991 - protein, 460 aa, Homo sapiens
MEVLESGEQGVLQWDRKLSELSEPGDGEALMYHTHFSELLDEFSQNVLGQLLNDPFLSEKSVSMEVEPSPTSPAPLIQAEHSYSLCEEPRAQSPFTHITTSDSFNDDEVESEKWYLSTDFPSTSIKTEPVTDEPPPGLVPSVTLTITAISTPLEKEEPPLEMNTGVDSSCQTIIPKIKLEPHEVDQFLNFSPKEAPVDHLHLPPTPPSSHGSDSEGSLSPNPRLHPFSLPQTHSPSRAAPRAPSALSSSPLLTAPHKLQGSGPLVLTEEEKRTLIAEGYPIPTKLPLSKSEEKALKKIRRKIKNKISAQESRRKKKEYMDSLEKKVESCSTENLELRKKVEVLENTNRTLLQQLQKLQTLVMGKVSRTCKLAGTQTGTCLMVVVLCFAVAFGSFFQGYGPYPSATKMALPSQHSLQEPYTASVGKTACGKLGRVLFYFPRAGFLSLPKGIFCESPMFKKW

SEQ ID NO: 14992 - protein, 246 aa, Homo sapiens
MKTMRVREVEVVPSNMWGGQGLLGASVRFCSFRRASEQVWHVLDVEPSSPAALAGLRPYTDYVVGSDQILQESEDFFTLIESHEGKPLKLMVYNSKSDSCREVTVTPNAAWGGEGSLGCGIGYGYLHRIPTQPPSYHKKPPGTPPPSALPLGAPPPDALPPGPTPEDSPSLETGSRQSDYMEALLQAPGSSMEDPLPGPGSPSHSAPDPDGLPHFMETPLQPPPPVQRVMDPAMPVCGPACPLPQN

SEQ ID NO: 14993 - protein, 141 aa, Homo sapiens
IIGGYAEFLYQIGLLDEKQKKYFQKQCHECIEHIRKQNWFEAFEVLIYNGQLDIIVAAALTERSLMGMDWKGSQEYKKAEKKVWKIFKSDSEVAGYIRQAGDFHQVIIRGGGHILPYDQPLRAFDMINRFIYGKGWDPYVG

SEQ ID NO: 14994 - protein, 322 aa, Homo sapiens
MPARALLPRRMGHRTLASTPALWASIPCPRSELRLDLVLPSGQSFRWREQSPAHWSGVLADQVWTLTQTEEQLHCTVYRGDKSQASRPTPDELEAVRKYFQLDVTLAQLYHHWGSVDSHFQEVAQKFQGVRLLRQDPIECLFSFICSSNNNIARITGMVERLCQAFGPRLIQLDDVTYHGFPSLQALAGPEVEAHLRKLGLGYRARYVSASARAILEEQGGLAWLQQLRESSYEEAHKALCILPGVGTKVADCICLMALDKPQAVPVDVHMWHIAQRDYSWHPTTSQAKGPSPQTNKELGNFFRSLWGPYAGWAQAAGSDAS

SEQ ID NO: 14995 - protein, 171 aa, Homo sapiens
MADSGLDKKSTKCPDCSSASQKDVLCVCSSKTRVPPVLVVEMSQTSSIGSAESLISLERKKEKNINRDITSRKDLPSRTSNVERKASQQQWGRGNFTEGKVPHIRIENGAAIEEIYTFGRILGKGSFGIVIEATDKETETKWAIKKVNKEKAGSSAVKLLEREVNILKSVK

SEQ ID NO: 14996 - protein, 163 aa, Homo sapiens
MAGQDPALSTSHPFYDVARHGILQVAGDDRFGRRVVTFSCCRMPPSHELDHQRLLEYLKYTLDQYVENDYTIVYFHYGLNSRNKPSLGWLQSAYKEFDRKDGLTQPPWLTPVIPVLWEAKVQEELEGPLRGAPHQLHQGPVEHLEAPHQSQVWEESHLFQLPE

SEQ ID NO: 14997 - protein, 546 aa, Homo sapiens
MASKVTDAIVWYQKKIGAYDQQIWEKSVEQREIKGLRNKPKKTAHVKPDLIDVDLVRGSAFAKAKPESPWTSLTRKGIVRVVFFPFFFRWWLQVTSKVIFFWLLVLYLLQVAAIVLFCSTSSPHSIPLTEVIGPIWLMLLLGTVHCQIVSTRTPKPPLSTGGKRRRKLRKAAHLEVHREGDGSSTTDNTQEGAVQNHGTSTSHSVGTVFRDLWHAAFFLSGSKKAKNSIDKSTETDNGYVSLDGKKTVKSGEDGIQNHEPQCETIRPEETAWNTGTLRNGPSKDTQRTITNVSDEVSSEEGPETGYSLRRHVDRTSEGVLRNRKSHHYKKHYPNEDAPKSGTSCSSRCSSSRQDSESARPESETEDVLWEDLLHCAECHSSCTSETDVENHQINPCVKKEYRDDPFHQSHLPWLHSSHPGLEKISAIVWEGNDCKKADMSVLEISGMIMNRVNSHIPGIGYQIFGNAVSLILGLTPFVFRLSQATDLEQLTAHSASELYVIAFGSNEDVIVLSMVIISFVVRVSLVWIFFFLLCVAERTYKQVGIM

SEQ ID NO: 14998 - protein, 184 aa, Homo sapiens
AGGAFRGLRADGGGEPGRDPLPAVLQFGFVTIFVAACPLAPLFALLNNWVEIRLDARKFVCEYRRPVAERAQDIGIWFHILAGLTHLAVISNAFLLAFSSDFLPRAYYRWTRAHDLRGFLNFTLARAPSSFAAAHNRTCRYRAFRDDDGHYSQTYWNLLAIRLAFVIVFEHVVFSVGRLLDLLV

SEQ ID NO: 14999 - protein, 496 aa, Homo sapiens
MPDSNFAERSEEQVSGAKVIAQALKTQDVEYIFGIVGIPVTEIAIAAQQLGIKYIGMRNEQAACYAASAIGYLTSRPGVCLVVSGPGLIHALGGMANANMNCWYMERCMSPPISMAETSAVCTAASVIRNAKQPLLIIGKGAAYAHAEESIKKLVEQYKLPFLPTPMGKGVVPDNHPYCVGAARSRALQFADVIVLFGARLNWILHFGLPPRYQPDVKFIQVDICAEELGNNVKPAVTLLGNIHAVTKQLLEELDKTPWQYPPESKWWKTLREKMKSNEAASKELASKKSLPMNYYTVFYHVQEQLPRDCFVVSEGANTMDIGRTVLQNYLPRHRLDAGTFGTMGVGLGFAIAAAVVAKDRSPGQWIICVEGDSAFGFSGMEVETICRYNLPIILLVVNNNGIYQGFDTDTWKEMLKFQDATAVVPPMCLLPNSHYEQVMTAFGGKGYFVQTPEELQKSLRQSLADTTKPSLINIMIEPQATRKAQDFHWLTRSNM

SEQ ID NO: 15000 - protein, 115 aa, Homo sapiens
MEAPAQLLFLLLLWLPDTTGEIVMTQSPATLSVSPGERATLSCRASQSVSSNLAWYQQKPGQAPRLLIYGASIRATGIPARFSGSGSGTEFTLTISILQSEDFAVYYCQQYNNWP

SEQ ID NO: 15001 - protein, 69 aa, Homo sapiens
MSSVAVLTQESFAEHRSGLVPQQIKVATLNSEEESDPPTYKDAFPPLPEKAACLESAQEPAGAWGNKIR

SEQ ID NO: 15002 - protein, 203 aa, Homo sapiens
MNFNVWNIKEMLSIPSGSGNKKSSNWNNNQNDYSSLSDSQFLFGSQFCPENSETLSAPLDFGAHLRHSKQSQQNYLEGEPSIFTKYQTKPQLFGGDIKDGGLFPPPLSVGKSKGLLEQFEEKKKRAKDKCDSCRRLWKSLRTISVQEANLFWILWRLWPRHVSASCLRYQQRALVNDEHELSDPSLVSSGEVPHRVSDERMGI

SEQ ID NO: 15003 - protein, 3848 aa, Homo sapiens
MAFVATQGATVVDQTTLMKKYLQFVAALTDVNTPDETKLKMMQEVSENFENVTSSPQYSTFLEHIIPRFLTFLQDGEVQFLQEKPAQQLRKLVLEIIHRIPTNEHLRPHTKNVLSVMFRFLETENEENVLICLRIIIELHKQFRPPITQEIHHFLDFVKQIYKELPKVVNRYFENPQVIPENTVPPPEMVGMITTIAVKVNPEREDSETRTHSIIPRGSLSLKVLAELPIIVVLMYQLYKLNIHNVVAEFVPLIMNTIAIQVSAQARQHKLYNKELYADFIAAQIKTLSFLAYIIRIYQELVTKYSQQMVKGMLQLLSNCPAETAHLRKELLIAAKHILTTELRNQFIPCMDKLFDESILIGSGYTARETLRPLAYSTLADLVHHVRQHLPLSDLSLAVQLFAKNIDDESLPSSIQTMSCKLLLNLVDCIRSKSEQESGNGRDVLMRMLEVFVLKFHTIARYQLSAIFKKCKPQSELGAVEAALPGVPTAPAAPGPAPSPAPVPAPPPPPPPPPPATPVTPAPVPPFEKQGEKDKEDKQTFQVTDCRSLVKTLVCGVKTITWGITSCKAPGAQFIPNKQLQPKETQIYIKLVKYAMQALDIYQVQIAGNGQTYIRVANCQTVRMKEEKEVLEHFAGVFTMMNPLTFKEIFQTTVPYMVERISKNYALQIVANSFLANPTTSALFATILVEYLLDRLPEMGSNVELSNLYLKLFKLVFGSVSLFAAENEQMLKPHLHKIVNSSMELAQTAKEPYNYFLLLRALFRSIGGGSHDLLYQEFLPLLPNLLQGLNMLQSGLHKQHMKDLFVELCLTVPVRLSSLLPYLPMLMDPLVSALNGSQTLVSQGLRTLELCVDNLQPDFLYDHIQPVRAELMQALWRTLRNPADSISHVAYRVLGKFGGSNRKMLKESQKLHYVVTEVQGPSITVEFSDCKASLQLPMEKAIETALDCLKSANTEPYYRRQAWEVIKCFLVAMMSLEDNKHALYQLLAHPNFTEKTIPNVIISHRYKAQDTPARKTFEQALTGAFMSAVIKDLRPSALPFVASLIRHYTMVAVAQQCGPFLLPCYQVGSQPSTAMFHSEENGSKGMDPLVLIDAIAICMAYEEKELCKIGEVALAVIFDVASIILGSKERACQLPLFSYIVERLCACCYEQAWYAKLGGVVSIKFLMERLPLTWVLQNQQTFLKALLFVMMDLTGEVSNGAVAMAKTTLEQLLMRCATPLKDEERAEEIVAAQEKSFHHVTHDLVREVTSPNSTVRKQAMHSLQVLAQVTGKSVTVIMEPHKEVLQDMVPPKKHLLRHQPANAQIGLMEGNTFCTTLQPRLFTMDLNVVEHKVFYTELLNLCEAEDSALTKLPCYKSLPSLVPLRIAALNALAACNYLPQSREKIIAALFKALNSTNSELQEAGEACMRKFLEGATIEVDQIHTHMRPLLMMLGDYRSLTLNVVNRLTSVTRLFPNSFNDKFCDQMMQHLRKWMEVVVITHKGGQRSDGNEMKICSAIINLFHLIPAAPQTLVKPLLEVVMKTERAMLIEAGSPFREPLIKFLTRHPSQTVELFMMEATLNDPQWSRMFMSFLKHKDARPLRDVLAANPNRFITLLLPGGAQTAVRPGSPSTSTMRLDLQFQAIKIISIIVKNDDSWLASQHSLVSQLRRVWVSENFQERHRKENMAATNWKEPKLLAYCLLNYCKRNYGDIELLFQLLRAFTGRFLCNMTFLKEYMEEEIPKNYSIAQKRALFFRFVDFNDPNFGDELKAKVLQHILNPAFLYSFEKGEGEQLLGPPNPEGDNPESITSVFITKVLDPEKQADMLDSLRIYLLQYATLLVEHAPHHIHDNNKNRNSKLRRLMTFAWPCLLSKACVDPACKYSGHLLLAHIIAKFAIHKKIVLQVFHSLLKAHAMEARAIVRQAMAILTPAVPARMEDGHQMLTHWTRKIIVEEGHTVPQLVHILHLIVQHFKVYYPVRHHLVQHMVSAMQRLGFTPSVTIEQRRLAVDLSEVVIKWELQRIKDQQPDSDMDPNSSGEGVNSVSSSIKRGLSVDSAQEVKRFRTATGAISAVFGRSQSLPGADSLLAKPIDKQHTDTVVNFLIRVACQVNDNTNTAGSPGEVLSRRCVNLLKTALRPDMWPKSELKLQWFDKLLMTVEQPNQVNYGNICTGLEVLSFLLTVLQSPAILSSFKPLQRGIAACMTCGNTKVLRAVHSLLSRLMSIFPTEPSTSSVASKYEELECLYAAVGKVIYEGLTNYEKATNANPSQLFGTLMILKSACSNNPSYIDRLISVFMRSLQKMVREHLNPQAASGSTEATSAGTSELVMLSLELVKTRLAVMSMEMRKNFIQAILTSLIEKSPDAKILRAVVKIVEEWVKNNSPMAANQTPTLREKSILLVKMMTYIEKRFPEDLELNAQFLDLVNYVYRDETLSGSELTAKLEPAFLSGLRCAQPLIRAKFFEVFDNSMKRRVYERLLYVTCSQNWEAMGNHFWIKQCIELLLAVCEKSTPIGTSCQGAMLPSITNVINLADSHDRAAFAMVTHVKQEPRERENSESKEEDVEIDIELAPGDQTSTPKTKELSEKDIGNQLHMLTNRHDKFLDTLREVKTGALLSAFVQLCHISTTLAEKTWVQLFPRLWKILSDRQQHALAGEISPFLCSGSHQVQRDCQPSALNCFVEAMSQCVPPIPIRPCVLKYLGKTHNLWFRSTLMLEHQAFEKGLSLQIKPKQTTEFYEQESITPPQQEILDSLAELYSLLQEEDMWAGLWQKRCKYSETATAIAYEQHGFFEQAQESYEKAMDKAKKEHERSNASPAIFPEYQLWEDHWIRCSKELNQWEALTEYGQSKGHINPYLVLECAWRVSNWTAMKEALVQVEVSCPKEMAWKVNMYRGYLAICHPEEQQLSFIERLVEMASSLAIREWRRLPHVVSHVHTPLLQAAQQIIELQEAAQINAGLQPTNLGRNNSLHDMKTVVKTWRNRLPIVSDDLSHWSSIFMWRQHHYQAIVTAYENSSQHDPSSNNAMLGVHASASAIIQYGKIARKQGLVNVALDILSRIHTIPTVPIVDCFQKIRQQVKCYLQLAGVMGKNECMQGLEVIESTNLKYFTKEMTAEFYALKGMFLAQINKSEEANKAFSAAVQMHDVLVKAWAMWGDYLENIFVKERQLHLGVSAITCYLHACRHQNESKSRKYLAKVLWLLSFDDDKNTLADAVDKYCIGVPPIQWLAWIPQLLTCLVGSEGKLLLNLISQVGRVYPQAVYFPIRTLYLTLKIEQRERYKSDSGQQQPSSVGNQSHSASDPGPIRATAPMWRCSRIMHMQRELHPTLLSSLEGIVDQMVWFRENWHEEVLRQLQQGLAKCYSVAFEKSGAVSDAKITPHTLNFVKKLVSTFGVGLENVSNVSTMFSSAASESLARRAQATAQDPVFQKLKGQFTTDFDFSVPGSMKLHNLISKLKKWIKILEAKTKQLPKFFLIEEKCRFLSNFSAQTAEVEIPGEFLMPKPTHYYIKIARFMPRVEIVQKHNTAARRLYIRGHNGKIYPYLVMNDACLTESRREERVLQLLRLLNPCLEKRKETTKRHLFFTVPRVVAVSPQMRLVEDNPSSLSLVEIYKQRCAKKGIEHDNPISRYYDRLATVQARGTQASHQVLRDILKEVQSNMVPRSMLKEWALHTFPNATDYWTFRKMFTIQLALIGFAEFVLHLNRLNPEMLQIAQDTGKLNVAYFRFDINDATGDLDANRPVPFRLTPNISEFLTTIGVSGPLTASMIAVARCFAQPNFKVDGILKTVLRDEIIAWHKKTQEDTSSPLSAAGQPENMDSQQLVSLVQKAVTAIMTRLHNLAQFEGGESKVNTLVAAANSLDNLCRMDPAWHPWL

SEQ ID NO: 15004 - protein, 17 aa, Homo sapiens
MSEETVPEAASPPPPQG

SEQ ID NO: 15005 - protein, 86 aa, Homo sapiens
QIAYSATSMDLSDKTLFKYFMRVVPSDAQQARAMVDIVKRYNWTYVSAVHTEGRGTKKEEMRKRDQTLMLSFMRFKLFSCLSLQRS

SEQ ID NO: 15006 - protein, 391 aa, Homo sapiens
MRNTVYAVKRLKENADLEWTAVKQSFLTEVEQLSRFRHPNIVDFAGYCAQNGFYCLVYGFLPNGSLEDRLHCQTQACPPLSWPQRLDILLGTARAIQFLHQDSPSLIHGDIKSSNVLLDERLTPKLGDFGLARFSRFAGSSPSQSSMVARTQTVRGTLAYLPEEYIKTGRLAVDTDTFSFGVKDLVEEEAEEAGVALRSTQSTLQAGLAADAWAAPIAMQIYKKHLDPRPGPCPPELGLGLGQLACCCLHRRAKRRPPMTQVYERLEKLQAVVAGVPGHSEAASCIPPSPQENSYVSSTGRAHSGAAPWQPLAAPSGASAQAAEQLQRGPNQPVESDESLGGLSAALRSWHLTPSCPLDPAPLREAGCPQGDTAGESSWGSGPGSRPTAVE

SEQ ID NO: 15007 - protein, 615 aa, Homo sapiens
MAEGSGEVVAVSATGAANGLNNGAGGTSATTCNPLSRKLHKILETRLDNDKEMLEALKALSTFFVENSLRTRRNLRGDIERKSLAINEEFVSIFKEVKEELESISEDVQAMSNCCQDMTSRLQAAKEQTQDLIVKTTKLQSESQKLEIRAQVADAFLSKFQLTSDEMSLLRGTREGPITEDFFKALGRVKQIHNDVKVLLRTNQQTAGLEIMEQMALLQETAYERLYRWAQSECRTLTQESCDVSPVLTQAMEALQDRPVLYKYTLDEFGTARRSTVVRGFIDALTRGGPGGTPRPIEMHSHDPLRYVGDMLAWLHQATASEKEHLEALLKHVTTQGVEENIQEVVGHITEGVCRPLKVRIEQVIVAEPGAVLLYKISNLLKFYHHTISGIVGNSATALLTTIEEMHLLSKKIFFNSLSLHASKLMDKVELPPPDLGPSSALNQTLMLLREVLASHDSSVVPLDARQADFVQVLSCVLDPLLQMCTVSASNLGTADMATFMVNSLYMMKTTLALFEFTDRRLEMLQFQIEAHLDTLINEQASYVLTRVGLSYIYNTVQQHKPEQGSLANMPNLDSVTLKAAMVQFDRYLSAPDNLLIPQLNFLLSATVKRPPNGP

SEQ ID NO: 15008 - protein, 175 aa, Homo sapiens
NCVPDGALRCPGPTAGLTRLSLAYLPVKVIPSQAFRGLNEVIKIEISQIDSLERIEANAFDNLLNLSEILIQNTKNLRYIEPGAFINLPRLKYLSICNTGIRKFPDVTKVFSSESNFILEICDNLHITTIPGNAFQGMNNESVTLPWQNCDEAIKELTLKEKRENMDWNDSEMKR

SEQ ID NO: 15009 - protein, 344 aa, Homo sapiens
MGVATTLQPPTTSKTLQKQHLEAVGAYQYVLTFLFMGPFFSLLVFVLLFTSLWPFSVFYLVWLYVDWDTPNQGGRRSEWIRNRAIWRQLRDYYPVKLVKTAELPPDRNYVLGAHPHGIMCTGFLCNFSTESNGFSQLFPGLRPWLAVLAGLFYLPVYRDYIMSFGLCPVSRQSLDFILSQPQLGQAVVIMVGGAHEALYSVPGEHCLTLQKRKGFVRLALRHGASLVPVYSFGENDIFRLKAFATGSWQHWCQLTFKKLMGFSPCIFWGRGLFSATSWGLLPFAVPITTVGECPPPGGRPPAAAWASGIPRPPVSLSLQWAAPSPSPSASTPPRRKSITITPST

SEQ ID NO: 15010 - protein, 436 aa, Homo sapiens
MEDIQTNAELKSTQEQSVPADDSMKVKDEYSERDENVLKSEPMGNAEEPEIPYSYSREYNEYENIKLERHVVSFDSSRPTSGKMNCDVCGLSCISFNVLMVHKRSHTGERPFQCNQCGASFTQKGNLLRHIKLHTGEKPFKCHLCNYACQRRDALTGHLRTHSASAEARHIKAEMGSERALVLDRLASNVAKRKSSMPQKFIGEKRHCFDVNYNSSYMYEKESELIQTRMMDQAINNAISYLGAEALRPLVQTPPAPTSEMVPVISSMYPIALTRAEMSNGAPQELEKKSIHLPEKSVPSERGLSPNNSGHDSTDTDSNHEERQNHIYQQNHMVLSRARNGMPLLKEVPRSYELLKPPPICPRDSVKVINKEGEVMDVYRCDHCRVLFLDYVMFTIHMGCHGFRDPFECNMCGYRSHDRYEFSSHIARGEHRALLK

SEQ ID NO: 15011 - protein, 139 aa, Homo sapiens
MALHIHEACILLLVIPGLVTSAAISHEDYPADEGDQISSNDNLIFDDYRGKGCVDDSGFVYKLGERFFPGHSNCPCVCALDGPVCDQPECPKIHPKCTKVEHNGCCPECKEVKNFCEYHGKNYKILEEFKVQTALQERR

SEQ ID NO: 15012 - protein, 980 aa, Homo sapiens
MRPVALLLLPSLLALLAHGLSLEAPTVGKGQAPGIEETDGELTAAPTPEQPERGVHFVTTAPTLKLLNHHPLLEEFLQEGLEKGDEELRPALPFQPDPPAPFTPSPLPRLANQDSRPVFTSPTPAMAAVPTQPQSKEGPWSPESESPMLRITAPLPPGPSMAVPTLGPGEIASTTPPSRAWTPTQEGPGDMGRPWVAEVVSQGAGIGIQGTITSSTASGDDEETTTTTTIITTTITTVQTPGPCSWNFSGPEGSLDSPTDLSSPTDVGLDCFFYISVYPGYGVEIKVQNISLREGETVTVEGLGGPDPLPLANQSFLLRGQVIRSPTHQAALRFQSLPPPAGPGTFHFHYQAYLLSCHFPRRPAYGDVTVTSLHPGGSARFHCATGYQLKGARHLTCLNATQPFWDSKEPVCIAACGGVIRNATTGRIVSPGFPGNYSNNLTCHWLLEAPEGQRLHLHFEKVSLAEDDDRLIIRNGDNVEAPPVYDSYEVEYLPIEGLLSSGKHFFVELSTDSSGAAAGMALRYEAFQQGHCYEPFVKYGNFSSSTPTYPVGTTVEFSCDPGYTLEQGSIIIECVDPHDPQWNETEPACRAVCSGEITDSAGVVLSPNWPEPYGRGQDCIWGVHVEEDKRIMLDIRVLRIGPGDVLTFYDGDDLTARVLGQYSGPRSHFKLFTSMADVTIQFQSDPGTSVLGYQQGFVIHFFEVPRNDTCPELPEIPNGWKSPSQPELVHGTVVTYQCYPGYQVVGSSVLMCQWDLTWSEDLPSCQRVTSCHDPGDVEHSRRLISSPKFPVGATVQYICDQGFVLMGSSILTCHDRQAGSPKWSDRAPKCLLEQLKPCHGLSAPENGARSPEKQLHPAGATIHFSCAPGYVLKGQASIKCVPGHPSHWSDPPPICRAVAKAPAASSTLDAAHIAAAIFLPLVAMVLLVGGVYFYFSRLQGKSSLQLPRPRPRPYNRITIESAFDNPTYETGETREYEVSI

SEQ ID NO: 15013 - protein, 261 aa, Homo sapiens
MGIKTALPAAELGLYSLVLSGALAYAGRGLLEASQDGAHRKAFRESVRPGWEYIGRKMDVADFEWVMWFTSFRNVIIFALSGHVLFAKLCTMVAPKSGFVTGTFDLQEVLFHGGSSFTVLRCTSFALESCAHPDRHYSLADLLKYNFYLPFFFFGPIMTFDRFHAQVSQVEPVRREGELWHIRAQAGLSVVAIMAVDIFFHFFYILTIPSDLKFANRLPDSALAGLAYSNLVYDWVKAAVLFGVVNTVACLDHLDPPQPPK

SEQ ID NO: 15014 - protein, 1117 aa, Homo sapiens
MTTHVTLEDALSNVDLLEELPLPDQQPCIEPPPSSIMYQANFDTNFEDRNAFVTGIARYIEQATVHSSMNEMLEEGHEYAVMLYTWRSCSRAIPQVKCNEQPNRVEIYEKTVEVLEPEVTKLMKFMYFQVMGFGLYLMDGNVSNIYKLDAKKRINLSKIDKFFKQLQVVPLFGDMQIELARYIKTSAHYEENKSKWTCTQSSISPQYNICEQMVQIRDDHIRFISELARYSNSEVVTGSGLDSQKSDEEYRELFDLALRGLQLLSKWSAHVMEVYSWKLVHPTDKFCNKDCPGTAEEYERATRYNYTSEEKFAFVEVIAMIKGLQVLMGRMESVFNQAIRNTIYAALQDFAQVTLREPLRQAVRKKKNVLISVLQAIRKTICDWEGGREPPNDPCLRGEKDPKGGFDIKVPRRAVGPSSTQLYMVRTMLESLIADKSGSKKTLRSSLDGPIVLAIEDFHKQSFFFTHLLNISEALQQCCDLSQLWFREFFLELTMGRRIQFPIEMSMPWILTDHILETKEPSMMEYVLYPLDLYNDSAYYALTKFKKQFLYDEIEAEVNLCFDQFVYKLADQIFAYYKAMAGSVLLDKRFRAECKNYGVIIPYPPSNRYETLLKQRHVQLLGRSIDLNRLITQRISAAMYKSLDQAISRFESEDLTSIVELEWLLEINRLTHRLLCKHMTLDSFDAMFREANHNVSAPYGRITLHVFWELNFDFLPNYCYNGSTNRFVRTAIPFTQEPQRDKPANVQPYYLYGSKPLNIAYSHIYSSYRNFVGPPHFKTICRLLGYQGIAVVMEELLKIVKSLLQGTILQYVKTLIEVMPKICRLPRHEYGSPGILEFFHHQLKDIIEYAELKTDVFQSLREVGNAILFCLLIEQALSQEEVCDLLHAAPFQNILPRVYIKEGERLEVRMKRLEAKYAPLHLVPLIERLGTPQQIAIAREGDLLTKERLCCGLSMFEVILTRIRSYLQDPIWRGPPPTNGVMHVDECVEFHRLWSAMQFVYCIPVGTNEFTAEQCFGDGLNWAGCSIIVLLGQQRRFDLFDFCYHLLKVQRQDGKDEIIKNVPLKKMADRIRKYQILNNEVFAILNKYMKSVETDSSTVEHVRCFQPPIHQSLATTC

SEQ ID NO: 15015 - protein, 224 aa, Homo sapiens
MSSVAVLTQESFAEHRSGLVPQQIKVATLNSEEESDPPTYKDAFPPLPEKAACLESAQEPAGAWGNKIRPIKASVITQVFHVPLEERKYKDMNQFGEGEQAKICLEIMQRTGAHLELSLAKDQGLSIMVSGKLDAVMKARKDIVARLQTQASATVAIPKEHHRFVIGKNGEKLQDLELKTATKIQIPRPDDPSNQIKITGTKEGIEKARHEVLLISAEQDKRAV

SEQ ID NO: 15016 - protein, 2078 aa, Homo sapiens
MPGEATETVPATEQELPQPQAETAVLPMSSALSVTAALGQPGPTLPPPCSPAPQQCPLSAANQASPFPSPSTIASTPLEVPFPQSSSGTALPLGTAPEAPTFLPNLIGPPISPAALALASPMIAPTLKGTPSSSAPLALVALAPHSVQKSSAFPPNLLTSPPSVAVAESGSVITLSAPIAPSEPKTNLNKVPSEVVPNPKGTPSPPCIVSTVPYHCVTPMASIQSGVASLPQTTPTTTLAIASPQVKDTTISSVLISPQNPGSLSLKGPVSPPAALSLSTQSLPVVTSSQKTAGPNTPPDFPISLGSHLAPLHQSSFGSVQLLGQTGPSALSDPTVKTISVDHSSTGASYPSQRSVIPPLPSRNEVVPATVAAFPVVAPSVDKGPSTISSITCSPSGSLNVATSFSLSPTTSLILKSSPNATYHYPLVAQMPVSSVGTTPLVVTNPCTIAAAPTTTFEVATCVSPPMSSGPISNIEPTSPAALVMAPVAPKEPSTQVATTLRIPVSPPLPDPEDLKNLPSSVLVKFPTQKDLQTVPASLEGAPFSPAQAGLTTKKDPTVLPLVQAAPKNSPSFQSTSSSPEIPLSPEATLAKKSLGEPLPIGKPASSMTSPLGVNSSASVIKTDSYAGPDSAGPLLKSSLITPTVAAFPLESADPAGVAPTTAKGTSTYTTTASPFLEGTVSLAPKNHPVKEGTLTTLPLVPTASENCPVAPSPQNTCAPLATLVLAPEIPKSVPSPSLPPAGTPPGTKKVDGISHTSALAPVASSPKECPTEDSGASATASSKGTLTYLADSPSPLGVSVSPQTKRPPTKKGSAGPDTPIGNLSSPVSPVEASFLPENSLSFQGSKDSPATTHSPTPPSPKGAPTPSAVTPLSPKGVTLPPKETPTPSVVNLPFPKEGPATPAPKQAPALSMTSSSPKKARATPAPKGIPASPSPKGAPTPPAATPPSPKGGPATPSPKWAPTPPAATPPSPKGGPATPSPKGAPTPPAATPPSPKGGPATPSPKGAPTPPAVTPPSPKGSPAATPFPKGASTPPAATPPSPKGSPAATPLPKGAPTTPAATLPSPKGGPATPSLKGAPTPPAATPPSPKGGPATPSPKGAPMPPAATPPSPKGGLATPPHKGAPTTPAATPPSPKGGLATPPPKGAPTTPAATPPSPKGGLATPPPKGAPTTPAATPPSPKGGLATPSPKGAPTTPAATPPSPKGGLATPSPKGAPTTPAATPPSPKGGLATPSPKGAPTTPAATPPSPKGGPATPPPKGAPTPPAATPPSLKGGLATPPHKGAPNPAVVTPPSPKGGPATSPPKGAPTPPAATPPSPKGSPGTPPPKGAPTPPAVTPPSPKGTPTLPATTPSSKGGPTTPSSKEGPTPPAATPSHKGGPAMTPPSPKRGPAIPSPKGDPTSPAVIPLSPKKAPATPVTREGAATPSKGDLTPPAVTPVSLKKAPATSAPKGGPATPSSKGDPTLPAVTPPSPKEPPAPKQVATSSSPKKAPATPAPMGAPTLPAVIPSSPKEVPATPSSRRDPIAPTATLLSKKTPATLAPKEALIPPAMTVPSPKKTPAIPTPKEAPATPSSKEASSPPAVTPSTYKGAPSPKELLIPPAVTSPSPKEAPTPPAVTPPSPEKGPATPAPKGTPTSPPVTPSSLKDSPTSPASVTCKMGATVPQASKGLPAKKGPTALKEVLVAPAPESTPIITAPTRKGPQTKKSSATSPPICPDPSAKNGSKGPLSTVAPAPLLPVQKDSSKTAKGKDASHSPKGPLAPPESKASTPLTAAAFEKVLPKPESASVSAAPSPPVSLPLAPSPVPTLPPKQQFLPSSPGLVLESPSKPLAPADEDELLPLIPPEPISGGVPFQSVLVNMPTPKSAGIPVPTPSAKQPVTKNNKGSGTESDSDESVPELEEQDSTQATTQQAQLAAAAEIDEEPVSKAKQSRSEKKARKAMSKLGLRQVTGVTRVTIRKSKNILFVITKPDVYKSPASDTYIVFGEAKIEDLSQQAQLAAAEKFKVQGEAVSNIQENTQTPTVQEESEEEEVDETGVEVKDIELVMSQANVSRAKAVRALKNNSNDIVNAIMELTM

SEQ ID NO: 15017 - protein, 675 aa, Homo sapiens
MSLWLLEGVPMRQAAVTSTSLTIKSVFTRSELKFSPQWSHHGKIVTCQLQDADGKFLSNDTVQLNVKHTPKLEIKVTPSDAIVREGDSVTMTCEVSSSNPEYTTVSWLKDGTSLKKQNTFTLNLREVTKDQSGKYCCQVSNDVGPGRSEEVFLQVQYAPEPSTVQILHSPAVEGSQVEFLCMSLANPLPTNYTWYHNGKEMQGRTEEKVHIPKILPWHAGTYSCVAENILGTGQRGPGAELDVQYPPKKVTTVIQNPMPIREGDTVTLSCNYNSSNPSVTRYEWKPHGAWEEPSLGVLKIQNVGWDNTTIACAACNSWCSWASPVALNVQYAPRDVRVRKIKPLSEIHSGNSVSLQCDFSSSHPKEVQFFWEKNGRLLGKESQLNFDSISPEDAGSYSCWVNNSIGQTASKAWTLEVLYAPRRLRVSMSPGDQVMEGKSATLTCESDANPPVSHYTWFDWNNQSLPYHSQKLRLEPVKVQHSGAYWCQGTNSVGKGRSPLSTLTVYYSPETIGRRVAVGLGSCLAILILAICGLKLQRRWKRTQSQQGLQENSSGQSFFVRNKKVRRAPLSEGPHSLGCYNPMMEDGISYTTLRFPEMNIPRTGDAESSEMQRPPPDCDDTVTYSALHKRQVGDYENVIPDFPEDEGIHYSELIQFGVGERPQAQENVDYVILKH

SEQ ID NO: 15018 - protein, 1207 aa, Homo sapiens
ALDWAIPQQRSSSCPRMGGTDAVITNVSGSVSSAGRPASASPAPNANADGTKTSRSSVETTPSVIQHVGQPPATPAKHSSSTSSKGAKASNPEPSFKANENGLPPSSIFLSPNEAFRSPPIPYPRSYLPYPAPEGIAVSPLSLHGKGPVYPHPVLLPNGSLFPGHLAPKPGLPYGLPTGRPEFVTYQDALGLGMVHPMLIPHTPIEITKEEKPERRSRSHERARYEDPTLRNRFSEILETSSTKLHPDVPTDKNLKPNPNWNQGKTVVKSDKLVYVDLLREEPDAKTDTNVSKPSFAAESVGQSAEPPKPSVEPALQQHRDFIALREELGRISDFHETYTFKQPVFTVSKDSVLAGTNKENLGLPVSTPFLEPPLGSDGPAVTFGKTQEDPKPFCVGSAPPSVDVTPTYTKDGADEAESNDGKVLKPKPSKLAKRIANSAGYVGDRFKCVTTELYADSSQLSREQRALQRAMMRFSELEMKEREGGHPATKDSEMCKFSPADWERLKGNQDKKPKSVTLEEAIAEQNESERCEYSVGNKHRDPFEAPEDKDLPVEKYFVERQPVSEPPADQVASDMPHSPTLRVDRKRKVSGDSSHTETTAEEVPEDPLLKAKRRRVSKDDWPEREMTNSSSNHLEDPHYSELTNLKVCIELTGLHPKKQRHLLHLRERWEQQVSAADGKPGRQSRKEVTQATQPEAIPQGTNITEEKPGRKRAEAKGNRSWSEESLKPSDNEQGLPVFSGSPPMKSLSSTSAGGKKQAQPSCAPASRPPAKQQKIKENQKTDVLCADEEEDCQAASLLQKYTDNSEKPSGKRLCKTKHLIPQESRRGLPLTGEYYVENADGKVTVRRFRKRPEPSSDYDLSPAKQEPKPFDRLQQLLPASQSTQLPCSSSPQETTQSRPMPPEARRLIVNKNAGETLLQRAARLGYEEVVLYCLENKICDVNHRDNAGYCALHEACARGWLNIVRHLLEYGADVNCSAQDGTRPLHDAVENDHLEIVRLLLSYGADPTLATYSGRTIMKMTHSELMEKFLTDYLNDLQGRNDDDASGTWDFYGSSVCEPDDESGYDVLANPPGPEDQDDDDDAYSDVFEFEFSETPLLPCYNIQVSVAQGPRNWLLLSDVLKKLKMSSRIFRCNFPNVEIVTIAEAEFYRQVSASLLFSCSKDLEAFNPESKELLDLVEFTNEIQTLLGSSVEWLHPSDLASDNYW

SEQ ID NO: 15019 - protein, 154 aa, Homo sapiens
MAGPVKDREAFQRLNFLYQAAHCVLAQDPENQALARFYCYTERTIAKRLVLRRDPSVKRTLCRGCSSLLVPGLTCTQRQRRCRGQRWTVQTCLTCQRSQRFLNDPGHLLWGDRPEAQLGSQADSKPLQPLPNTAHSISDRLPEEKMQTQGSSNQ

SEQ ID NO: 15020 - protein, 142 aa, Homo sapiens
MAFRDVAVDFTQDEWRLLSPAQRTLYREVMLENYSNLVSLGISFSKPELITQLEQGKETWREEKKCSPATCPADPEPELYLDPFCPPGFSSQKFPMQHVLCNHPPWIFTCLCAEGNIQPGDPGPGDQEKQQQASEGRPWSDQ

SEQ ID NO: 15021 - protein, 862 aa, Homo sapiens
MRLALLWALGLLGAGSPLPSWPLPNIGGTEEQQAESEKAPREPLEPQVLQDDLPISLKKVLQTSLPEPLRIKLELDGDSHILELLQNRELVPGRPTLVWYQPDGTRVVSEGHTLENCCYQGRVRGYAGSWVSICTCSGLRGLVVLTPERSYTLEQGPGDLQGPPIISRIQDLHLPGHTCALSWRESVHTQKPPEHPLGQRHIRRRRDVVTETKTVELVIVADHSEAQKYRDFQHLLNRTLEVALLLDTFFRPLNVRVALVGLEAWTQRDLVEISPNPAVTLENFLHWRRAHLLPRLPHDSAQLVTGTSFSGPTVGMAIQNSICSPDFSGGVNMDHSTSILGVASSIAHELGHSLGLDHDLPGNSCPCPGPAPAKTCIMEASTDFLPGLNFSNCSRRALEKALLDGMGSCLFERLPSLPPMAAFCGNMFVEPGEQCDCGFLDDCVDPCCDSLTCQLRPGAQCASDGPCCQNCQLRPSGWQCRPTRGDCDLPEFCPGDSSQCPPDVSLGDGEPCAGGQAVCMHGRCASYAQQCQSLWGPGAQPAAPLCLQTANTRGNAFGSCGRNPSGSYVSCTPRDAICGQLQCQTGRTQPLLGSIRDLLWETIDVNGTELNCSWVHLDLGSDVAQPLLTLPGTACGPGLVCIDHRCQRVDLLGAQECRSKCHGHGVCDSNRHCYCEEGWAPPDCTTQLKATSSLTTGLLLSLLVLLVLVMLGASYWYRARLHQRLCQLKGPTCQYRAAQSGPSERPGPPQRALLARGTKASALSFPAPPSRPLPPDPVSKRLQAELADRPNPPTRPLPADPVVRSPKSQGPAKPPPPRKPLPADPQGRCPSGDLPGPGAGIPPLVVPSRPAPPPPTVSSLYL

SEQ ID NO: 15022 - protein, 1682 aa, Homo sapiens
MLASPEPKGLVPFTKESFELIKQHIAKTHNEDHEEEDLKPTPDLEVGKKLPFIYGNLSQGMVSEPLEDVDPYYYKKKNTFIVLNKNRTIFRFNAASILCTLSPFNCIRRTTIKVLVHPFFQLFILISVLIDCVFMSLTNLPKWRPVLENTLLGIYTFEILVKLFARGVWAGSFSFLGDPWNWLDFSVTVFEVIIRYSPLDFIPTLQTARTLRILKIIPLNQGLKSLVGVLIHCLKQLIGVIILTLFFLSIFSLIGMGLFMGNLKHKCFRWPQENENETLHNRTGNPYYIRETENFYYLEGERYALLCGNRTDAGQCPEGYVCVKAGINPDQGFTNFDSFGWALFALFRLMAQDYPEVLYHQILYASGKVYMIFFVVVSFLFSFYMASLFLGILAMAYEEEKQRVGEISKKIEPKFQQTGKELQEGNETDEAKTIQIEMKKRSPISTDTSLDVLEDATLRHKEELEKSKKICPLYWYKFAKTFLIWNCSPCWLKLKEFVHRIIMAPFTDLFLIICIILNVCFLTLEHYPMSKQTNTLLNIGNLVFIGIFTAEMIFKIIAMHPYGYFQVGWNIFDSMIVFHGLIELCLANVAGMALLRLFRMLRIFKLGKYWPTFQILMWSLSNSWVALKDLVLLLFTFIFFSAAFGMKLFGKNYEEFVCHIDKDCQLPRWHMHDFFHSFLNVFRILCGEWVETLWDCMEVAGQSWCIPFYLMVILIGNLLVLYLFLALVSSFSSCKDVTAEENNEAKNLQLAVARIKKGINYVLLKILCKTQNVPKDTMDHVNEVYVKEDISDHTLSELSNTQDFLKDKEKSSGTEKNATENESQSLIPSPSVSETVPIASGESDIENLDNKEIQSKSGDGGSKEKIKQSSSSECSTVDIAISEEEEMFYGGERSKHLKNGCRRGSSLGQISGASKKGKIWQNIRKTCCKIVENNWFKCFIGLVTLLSTGTLAFEDIYMDQRKTIKILLEYADMIFTYIFILEMLLKWMAYGFKAYFSNGWYRLDFVVVIVFCLSLIGKTREELKPLISMKFLRPLRVLSQFERMKVVVRALIKTTLPTLNVFLVCLMIWLIFSIMGVDLFAGRFYECIDPTSGERFPSSEVMNKSRCESLLFNESMLWENAKMNFDNVGNGFLSLLQVATFNGWITIMNSAIDSVAVNIQPHFEVNIYMYCYFINFIIFGVFLPLSMLITVIIDNFNKHKIKLGGSNIFITVKQRKQYRRLKKLMYEDSQRPVPRPLNKLQGFIFDVVTSQAFNVIVMVLICFQAIAMMIDTDVQSLQMSIALYWINSIFVMLYTMECILKLIAFRCFYFTIAWNIFDFMVVIFSITGLCLPMTVGSYLVPPSLVQLILLSRIIHMLRLGKGPKVFHNLMLPLMLSLPALLNIILLIFLVMFIYAVFGMYNFAYVKKEAGINDVSNFETFGNSMLCLFQVAIFAGWDGMLDAIFNSKWSDCDPDKINPGTQVRGDCGNPSVGIFYFVSYILISWLIIVNMYIVVVMEFLNIASKKKNKTLSEDDFRKFFQVWKRFDPDRTQYIDSSKLSDFAAALDPPLFMAKPNKGQLIALDLPMAVGDRIHCLDILLAFTKRVMGQDVRMEKVVSEIESGFLLANPFKITCEPITTTLKRKQEAVSATIIQRAYKNYRLRRNDKNTSDIHMIDGDRDVHATKEGAYFDKAKEKSPIQSQI

SEQ ID NO: 15023 - protein, 276 aa, Homo sapiens
MALHPRRVRLKPWLVAQVDSGLYPGLIWLHRDSKRFQIPWKHATRHSPQQEEENTIFKAWAVETGKYQEGVDDPDPAKWKAQLRCALNKSREFNLMYDGTKEVPMNPVKIYQVCDIPQPQGSIINPGSTGSAPWDEKDNDVDEEDEEDELDQSQHHVPIQDTFPFLNINGSPMAPASVGNCSVGNCSPEAVWPKTEPLEMEVPQAPIQPFYSSPELWISSLPMTDLDIKFQYRGKEYGQTMTVSNPQGCRLFYGDLGPMPDQEELFGPVSLEQVKF

SEQ ID NO: 15024 - protein, 628 aa, Homo sapiens
MKGSNRNKDHSAEGEGVGKRPKRKCLQWHPLLAKKLLDFSEEEEEEDEEEDIDKVQLLGADGLEQDVGETEDDESPEQRARRPMNAFLLFCKRHRSLVRQEHPRLDNRGATKILADWWAVLDPKEKQKYTDMAKEYKDAFMKANPGYKWCPTTNKPVKSPTPTVNPRKKLWAFPSDSSRDLPSPKKAKTEEMPQLNFGMADPTQMGGLSMLLLAGEHALGTPEVSSGTCRPDVSESPELRQKSPLFQFAEISSSTSHSDASTKQCQTSALFQFAEISSNTSQLGGAEPVKRCGKSALFQLAEENEAQEKETPLIMKGVGMKKAGHLVRVGPVGARSSRRQSQKKTVSLAPQSWMKNLKKNSTASLNIVLLHLTGNVYLSQEKRRRLEMCPQNRLKPAKVLSSLRKRTYSTKLSANISTKRRSPMFRKKEVGINGQTSNSSWMPFTLQKPYFQKTETPWSLFIRLKISHPFSTLQSQQQRKNLWWAAKREKQGKPRLHTLSGQQMAGYHQQEVLWMTNQRNNCRGVSLKQLRQTAMTNAHTTPRSGRRGAVLQKCLPCLRSLASLRWLKWQPWKMCTEVRGQLRSPMMDSQKKCRRLLYLFPALTSEAPFHCKTLCFTYYPSLVFTEGC

SEQ ID NO: 15025 - protein, 278 aa, Homo sapiens
MEVQVSQASLGFELTSVEKSLREWSRLSREVIAWLCPSSPNFILNFPPPPSASSVSMVQLFSSPFGYQSPSGHSEEEREGNMKSAKPQVNHSQHGESQRALSPLQSTLSSAASPSQAYETYIENGLICLKHKIRNIEKKKLKLEDYKDRLKSGEHLNPDQLEAVEKYEEVLHNLEFAKELQKTFSGLSLDLLKAQKKAQRREHMLKLEAEKKKLRTILQVQYVLQNLTQEHVQKDFKGGLNGAVYLPSKELDYLIKFSKLTCPERNESLRQTLEGSTV

SEQ ID NO: 15026 - protein, 427 aa, Homo sapiens
MALLWGLLVLSWSCLQGPCSVFSPVSAMEPLGRQLTSGPNQEQVSPLTLLKLGNQVQPGAQNHTLQRLQQVLHAGSGPCLPHLLSRLCQDLGPGAFRLAARMYLQKGFPIKEDFLEQSEQLFGAKPVSLTGKQEDDLANINQWVKEATEGKIQEFLSGLPEDTVLLLLNAIHFQGFWRNKFDPSLTQRDSFHLDEQFTVPVEMMQARTYPLRWFLLEQPEIQVAHFPFKNNMSFVVLVPTHFEWNVSQVLANLSWDTLHPPLVWERPTKVRLPKLYLKHQMDLVATLSQLGLQELFQAPDLRGISEQSLVVSGVQHQSTLELSEVGVEAAAATSIAMSRMSLSSFSVNRPFLFFIFEDTTGLPLFVGSVRNPNPSAPRELKEQQDSPGNKDFLQSLKGFPRGDKLFGPDLKLVPPMEEDYPQFGSPK

SEQ ID NO: 15027 - protein, 1121 aa, Homo sapiens
MSKLRMVLLEDSGSADFRRHFVNLSPFTITVVLLLSACFVTSSLGGTDKELRLVDGENKCSGRVEVKVQEEWGTVCNNGWSMEAVSVICNQLGCPTAIKAPGWANSSAGSGRIWMDHVSCRGNESALWDCKHDGWGKHSNCTHQQDAGVTCSDGSNLEMRLTRGGNMCSGRIEIKFQGRWGTVCDDNFNIDHASVICRQLECGSAVSFSGSSNFGEGSGPIWFDDLICNGNESALWNCKHQGWGKHNCDHAEDAGVICSKGADLSLRLVDGVTECSGRLEVRFQGEWGTICDDGWDSYDAAVACKQLGCPTAVTAIGRVNASKGFGHIWLDSVSCQGHEPAIWQCKHHEWGKHYCNHNEDAGVTCSDGSDLELRLRGGGSRCAGTVEVEIQRLLGKVCDRGWGLKEADVVCRQLGCGSALKTSYQVYSKIQATNTWLFLSSCNGNETSLWDCKNWQWGGLTCDHYEEAKITCSAHREPRLVGGDIPCSGRVEVKHGDTWGSICDSDFSLEAASVLCRELQCGTVVSILGGAHFGEGNGQIWAEEFQCEGHESHLSLCPVAPRPEGTCSHSRDVGVVCSRYTEIRLVNGKTPCEGRVELKTLGAWGSLCNSHWDIEDAHVLCQQLKCGVALSTPGGARFGKGNGQIWRHMFHCTGTEQHMGDCPVTALGASLCPSEQVASVICSGNQSQTLSSCNSSSLGPTRPTIPEESAVACIESGQLRLVNGGGRCAGRVEIYHEGSWGTICDDSWDLSDAHVVCRQLGCGEAINATGSAHFGEGTGPIWLDEMKCNGKESRIWQCHSHGWGQQNCRHKEDAGVICSEFMSLRLTSEASREACAGRLEVFYNGAWGTVGKSSMSETTVGVVCRQLGCADKGKINPASLDKAMSIPMWVDNVQCPKGPDTLWQCPSSPWEKRLASPSEETWITCDNKIRLQEGPTSCSGRVEIWHGGSWGTVCDDSWDLDDAQVVCQQLGCGPALKAFKEAEFGQGTGPIWLNEVKCKGNESSLWDCPARRWGHSECGHKEDAAVNCTDISVQKTPQKATTGRSSRQSSFIAVGILGVVLLAIFVALFFLTKKRRQRQRLAVSSRGENLVHQIQYREMNSCLNADDLDLMNSSGGHSEPH

SEQ ID NO: 15028 - protein, 541 aa, Homo sapiens
MYGTVSCAQDWVPSRCCSSAGHGNFPYLCGNLNDVVVSPLLYTCYQNSQSVSRAYEQYGASAIQPISEEMQLLLTVYYLVQLAADQVPLMEDLEQIFLRSWRESHLTEIRQYQQAPPQPFPPAPSAAAPVTSAQLPWLASLAASSCNDSVHVIECAYSLAEGLSEMFRLLVEGKLAKTNYVVIICACRSAAIDSCIAVTGKYQARILSESLLTPAEYQKEVNYELVTGKVDSLGAFFSTLCPEGDIDILLDKFHQENQGHISSSLAASSVTKAASLDVSGTPVCTSYNLEPHSIRPFQLAVAQKLLSHVCSIADSSTQNLDLGSFEKVDFLICIPPSEVTYQQTLLHVWHSGVLLELGLKKEHMTKQRVEQYVLKLDTEAQTKFKAFLQNSFQNPHTLFVLIHDHAHWDLVSSTVHNLYSQSDPSVGLVDRLLNCREVKEAPNIVTLHVTSFPYALQTQHTLISPYNEIHWPASCSNGVDLYHENKKYFGLSEFIESTLSGHSLPLLRYDSSFEAMVTALGKRFPRLHSAVIRTFVLVQHY

SEQ ID NO: 15029 - protein, 854 aa, Homo sapiens
MPGGGPQGAPAAAGGGGVSHRAGSRDCLPPAACFRRRRLARRPGYMRSSTGPGIGFLSPAVGTLFRFPGGVSGEESHHSESRARQCGLDSRGLLVRSPVSKSAAAPTVTSVRGTSAHFGIQLRGGTRLPDRLSWPCGPGSAGWQQEFAAMDSSETLDASWEAACSDGARRVRAAGSLPSAELSSNSCSPGCGPEVPPTPPGSHSAFTSSFSFIRLSLGSAGERGEAEGCPPSREAESHCQSPQEMGAKAASLDGPHEDPRCLSRPFSLLATRVSADLAQAARNSSRPERDMHSLPDMDPGSSSSLDPSLAGCGGDGSSGSGDAHSWDTLLRKWEPVLRDCLLRNRRQMEVISLRLKLQKLQEDAVENDDYDKAETLQQRLEDLEQEKISLHFQLPSRQPALSSFLGHLAAQVQAALRRGATQQASGDDTHTPLRMEPRLLEPTAQDSLHVSITRRDWLLQEKQQLQKEIEALQARMFVLEAKDQQLRREIEEQEQQLQWQGCDLTPLVGQLSLGQLQEVSKALQDTLASAGQIPFHAEPPETIRSLQERIKSLNLSLKEITTKVCMSEKFCSTLRKKVNDIETQLPALLEAKMHAISGNHFWTAKDLTEEIRSLTSEREGLEGLLSKLLVLSSRNVKKLGSVKEDYNRLRREVEHQETAYETSVKENTMKYMETLKNKLCSCKCPLLGKVWEADLEACRLLIQSLQLQEARGSLSVEDERQMDDLEGAAPPIPPRLHSEDKRKTPLKVLEEWKTHLIPSLHCAGGEQKEESYILSAELGEKCEDIGKKLLYLEDQLHTAIHSHDEDLIQSLRRELQMVKETLQAMILQLQPAKEAGEREAAASCMTAGVHEAQA

SEQ ID NO: 15030 - protein, 110 aa, Homo sapiens
MPFHHCHRDPLPPPGLTPERLHARRQLYAACAVCFVFMAGEVVGGYLAHSLAIMTDAAHLLADVGSMMGSLFSLWLSTRPATRTMTFGWHRSETLGALASVVSLWMVTGI

SEQ ID NO: 15031 - protein, 141 aa, Homo sapiens
MSSVAVLTQESFAEHRSGLVPQQIKVATLNSEEESDPPTYKDAFPPLPEKAACLESAQEPAGAWGNKIRPIKASVITQVFHVPLEERKYKDMNQFGEGEQAKICLEIMQRTGAHLELSLAKDQGLSIMVSGKLDAVMKARK

SEQ ID NO: 15032 - protein, 542 aa, Homo sapiens
MYCDGAVDLDAAAELPGSSAVRLASLRDLPAQLLELYQQGFSLAALHPFVQPTHEREKTPLEHIFRAILIKKTDRSQKTDLHNEGYILELDCCSSLDHPTDQKLIPEFIKKIQEAASQGLKFVGVIPQYHSSVNSAGSSAPVSTANSTEDARDAKNARGDHASLENEKPGTGDVCSAPAGRNQSPEPSSGPRGEVPLAKQPSSPSGEGDGGELSPQGVSKTLDGPESNPLEVHEEPLSGKMEIFTLFNKPKSHQKCRQYYPVTIPLHVSKNGQTVSGLDANWLEHMSDHFRKGGMLVNAVFYLGIVNDSLHGLTDGVFIFEAVSTEDSKTIQGYDAIVVEQWTVLEGVEVQTDYVPLLNSLAAYGWQLTCVLPTPVVKTTSEGSVSTKQIVFLQRPCLPQKIKKKESKFQWRFSREEMHNRQMRKSKGKLSARDKQQAEENEKNLEDQSSKAGDMGNCVSGQQQEGGVSEEMKGPVQEDKGEQLSPGGLLCGVGVEGEAVQNGPASHSRALVGICTGHSNPGEDARDGDAEEVRELGTVEEN

SEQ ID NO: 15033 - protein, 490 aa, Homo sapiens
MKELMPHLTFNGNGKINVNSIMEGLKKFKPKGMVTLHKLKTANDIKDRVTGHMAVSEIKPKLKLNPLTKVPISHNKRDRDLPGSLQCQLQHKEKKLSASQMAAFQDAYNFFYKDKTGCIDFHGLMCTVAKLGMNLTKHDVYNELKCADIDRDGKVNFSDFIKVLTDKNLFLKAVVPEKETCLDLAGNPGILLFEILSRLLETSALPRKSIIEIVSYFQRKFQHTGPGMLWSPYTMGYGKRTLKPDICTPPSSSMAAFANAARIAIMKEKDLFKFLEELKRCNSGSDSPYSKIPIFPLFPNVDGVVMGKPFKDMQKLEMLRIKEPLHFFEDYFFHKRDWKTQAANIKSMDPASGYSNNIFTIDQMLKKKQTCTVADATAIKQHVKRATDTYNLGIALEHRKEMLNLWQKIRGDLIGMDSRNESFYDTFSTYTWSWNVCQELLSPKDLRLYDAYVNRNSSHNSRSSSSSDTSECYTDSGRKRKRKGLKGFQQ

SEQ ID NO: 15034 - protein, 1179 aa, Homo sapiens
MDNFAEGDFTVADYALLEDCPHVDDCVFAAEFMSNDYVRVTQLYCDGVGVQYKDYIQSERNLEFDICSIWCSKPISVLQDYCDAIKINIFWPLLFQHQNSSVISRLHPCVDANNSRASEINLKKLQHLELMEDIVDLAKKVANDSFLIGGLLRIGCKIENKILAMEEALNWIKYAGDVTILTKLGSIDNCWPMLSIFFTEYKYHITKIVMEDCNLLEELKTQSCMDCIEEGELMKMKGNEEFSKERFDIAIIYYTRAIEYRPENYLLYGNRALCFLRTGQFRNALGDGKRATILKNTWPKGHYRYCDALSMLGEYDWALQANIKAQKLCKNDPEGIKDLIQQHVKLQKQIEDLQGRTANKDPIKAFYENRAYTPRSLSAPIFTTSLNFVEKERDFRKINHEMANGGNQNLKVADEALKVDDCDCHPEFSPPSSQPPKHKGKQKSRNNESEKFSSSSPLTLPADLKNILEKQFSKSSRAAHQDFANIMKMLRSLIQDGYMALLEQRCRSAAQAFTELLNGLDPQKIKQLNLAMINYVLVVYGLAISLLGIGQPEELSEAENQFKRIIEHYPSEGLDCLAYCGIGKVYLKKNRFLEALNHFEKARTLIYRLPGVLTWPTSNVIIEESQPQKIKMLLEKFVEECKFPPVPDAICCYQKCHGYSKIQIYITDPDFKGFIRISCCQYCKIEFHMNCWKKLKTTTFNDKIDKDFLQGICLTPDCEGVISKIIIFSSGGEVKCEFEHKVIKEKVPPRPILKQKCSSLEKLRLKEDKKLKRKIQKKEAKKLAQERMEEDLRESNPPKNEEQKETVDNVQRCQFLDDRILQCIKQYADKIKSGIQNTAMLLKELLSWKVLSTEDYTTCFSSRNFLNEAVDYVIRHLIQENNRVKTRIFLHVLSELKEVEPKLAAWIQKLNSFGLDATGTFFSRYGASLKLLDFSIMTFLWNEKYGHKLDSIEGKQLDYFSEPASLKEARCLIWLLEEHRDKFPALHSALDEFFDIMDSRCTVLRKQDSGEAPFSSTKVKNKSKKKKPKDSKPMLVGSGTTSVTSNNEIITSSEDHSNRNSDSAGPFAVPDHLRQDVEEFEALYDQHSNEYVVRNKKLWDMNPKQKCSTLYDYFSQFLEEHGPLDMSNKMFSAEYEFFPEETRQILEKAGGLKPFLLGCPRFVVIDNCIALKKVASRLK

SEQ ID NO: 15035 - protein, 242 aa, Homo sapiens
MPLRDKYCQTDHHHHGCCEPVYILEPGDPPLLQQPLQTSKSGIQQIIECFRSGTKQLKHILLKDVDTIFECKLCRSLFRGLPNLITHKKFYCPPSLQMDDNLPDVNDKQSQAINDLLEAIYPSVDKREYIIKLEPIETNQNAVFQYISRTDNPIEVTESSSTPEQTEVQIQETSTEQSKTVPVTDTEVETVEPPPVEIVTDEVAPTSDEQPQESQADLETSDNSDFGHQLICCLCRKEFNSR

SEQ ID NO: 15036 - protein, 2732 aa, Homo sapiens
MEQTDCKPYQPLPKVKHEMDLAYTSSSDESEDGRKPRQSYNSRETLHEYNQELRMNYNSQSRKRKEVEKSTQEMEFCETSHTLCSGYQTDMHSVSRHGYQLEMGSDVDTETEGAASPDHALRMWIRGMKSEHSSCLSSRANSALSLTDTDHERKSDGENGFKFSPVCCDMEAQAGSTQDVQSSPHNQFTFRPLPPPPPPPHACTCARKPPPAADSLQRRSMTTRSQPSPAAPAPPTSTQDSVHLHNSWVLNSNIPLETRHFLFKHGSGSSAIFSAASQNYPLTSNTVYSPPPRPLPRSTFSRPAFTFNKPYRCCNWKCTALSATAITVTLALLLAYVIAVHLFGLTWQLQPVEGELYANGVSKGNRGTESMDTTYSPIGGKVSDKSEKKVFQKGRAIDTGEVDIGAQVMQTIPPGLFWRFQITIHHPIYLKFNISLAKDSLLGIYGRRNIPPTHTQFDFVKLMDGKQLVKQDSKGSDDTQHSPRNLILTSLQETGFIEYMDQGPWYLAFYNDGKKMEQVFVLTTAIEIMDDCSTNCNGNGECISGHCHCFPGFLGPDCARDSCPVLCGGNGEYEKGHCVCRHGWKGPECDVPEEQCIDPTCFGHGTCIMGVCICVPGYKGEICEEEDCLDPMCSNHGICVKGECHCSTGWGGVNCETPLPVCQEQCSGHGTFLLDAGVCSCDPKWTGSDCSTELCTMECGSHGVCSRGICQCEEGWVGPTCEERSCHSHCTEHGQCKDGKCECSPGWEGDHCTIAHYLDAVRDGCPGLCFGNGRCTLDQNGWHCVCQVGWSGTGCNVVMEMLCGDNLDNDGDGLTDCVDPDCCQQSNCYISPLCQGSPDPLDLIQQSQTLFSQHTSRLFYDRIKFLIGKDSTHVIPPEVSFDSRRACVIRGQVVAIDGTPLVGVNVSFLHHSDYGFTISRQDGSFDLVAIGGISVILIFDRSPFLPEKRTLWLPWNQFIVVEKVTMQRVVSDPPSCDISNFISPNPIVLPSPLTSFGGSCPERGTIVPELQVVQEEIPIPSSFVRLSYLSSRTPGYKTLLRILLTHSTIPVGMIKVHLTVAVEGRLTQKWFPAAINLVYTFAWNKTDIYGQKVWGLAEALVSVGYEYETCPDFILWEQRTVVLQGFEMDASNLGGWSLNKHHILNPQSGIIHKGNGENMFISQQPPVISTIMGNGHQRSVACTNCNGPAHNNKLFAPVALASGPDGSVYVGDFNFVRRIFPSGNSVSILELRNRDTRHSTSPAHKYYLAMDPVSESLYLSDTNTRKVYKLKSLVETKDLSKNFEVVAGTGDQCLPFDQSHCGDGGRASEASLNSPRGITVDRHGFIYFVDGTMIRKIDENAVITTVIGSNGLTSTQPLSCDSGMDITQVRLEWPTDLAVNPMDNSLYVLDNNIVLQISENRRVRIIAGRPIHCQVPGIDHFLVSKVAIHSTLESARAISVSHSGLLFIAETDERKVNRIQQVTTNGEIYIIAGAPTDCDCKIDPNCDCFSGDGGYAKDAKMKAPSSLAVSPDGTLYVADLGNVRIRTISRNQAHLNDMNIYEIASPADQELYQFTVNGTHLHTLNLITRDYVYNFTYNSEGDLGAITSSNGNSVHIRRDAGGMPLWLVVPGGQVYWLTISSNGVLKRVSAQGYNLALMTYPGNTGLLATKSNENGWTTVYEYDPEGHLTNATFPTGEVSSFHSDLEKLTKVELDTSNRENVLMSTNLTATSTIYILKQENTQSTYRVNPDGSLRVTFASGMEIGLSSEPHILAGAVNPTLGKCNISLPGEHNANLIEWRQRKEQNKGNVSAFERRLRAHNRNLLSIDFDHITRTGKIYDDHRKFTLRILYDQTGRPILWSPVSRYNEVNITYSPSGLVTFIQRGTWNEKMEYDQSGKIISRTWADGKIWSYTYLEKSVMLLLHSQRRYIFEYDQPDCLLSVTMPSMVRHSLQTMLSVGYYRNIYTPPDSSTSFIQDYSRDGRLLQTLHLGTGRRVLYKYTKQARLSEVLYDTTQVTLTYEESSGVIKTIHLMHDGFICTIRYRQTGPLIGRQIFRFSEEGLVNARFDYSYNNFRVTSMQAVINETPLPIDLYRYVDVSGRTEQFGKFSVINYDLNQVITTTVMKHTKIFSANGQVIEVQYEILKAIAYWMTIQYDNVGRMVICDIRVGVDANITRYFYEYDADGQLQTVSVNDKTQWRYSYDLNGNINLLSHGKSARLTPLRYDLRDRITRLGEIQYKMDEDGFLRQRGNDIFEYNSNGLLQKAYNKASGWTVQYYYDGLGRRVASKSSLGQHLQFFYADLTNPIRVTHLYNHTSSEITSLYYDLQGHLIAMELSSGEEYYVACDNTGTPLAVFSSRGQVIKEILYTPYGDIYHDTYPDFQVIIGFHGGLYDFLTKLVHLGQRDYDVVAGRWTTPNHHIWKQLNLLPKPFNLYSFENNYPVGKIQDVAKYTTDIRSWLELFGFQLHNVLPGFPKPELENLELTYELLRLQTKTQEWDPGKTILGIQCELQKQLRNFISLDQLPMTPRYNDGRCLEGGKQPRFAAVPSVFGKGIKFAIKDGIVTADIIGVANEDSRRLAAILNNAHYLENLHFTIEGRDTHYFIKLGSLEEDLVLIGNTGGRRILENGVNVTVSQMTSVLNGRTRRFADIQLQHGALCFNIRYGTTVEEEKNHVLEIARQRAVAQAWTKEQRRLQEGEEGIRAWTEGEKQQLLSTGRVQGYDGYFVLSVEQYLELSDSANNIHFMRQSEIGRR

SEQ ID NO: 15037 - protein, 170 aa, Homo sapiens
MHRVVVVGRSLFTEPSEPLPEESKPVEMPFHHCHRDPLPPPGLTPERLHARRQLYAACAVCFVFMAGEVVGGYLAHSLAIMTDAAHLLADVGSMMGSLFSLWLSTRPATRTMTFGWHRSETLGALASVVSLWMVTGILLYLAFVRLLHSDYHIEGGAMLLTASIAVCANL

SEQ ID NO: 15038 - protein, 431 aa, Homo sapiens
MERRRITSAARRSYVSSGEMMVGGLAPGRRLGPGTRLSLARMPPPLPTRVDFSLAGALNAGFKETRASERAEMMELNDRFASYIEKVRFLEQQNKALAAELNQLRAKEPTKLADVYQAELRELRLRLDQLTANSARLEVERDNLAQDLATVRQKLQDETNLRLEAENNLAAYRQEADEATLARLDLERKIESLEEEIRFLRKIHEEEVRELQEQLARQQVHVELDVAKPDLTAALKEIRTQYEAMASSNMHEAEEWYRSKFADLTDAAARNAELLRQAKHEANDYRRQLQSLTCDLESLRGTNESLERQMREQEERHVREAASYQEALARLEEEGQSLKDEMARHLQEYQDLLNVKLALDIEIATYRKLLEGEENRITIPVQTFSNLQIRGGKSTKDGENHKVTRYLKSLTIRVIPIQAHQIVNGTPPARG

SEQ ID NO: 15039 - protein, 128 aa, Homo sapiens
MGFSVKEDLSWPGLAVGNLFHRPRATVMVMVKGVNKLALPPGSVISYPLENAVPFSLDSVANSIHSLFSEETPVVLQLAPSEERVYMVGKANSVFEDLSVTLRQLRNRLFQENSVLSSLPLNSLSRNN

SEQ ID NO: 15040 - protein, 167 aa, Homo sapiens
MLRLRSGLRHLRATPNTRGSARLLCAEMPKKAGATTKGKSQSKEPERPLPPLGPVAVDPKGCVTIAIHAKPGSKQNAVTDLTAEAVNVAIAAPPSEGEANAELCRYLSKVLELRKSDVVLDKTGSCYIAQAGLELLASSDLPASASQSAGITGVSHHTQPALLLISL

SEQ ID NO: 15041 - protein, 221 aa, Homo sapiens
EIKLNDFCKASEVNISKLMFVPSASGYKAKNGIQEMDCCSLESDWIYFHPDASGRIIHVGPNQVKVLKLTEIENNSSQHQISEDFVILANRENHKNENVLTVTASGRVVKKSFNLLDDDPEQETFKIVDYEDELDLLSVVAVTQIDAEGKAHLDFHCNEYGTLLKSIPLVESWDVTYSHEVYFDRDLVLHIEQKPNRVFSCYVYQMICDTGEEEETINRSC

SEQ ID NO: 15042 - protein, 272 aa, Homo sapiens
LALFQVSDTAWASAIAEPSSLTSRPVETTLENNEGGQEQGPSVEGLNVPTKATLEVSSIIKKKPNQAKKGLGAKKGSLGAQKLANTCFNEIEKQAQAADKMKEQEDLAKVVSKEESIVSSLRLAYKDLEIQMKKDEKMNISGKKNVDSDRLGMGFGNCRSVISHSVTSDMQTIEQESPIMAKPRKKYNDDSDDSYFTSSSRPTARRKPDYEPVENTDEAQKKFGNVKAISSDMYFGRQSQADYETRARLERLSASSSISSADLFEEPRKQPA

SEQ ID NO: 15043 - protein, 275 aa, Homo sapiens
MGCGLNKLEKRDEKRPGNIYSTLKRPQVETKIDVSYEYRFLEFTTLSAAELPGSSAVRLASLRDLPAQLLELYQQGFSLAALHPFVQPTHEREKTPLEHIFRAILIKKTDRSQKTDLHNEGYILELDCCSSLDHPTDQKLIPEFIKKIQEAASQGLKFVGVIPQYHSSVNSAGSSAPVSTANSTEDARDAKNARGDHASLENEKPGTGDVCSAPAGRNQSPEPSSGPRGEVPLAKQPSSPSGEGDGGELSPQGVSKTLDGPESNPLEVHEEPLSG

SEQ ID NO: 15044 - protein, 1087 aa, Homo sapiens
MSDSEDSNFSEEEDSERSSDGEEAEVDEERRSAAGSEKEEEPEDEEEEEEEEEYDEEEEEEDDDRPPKKPRHGGFILDEADVDDEYEDEDQWEDGAEDILEKEEIEASNIDNVVLDEDRSGARRLQNLWRDQREEELGEYYMKKYAKSSVGETVYGGSDELSDDITQQQLLPGVKDPNLWTVKCKIGEERATAISLMRKFIAYQFTDTPLQIKSVVAPEHVKGYIYVEAYKQTHVKQAIEGVGNLRLGYWNQQMVPIKEMTDVLKVVKEVANLKPKSWVRLKRGIYKDDIAQVDYVEPSQNTISLKMIPRIDYDRIKARMSLKDWFAKRKKFKRPPQRLFDAEKIRSLGGDVASDGDFLIFEGNRYSRKGFLFKSFAMSAVITEGVKPTLSELEKFEDQPEGIDLEVVTESTGKEREHNFQPGDNVEVCEGELINLQGKILSVDGNKITIMPKHEDLKDMLEFPAQELRKYFKMGDHVKVIAGRFEGDTGLIVRVEENFVILFSDLTMHELKVLPRDLQLCSETASGVDVGGQHEWGELVQLDPQTVGVIVRLERETFQVLNMYGKVVTVRHQAVTRKKDNRFAVALDSEQNNIHVKDIVKVIDGPHSGREGEIRHLFRSFAFLHCKKLVENGGMFVCKTRHLVLAGGSKPRDVTNFTVGGFAPMSPRISSPMHPSAGGQRGGFGSPGGGSGGMSRGRGRRDNELIGQTVRISQGPYKGYIGVVKDATESTARVELHSTCQTISVDRQRLTTVGSRRPGGMTSTYGRTPMYGSQTPMYGSGSRTPMYGSQTPLQDGSRTPHYGSQTPLHDGSRTPAQSGAWDPNNPNTPSRAEEEYEYAFDDEPTPSPQAYGGTPNPQTPGYPDPSSPQVNPQYNPQTPGTPAMYNTDQFSPYAAPSPQGSYQPSPSPQSYHQVAPSPAGYQNTHSPASYHPTPSPMAYQASPSPSPVGYSPMTPGAPSPGGYNPHTPGSGIEQNSSDWVTTDIQVKVRDTYLDTQVVGQTGVIRSVTGGMCSVYLKDSEKVVSISSEHLEPITPTKNNKVKVILGEDREATGVLLSIDGEDGIVRMDLDEQLKILNLRFLGKLLEA

SEQ ID NO: 15045 - protein, 400 aa, Homo sapiens
METQELRGALALLLLCFFTSASQDLQVIDLLTVGESRQMVAVAEKIRTALLTAGDIYLLSTFRLPPKQGGVLFGLYSRQDNTRWLEASVVGKINKVTNALHSILGEGNVPDPKHHYGVSGFHEQRSHCSPNPCFRGVDCMEVYEYPGYRCGPCPPGLQGNGTHCSDINECAHADPCFPGSSCINTMPGFHCEACPRGYKGTQVSGVGIDYARASKQVCNDIDECNDGNNGGCDPNSICTNTVGSFKCGPCRLGFLGNQSQGCLPARTCHSPAHSPCHIHAHCLFERNGAVSCQCNVGWAGNGNVCGTDTDIDGYPDQALPCMDNNKHCKQDNCLLTPNSGQEDADNDGVGDQCDDDADGDGIKNVEASPMDWTIALKSPTHYRQTGMRTGWEMLATAALK

SEQ ID NO: 15046 - protein, 979 aa, Homo sapiens
MELAALCRWGLLLALLPPGAASTQDNYLSTDVGSCTLVCPLHNQEVTAEDGTQRCEKCSKPCARVCYGLGMEHLREVRAVTSANIQEFAGCKKIFGSLAFLPESFDGDPASNTAPLQPEQLQVFETLEEITGYLYISAWPDSLPDLSVFQNLQVIRGRILHNGAYSLTLQGLGISWLGLRSLRELGSGLALIHHNTHLCFVHTVPWDQLFRNPHQALLHTANRPEDECVGEGLACHQLCARGHCWGPGPTQCVNCSQFLRGQECVEECRVLQGLPREYVNARHCLPCHPECQPQNGSVTCFGPEADQCVACAHYKDPPFCVARCPSGVKPDLSYMPIWKFPDEEGACQPCPINCTHSCVDLDDKGCPAEQRASPLTSIISAVVGILLVVVLGVVFGILIKRRQQKIRKYTMRRLLQETELVEPLTPSGAMPNQAQMRILKETELRKVKVLGSGAFGTVYKGIWIPDGENVKIPVAIKVLRENTSPKANKEILDEAYVMAGVGSPYVSRLLGICLTSTVQLVTQLMPYGCLLDHVRENRGRLGSQDLLNWCMQIAKGMSYLEDVRLVHRDLAARNVLVKSPNHVKITDFGLARLLDIDETEYHADGGKVPIKWMALESILRRRFTHQSDVWSYGVTVWELMTFGAKPYDGIPAREIPDLLEKGERLPQPPICTIDVYMIMVKCWMIDSECRPRFRELVSEFSRMARDPQRFVVIQNEDLGPASPLDSTFYRSLLEDDDMGDLVDAEEYLVPQQGFFCPDPAPGAGGMVHHRHRSSSTRSGGGDLTLGLEPSEEEAPRSPLAPSEGAGSDVFDGDLGMGAAKGLQSLPTHDPSPLQRYSEDPTVPLPSETDGYVAPLTCSPQPEYVNQPDVRPQPPSPREGPLPAARPAGATLERPKTLSPGKNGVVKDVFAFGGAVENPEYLTPQGGAAPQPHPPPAFSPAFDNLYYWDQDPPERGAPPSTFKGTPTAENPEYLGLDVPV

SEQ ID NO: 15047 - protein, 438 aa, Homo sapiens
MEVGGDTAAPAPGGAEDLEDTQFPSEEAREGGGVHAVPPDPEDEGLEETEDHKLVFLQQGPLLLVAMSRTSQSAAQLRGELLAVHAQIVSTLTRASVARIFAHKQNYDLRRLLAGSERTLDRLLDSMEQDPGALLLGAVRCVPLARPLRDALGALLRRCTAPGLALSVLAVGGRLITAAQERNVLAECRLDPADLQLLLDWVGAPAFAAGEAWAPVCLPRFNPDGFFYAYVARLDAMPVCLLLLGTQREAFHAMAACRRLVEDGMHALGAMRALGEAASFSNASSASAPAYSVQAVGAPGLRHFLYKPLDIPDHHRQLPQFTSPELEAPYSREEERQRLSDLYHRLHARLHSTSRPLRLIYHVAEKETLLAWVTSKFELYTCLSPLVTKAGAILVVTKLLRWVKKEEDRLFIRYPPKYSTPPATSTDQAAHNGLFTGL

SEQ ID NO: 15048 - protein, 956 aa, Homo sapiens
MPRVSAPLVLLPAWLVMVACSPHSLRIAAILDDPMECSRGERLSITLAKNRINRAPERLGKAKVEVDIFELLRDSEYETAETMCQILPKGVVAVLGPSSSPASSSIISNICGEKEVPHFKVAPEEFVKFQFQRFTTLNLHPSNTDISVAVAGILNFFNCTTACLICAKAECLLNLEKLLRQFLISKDTLSVRMLDDTRDPTPLLKEIRDDKTATIIIHANASMSHTILLKAAELGMVSAYYTYIFTNLEFSLQRMDSLVDDRVNILGFSIFNQSHAFFQEFAQSLNQSWQENCDHVPFTGPALSSALLFDAVYAVVTAVQELNRSQEIGVKPLSCGSAQIWQHGTSLMNYLRMVELEGLTGHIEFNSKGQRSNYALKILQFTRNGFRQIGQWHVAEGLSMDSHLYASNISDTLFNTTLVVTTILENPYLMLKGNHQEMEGNDRYEGFCVDMLKELAEILRFNYKIRLVGDGVYGVPEANGTWTGMVGELIARKADLAVAGLTITAEREKVIDFSKPFMTLGISILYRVHMGRKPGYFSFLDPFSPGVWLFMLLAYLAVSCVLFLVARLTPYEWYSPHPCAQGRCNLLVNQYSLGNSLWFPVGGFMQQGSTIAPRALSTRCVSGVWWAFTLIIISSYTANLAAFLTVQRMDVPIESVDDLADQTAIEYGTIHGGSSMTFFQNSRYQTYQRMWNYMYSKQPSVFVKSTEEGIARVLNSNYAFLLESTMNEYYRQRNCNLTQIGGLLDTKGYGIGMPVGSVFRDEFDLAILQLQENNRLEILKRKWWEGGKCPKEEDHRAKGLGMENIGGIFVVLICGLIVAIFMAMLEFLWTLRHSEATEVSVCQEMVTELRSIILCQDSIHPRRRRAAVPPPRPPIPEERRPRGTATLSNGKLCGAGEPDQLAQRLAQEAALVARGCTHIRVCPECRRFQGLRARPSPARSEESLEWEKTTNSSEPE

SEQ ID NO: 15049 - protein, 423 aa, Homo sapiens
MAAVVLPPTAASQREGHTEGGELVNELLKSWLKGLVTFEDVAVEFTQEEWALLDPAQRTLYRDVMLENCRNLASLGNQVDKPRLISQLEQEDKVMTEERGILSGTCPDVENPFKAKGLTPKLHVFRKEQSRNMKMERNHLGATLNECNQCFKVFSTKSSLTRHRKIHTGERPYGCSECGKSYSSRSYLAVHKRIHNGEKPYECNDCGKTFSSRSYLTVHKRIHNGEKPYECSDCGKTFSNSSYLRPHLRIHTGEKPYKCNQCFREFRTQSIFTRHKRVHTGEGHYVCNQCGKAFGTRSSLSSHYSIHTGEYPYECHDCGRTFRRRSNLTQHIRTHTGEKPYTCNECGKSFTNSFSLTIHRRIHNGEKSYECSDCGKSFNVLSSVKKHMRTHTGKKPYECNYCGKSFTSNSYLSVHTRMHNRQM

SEQ ID NO: 15050 - protein, 418 aa, Homo sapiens
MATHSPEKTHKCNYCEKMFHRKDHLKNHLHTHDPNKETFKCEECGKNYNTKLGFKRHLALHAATSGDLTCKVCLQTFESTGVLLEHLKSHAGKSSGGVKEKKHQCEHCDRRFYTRKDVRRHMVVHTGRKDFLCQYCAQRFGRKDHLTRHMKKSHNQELLKVKTEPVDFLDPFTCNVSVPIKDELLPVMSLPSSELLSKPFTNTLQLNLYNTPFQSMQSSGSAHQMITTLPLGMTCPIDMDTVHPSHHLSFKYPFSSTSYAISIPEKEQPLKGEIESYLMELQGGVPSSSQDSQASSSSKLGLDPQIGSLDDGAGDLSLSKSSISISDPLNTPALDFSQLFNFIPLNGPPYNPLSVGSLGMSYSQEEAHSSVSQLPPQTQDLQDPANTIGLGSLHSLSAAFTSSLSTSTTLPRFHQAFQ

SEQ ID NO: 15051 - protein, 445 aa, Homo sapiens
MNTNSKEVLSLGVQVPEAWEELLTMKVEAKSHLQWQESRLKRSNPLAREIFRRHFRQLCYQETPGPREALTRLQELCYQWLRPHVSTKEQILDLLVLEQFLSILPKELQGWVREHCPESGEEAVILLEDLERELDEPQHEMVAHRHRQEVLCKEMVPLAEQTPLTLQSQPKEPQLTCDSAQKCHSIGETDLIRSLRRRAVLIPLGAHLFSTDTFLFSKPVVIPQLKGGGETWPNNRGVLRDEVTKTEDRELVLRKDCPKIVEPHGKMFNEQTWEVSQQDPSHGEVGEHKDRIERQWGNLLGEGQHKCDECGKSFTQSSGLIRHQRIHTGERPYECNECGKAFSRSSGLFNHRGIHNIQKRYHCKECGKVFSQSAGLIQHQRIHKGEKPYQCSQCSKSYSRRSFLIEHQRSHTGERPHQCIECGKSFNRHCNLIRHQKIHTVAELV

SEQ ID NO: 15052 - protein, 462 aa, Homo sapiens
MGGAEAEPWGRAPGPAIGGRRAGDSCPGWRRRSRSRGRGQRLSHGPRRRPQLLTAAPPLQARGAFRSFPHSWGEDFLASLMFKIQLEPLKLRAWTLNGFVKFRNKETSAGPVAVMGKDYYKILGIPSGANEDEIKKAYRKMALKYHPDKNKEPNAEEKFKEIAEAYDVLSDPKKRGLYDQYGEEGLKTGGGTSGGSSGSFHYTFHGDPHATFASFFGGSNPFDIFFASSRSTRPFSGFDPDDMDVDEDEDPFGAFGRFGFNGLSRGPRRAPEPLYPRRKVQDPPVVHELRVSLEEIYHGSTKRMKITRRRLNPDGRTVRTEDKILHIVIKRGWKEGTKITFPKEGDATPDNIPADIVFVLKDKPHAHFRRDGTNVLYSALISLKEALCGCTVNIPTIDGRVIPLPCNDVIKPGTVKRLRGEGLPFPKVPTQRGDLIVEFKVRFPDRLTPQTRQILKQHLPCS

SEQ ID NO: 15053 - protein, 208 aa, Homo sapiens
MTAEKALPLGNGKAAEEARESEAPGGGCSSGGAAPARHPRVKRDKAVHERGHWNNKVEFVLSVAGEIIGLGNVWRFPYLCYKNGGGAFLIPYVVFFICCGIPVFFLETALGQFTSEGGITCWRKVCPLFEGIGYATQVIEAHLNVYYIIILAWAIFYLSNCFTTELPWATCGHEWNTENCVEFQKLNVSNYSHVSLQNATSPVMEFWE

SEQ ID NO: 15054 - protein, 898 aa, Homo sapiens
MRPMRIFVNDDRHVMAKHSSVYPTQEELEAVQNMVSHTERALKAVSDWIDEQEKGSSEQAESDNMDVPPEDDSKEGAGEQKTEHMTRTLRGVMRVGLVAKGLLLKGDLDLELVLLCKEKPTTALLDKVADNLAIQLAAVTEDKYEILQSVDDAAIVIKNTKEPPLSLTIHLTSPVVREEMEKVLAGETLSVNDPPDVLDRQKCLAALASLRHAKWFQARANGLKSCVIVIRVLRDLCTRVPTWGPLRGWPLELLCEKSIGTANRPMGAGEALRRVLECLASGIVMPDGSGIYDPCEKEATDAIGHLDRQQREDITQSAQHALRLAAFGQLHKVLGMDPLPSKMPKKPKNENPVDYTVQIPPSTTYAITPMKRPMEEDGEEKSPSKKKKKIQKKEEKAEPPQAMNALMRLNQLKPGLQYKLVSQTGPVHAPIFTMSVEVDGNSFEASGPSKKTAKLHVAVKVLQDMGLPTGAEGRDSSKGEDSAEETEAKPAVVAPAPVVEAVSTPSAAFPSDATAENVKQQGPILTKHGKNPVMELNEKRRGLKYELISETGGSHDKRFVMEVEVDGQKFQGAGSNKKVAKAYAALAALEKLFPDTPLALDANKKKRAPVPVRGGPKFAAKPHNPGFGMGGPMHNEVPPPPNLRGRGRGGSIRGRGRGRGFGGANHGGYMNAGAGYGSYGYGGNSATAGYSQFYSNGGHSGNASGGGGGGGGGSSGYGSYYQGDNYNSPVPPKHAGKKQPHGGQQKPSYGSGYQSHQGQQQSYNQSPYSNYGPPQGKQKGYNHGQGSYSYSNSYNSPGGGGGSDYNYESKFNYSGSGGRSGGNSYGSGGASYNPGSHGGYGGGSGGGSSYQGKQGGYSQSNYNSPGSGQNYSGPPSSYQSSQGGYGRNADHSMNYQYR

SEQ ID NO: 15055 - protein, 641 aa, Homo sapiens; identical to SEQ ID NO: 12073

SEQ ID NO: 15056 - protein, 1554 aa, Homo sapiens
MSATSWFLVSSSGARHRLPRELIFVGREECELMLQSRSVDKQHAVINYDQDRDEHWVKDLGSLNGTFVNDMRIPDQKYVTLKLNDVIRFGYDSNMYVLERVQHRVPEEALKHEKYTSQLQVSVKGLAPKRSEALPEHTPYCEASNPRPEKGDRRPGTEAASYRTPLYGQPSWWGEDDGSTLPDAQRQGEPYPERPKGPVQQDGELHGFRAPAEPQGCSFRREPSYFEIPTKETPQPSQPPEVPAHEMPTKDAEAGGGGAAPVVQSHASFTIEFDDCSPGKMKIKDHITKFSLRQRRPPGKEATPGEMVSAETKVADWLVQNDPSLLHRVGPGDDRHSTKSDLPVHTRTLKGHKHEDGTQSDSEDPLAKAASAAGVPLEASGEQVRLQRQIKRDPQELLHNQQAFVIEFFDEDTPRKKRSQSFTHSPSGDPKADKRRGPTPADRDRPSVPAPVQAGGRSSGPQRAGSLKREKTEERLGSPSPASRTPARPFGSVGRRSRLAQDFMAQCLRESSPAARPSPEKVPPVLPAPLTPHGTSPVGPPTPPPAPTDPQLTKARKQEEDDSLSDAGTYTIETEAQDTEVEEARKMIDQVFGVLESPELSRASSATFRPVIRGDRDESDDGGVAQRMALLQEFASRPLGAAPQAEHQGLPVPGSPGGQKWVSRWASLADSYSDPGLTEDGLGRRGGEPEGSLPVRMRRRLPQLPSERADSPAGPESSRRSGPGPPELDSEQPSRLFGQEELDPDSLSDASGSDGGRGPEPGVEPQDSRRRSPQEGPTWSRGRRSPRAPGEPTPASFFIGDQNGDAVLSRKPLAAPGDGEGLGQTAQPSPPARDGVYVSANGRMVIQLRPGRSPEPDGPAPAFLRQESFTKEPASGPPAPGKPPHISSHPLLQDLAATRAARMDFHSQDTHLILKETETALAALEARLLSNSVDAECEGGSTPRPPEDALSGDSDVDTASTVSLRSGKSGPSPTTPQPLRAQKEMSPSPPAAQDPGGTALVSAREQSSERQHHPLGPTDMGRGEPVRRSAIRRGHRPRGSLDWPSEERGPVLAHLPSSDVMASNHETPEATGAGRLGSRRKPAAPPPSPAAREEQSRSSASSQKGPQALTRSNSLSTPRPTRASRLRRARLGDASDTEAADGERGSLGNPEPVGRPAAEQAKKLSRLDILAMPRKRAGSFTGTSDPEAAPARTSFSGRSVELCCASRKPTMAEARAVSRKAANTATTTGPRQPFSRARSGSARYTSTTQTPRAGSSSRARSRAPGPRDTDDDEEEPDPYGFIVQTAEIAEIARLSQTLVKDVAILAQEIHDVAGDGDTLGSSEPAHSASLSNMPSTPASTISAREELVQRIPEASLNFQKVPPGSLNSRDFDQNMNDSCEDALANKTRPRNREEVIFDNLMLNPVSQLSQAIRENTEHLAEKMKILFQNTGRAWEDLEARINAENEVPILKTSNKEISSILKELRRVQKQLEVINAIVDPSGSLDLLTGNRSLASSAQPGLGKGRVAAQSPPSPASAEALLPALPLRNFPQRASCGPPSLPDPTFLPDAERFLI

SEQ ID NO: 15057 - protein, 123 aa, Homo sapiens
MMGSPVSHLLAGFCVWVVLGWVGGSVPNLGPAEQEQNHYLAQLFGLYGENGTLTAGGLARLLHSLGLGRVQGLRLGQHGPLTGRAASPAADNSTHRPQNPELSVDVWAGMPLGPSGWGDLEES

SEQ ID NO: 15058 - protein, 390 aa, Homo sapiens
MVMERLGIDLQKISGQNGTFKKSTVLQLGIRMLDVLEYIHENEYVHGDIKAANLLLGYKNPDQVYLADYGLSYRYCPNGNHKQYQENPRKGHNGTIEFTSLDAHKGVALSRRSDVEILGYCMLRWLCGKLPWEQNLKDPVAVQTAKTNLLDELPQSVLKWAPSGSSCCEIAQFLVCAHSLAYDEKPNYQALKKILNPHGIPLGPLDFSTKGQSINVHTPNSQKVDSQKAATKQVNKAHNRLIEKKVHSERSAESCATWKVQKEEKLIGLMNNEAAQESTRRRQKYQESQEPLNEVNSFPQKISYTQFPNSFYEPHQDFTSPDIFKKSRSPSWYKYTSTVSTGITDLESSTGLWPTISQFTLSEETNADVYYYRIIIPVLLMLVFLALFFL

SEQ ID NO: 15059 - protein, 1966 aa, Homo sapiens
MWIPTEHEKYGVVIASFRGTVPYGLSLEIGDTVQILEKCDGWYRGFALKNPNIKGIFPSSYVHLKNACVKNKGQFEMVIPTEDSVITEMTSTLRDWGTMWKQLYVRNEGDLFHRLWHIMNEILDLRRQVLVGHLTHDRMKDVKRHITARLDWGNEQLGLDLVPRKEYAMVDPEDISITELYRLMEHRHRKKDTPVQASSHHLFVQMKSLMCSNLGEELEVIFSLFDSKENRPISERFFLRLNRNGLPKAPDKPERHCSLFVDLGSSELRKDIYITVHIIRIGRMGAGEKKNACSVQYRRPFGCAVLSIADLLTGETKDDLILKVYMCNTESEWYQIHENIIKKLNARYNLTGSNAGLAVSLQLLHGDIEQIRREYSSVFSHGVSITRKLGFSNIIMPGEMRNDLYITIERGEFEKGGKSVARNVEVTMFIVDSSGQTLKDFISFGSGEPPASEYHSFVLYHNNSPRWSELLKLPIPVDKFRGAHIRFEFRHCSTKEKGEKKLFGFSFVPLMQEDGRTLPDGTHELIVHKCEENTNLQDTTRYLKLPFSKGIFLGNNNQAMKATKESFCITSFLCSTKLTQNGDMLDLLKWRTHPDKITGCLSKLKEIDGSEIVKFLQDTLDTLFGILDENSQKYGSKVFDSLVHIINLLQDSKFHHFKPVMDTYIESHFAGALAYRDLIKVLKWYVDRITEAERQEHIQEVLKAQEYIFKYIVQSRRLFSLATGGQNEEEFRCCIQELLMSVRFFLSQESKGSGALSQSQAVFLSSFPAVYSELLKLFDVREVANLVQDTLGSLPTILHVDDSLQAIKLQCIGKTVESQLYTNPDSRYILLPVVLHHLHIHLQEQKDLIMCARILSNVFCLIKKNSSEKSVLEEIDVIVASLLDILLRTILEITSRPQPSSSAMRFQFQDVTGEFVACLLSLLRQMTDRHYQQLLDSFNTKEELRDFLLQIFTVFRILIRPEMFPKDWTVMRLVANNVIITTVLYLSDALRKNFLNENFDYKIWDSYFYLAVIFINQLCLQLEMFTPSKKKKVLEKYGDMRVTMGCEIFSMWQNLGEHKLHFIPALIGPFLEVTLIPQPDLRNVMIPIFHDMMDWEQRRSGNFKQVEAKLIDKLDSLMSEGKGDETYRELFNSILLKKIERETWRESGVSLIATVTRLMERLLDYRDCMKMGEVDGKKIGCTVSLLNFYKTELNKEEMYIRYIHKLYDLHLKAQNFTEAAYTLLLYDELLEWSDRPLREFLTYPMQTEWQRKEHLHLTIIQNFDRGKCWENGIILCRKIAEQYESYYDYRNLSKMRMMEASLYDKIMDQQRLEPEFFRVGFYGKKFPFFLRNKEFVCRGHDYERLEAFQQRMLNEFPHAIAMQHANQPDETIFQAEAQYLQIYAVTPIPESQEVLQREGVPDNIKSFYKVNHIWKFRYDRPFHKGTKDKENEFKSLWVERTSLYLVQSLPGISRWFEVEKREVVEMSPLENAIEVLENKNQQLKTLISQCQTRQMQNINPLTMCLNGVIDAAVNGGVSRYQEAFFVKEYILSHPEDGEKIARLRELMLEQAQILEFGLAVHEKFVPQDMRPLHKKLVDQFFVMKSSLGIQEFSACMQASPVHFPNGSPRVCRNSAPASVSPDGTRVIPRRSPLSYPAVNRYSSSSLSSQASAEVSNITGQSESSDEVFNMQPSPSTSSLSSTHSASPNVTSSAPSSARASPLLSDKHKHSRENSCLSPRERPCSAIYPTPVEPSQRMLFNHIGDGALPRSDPNLSAPEKAVNPTPSSWSLDSGKEAKNMSDSGKLISPPVPPRPTQTASPARHTTSVSPSPAGRSPLKGSVQSFTPSPVEYHSPGLISNSPVLSGSYSSGISSLSRCSTSETSGFENQVNEQSAPLPVPVPVPVPSYGGEEPVRKESKTPPPYSVYERTLRRPVPLPHSLSIPVTSEPPALPPKPLAARSSHLENGARRTDPGPRPRPLPRKVSQL

SEQ ID NO: 15060 - protein, 401 aa, Homo sapiens
MAQRYDELPHYGGMDGVGVPASMYGDPHAPRPIPPVHHLNHGPPLHATQHYGAHAPHPNVMPASMGSAVNDALKRDKDAIYGHPLFPLLALVFEKCELATCTPREPGVAGGDVCSSDSFNEDIAVFAKQVRAEKPLFSSNPELDNLMIQAIQVLRFHLLELEKVHELCDNFCHRYISCLKGKMPIDLVIDERDGSSKSDHEELSGSSTNLADHNPSSWRDHDDATSTHSAGTPGPSSGGHASQSGDNSSEQGDGLDNSVASPGTGDDDDPDKDKKRQKKRGIFPKVATNIMRAWLFQHLTHPYPSEEQKKQLAQDTGLTILQVNNWFINARRRIVQPMIDQSNRAGFLLDPSVSQGAAYSPEGQPMGSFVLDGQQHMGIRPAGPMSGMGMNMGMDGQWHYM

SEQ ID NO: 15061 - protein, 187 aa, Homo sapiens
MDSFGQPRPEDNQSVVRRMQKKYWKTKQVFIKATGKKEDEHLVASDAELDAKLEVFHSVQETCTELLKIIEKYQLRLNVISEEENELGLFLKFQAERDATQAGKMMDATGKALCSSAKQRLALCTPLSRLKQEVATFSQRAVSDTLMTINRMEQARTEYRGALLWMKDVSQELDPDTLKQMEKFRKV

SEQ ID NO: 15062 - protein, 720 aa, Homo sapiens
MAAETQTLNFGPEWLRALSSGGSITSPPLSPALPKYKLADYRYGREEMLALFLKDNKIPSDLLDKEFLPILQEEPLPPLALVPFTEEEQRNFSMSVNSAAVLRLTGRGGGGTVVGAPRGRSSSRGRGRPNFEEGGPTSVGRKHEFIRSESENWRIFREEQNGEDEDGGWRLAGSRRDGERWRPHSPGWREHMERRRRFEFDFRDRDDERGYRRVRSGSGSIDDDRDSLPEWCLEDAEEEMGTFDSSGAFLSLKKVQKEPIPEEQEMDFRPVDEGEECSDSEGSHNEEAKEPDKTNKKEGEKTDRVGVEASEETPQTSSSSARPGTPSDHQSQEASQFERKDEPKTEQTEKAEEETRMENSLPAKVPSRGDEMVADVQQPLSQIPSDTASPLLILPPPVPNPSPTLRPVETPVVGAPGMGSVSTEPDDEEGLKHLEQQAEKMVAYLQDSALDDERLASKLQEHRAKGVSIPLMHEAMQKWYYKDPQGEIQGPFNNQEMAEWFQAGYFTMSLLVKRACDESFQPLGDIMKMWGRVPFSPGPAPPPHMGELDQERLTRQQELTALYQMQHLQYQQFLIQQQYAQVLAQQQKAALSSQQQQQLALLLQQFQTLKMRISDQNIIPSVTRSVSVPDTGSIWELQPTASQPTVWEGGSVWDLPLDTTTPGPALEQLQQLEKAKAAKLEQERREAEMRAKREEEERKRQEELRRQQEEILRRQQEEER

SEQ ID NO: 15063 - protein, 376 aa, Homo sapiens
MAVLGVQLVVTLLTATLMHRLAPHCSFARWLLCNGSLFRYKHPSEEELRALAGKPRPRGRKERWANGLSEEKPLSVPRDAPFQLETCPLTTVDALGLASMTQNLEPLLKKQGWDWALPVAKLAIRVGLAVVGSVLGAFLTFPGLRLAQTHRDALTMSEDRPMLQFLLHTSFLSPLFILWLWTKPIARDFLHQPPFGETRFSLLSDSAFDSGRLWLLVVLCLLRLAVTRPHLQAYLCLAKARVEQLRREAGRIEAREIQQRVVRVYCYVTVVSLQYLTPLILTLNCTLLLKTLGGYSWGLGPAPLLSPDPSSASAAPIGSGEDEVQQTAARIAGALGGLLTPLFLRGVLAYLIWWTAACQLLASLFGLYFHQHLAGS

SEQ ID NO: 15064 - protein, 562 aa, Homo sapiens
MDLPEGPVGGPTAEMYLRERPEEARLGMPVSLEEQILNSTFEACDPQRTGTVAVAQVLAYLEAVTGQGPQDARLQTLANSLDPNGEGPKATVDLDTFLVVMRDWIAACQLHGGLELEEETAFQGALTSRQLPSGCPEAEEPANLESFGGEDPRPELQATADLLSSLEDLELSNRRLVGENAKLQRSMETAEEGSARLGEEILALRKQLHSTQQALQFAKAMDEELEDLKTLARSLEEQNRSLLAQARQAEKEQQHLVAEMETLQEENGKLLAERDGVKKRSQELAMEKDTLKRQLFECEHLICQRDTILSERTRDVESLAQTLEEYRVTTQELRLEISRLEEQLSQTYEGPDELPEGAQLRRVGWTELLPPSLGLEIEAIRQKQEVATADLSNPLCGVWQWEEVIHETSEETEFPSEAPAGGQRNFQGEPAHPEEGRKEPSMWLTRREEEEDAESQVTADLPVPLGAPRPGDIPENPPERPARRELQQALVPVMKKLVPVRRRAWGQLCLPPQRLRVTRHPLIPAPVLGLLLLLLLSVLLLGPSPPPTWPHLQLCYLQPPPV

SEQ ID NO: 15065 - protein, 749 aa, Homo sapiens
MALPLLPGNSFNRNVGKEKFHKSQHWGFCNNVMMLVSDEKPGIGGEPLLGQKIKPKCSIYPKGDGSDVPSWVAFDKQVLSFDAYLEEEVLDKSQTNYRIRYYKIYFYPEDDTIQVNEPEVKNSGLLQGTSIRRHRITLPPPDEDQFYTVYHFNVGTEVVFYGRTFKIYDCDAFTRNFLRKIGVKVNPPVQCPEDPYMKIRREVVEHVEPLRPYESLDTLKQFLQYHGKILCFFCLWDDSVSMFGDRRELILHYFLCDDTIEIKELLPHSSGRDALKMFLRRSKLPKNCPPRVYQPGQITDRAVLNSYGDFIKNQADGYLFDRYKLGKVDQEFYKDSDLSLGVTINVWGRKVLLYDCDEFTKSYYKSKYGIENFTSVSCKPPSPPPKIERKFPPYNGFGSEEDSLRNCIDLKPTPHRRNFKKFMEKDSYGSKSNILRFFAKLVTDKCVDLDRMFVISYYLGDDTISVFEPIERNSGIAGGMFLKRSRVKKPGQEVFKSELSEYIKAEELYIGVTVNVNGYLFRLLNADEYTLNYMEQNTDKYPFSNLKLALQKLKQEEGKSRELKQVFKAADSKHTNMVDYNTFRDILMSLTVGNLAEQEFVTIARHYRVPEGTCSDMDFLIALAHEKFKKNMFENFDTFIYSCVYEDREKKNVLPTKDIKRLCKSSRLPLSDDLLESLLSRFEDSEKQIDYKSFFSALNWRKNPVPELQPASYLKERCEDVWLGMPSPIPAKYIDYWTFLKDAFGLEEE

SEQ ID NO: 15066 - protein, 296 aa, Homo sapiens
MLFMKMDLLNYQYLDKMNNNIGILCYEGEAALRGEPRIQTLPVASALSSHRTGPPPISPSKRKFSMEPGDEDLDCDNDHVSKMSRIFNPHLNKTANGDCRRDPRERSRSPIERAVAPTMSLHGSHLYTSLPSLGLEQPLALTKNSLDASRPAGLSPTLTPGERQQNRPSVITCASAGARNCNLSHCPIAHSGCAAPGPASYRRPPSAATTCDPVVEEHFRRSLGKNYKEPEPAPNSVSITGSVDDHFAKALGDTWLQIKAAKDGASSSPESASRRGQPASPSAHMVSHSHSPSVVS

SEQ ID NO: 15067 - protein, 906 aa, Homo sapiens
QQDIVGSWGIPPATGKPPGTGWLGGPIPAPAKEEEPTGWEEPSPESIRRKMEIDDGTSAWGDPSKYNYKNVNMWNKNVPNGNSRSDQQAQVHQLLTPASAISNKEASSGSGPKSMQDGWCGDDMPLPGNRPTGWEEEEDVEIGMWNSNSSQELNSSLNWPPYTKKMSSKGLSGKKRRRERGMMKGGNKQEEAWINPFVKQFSNISFSRDSPEENVQSNKMDLSGGMLQDKRMEIDKHSLNIGDYNRTVGKGPGSRPQISKESSMERNPYFDKNGNPSMFGVGNTAAQPRGMQQPPAQPLSSSQPNLRAQVPPPLLSPQVPVSLLKYAPNNGGLNPLFGPQQVAMLNQLSQLNQLSQISQLQRLLAQQQRAQSQRSVPSGNRPQQDQQGRPLSVQQQMMQQSRQLDPNLLVKQQTPPSQQQPLHQPAMKSFLDNVMPHTTPELQKGPSPINAFSNFPIGLNSNLNVNMDMNSIKEPQSRLRKWTTVDSISVNTSLDQNSSKHGAISSGFRLEESPFVPYDFMNSSTSPASPPGSIGDGWPRAKSPNGSSSVNWPPEFRPGEPWKGYPNIDPETDPYVTPGSVINNLSINTVREVDHLRDRNSGSSSSLNTTLPSTSAWSSIRASNYNVPLSSTAQSTSARNSDSKLTWSPGSVTNTSLAHELWKVPLPPKNITAPSRPPPGLTGQKPPLSTWDNSPLRIGGGWGNSDARYTPGSSWGESSSGRITNWLVLKNLTPQIDGSTLRTLCMQHGPLITFHLNLPHGNALVRYSSKEEVVKAQKSLHMCVLGNTTILAEFASEEEISRFFAQSQSLTPSPGWQSLGSSQSRLGSLDCSHSFSSRTDLNHWNGAGLSGTNCGDLHGTSLWGTPHYSTSLWGPPSSSDPRGISSPSPINAFLSVDHLGGGGESM

SEQ ID NO: 15068 - protein, 1002 aa, Homo sapiens
MLLGTLLLILYILMLCRMFLLVGAPKANTTQPGIVEGGQVLKCDWSSTRRCQPIEFDATGNRDYAKDDPLEFKSHQWFGASVRSKQDKILACAPLYHWRTEMKQEREPVGTCFLQDGTKTVEYAPCRSQDIDADGQGFCQGGFSIDFTKADRVLLGGPGSFYWQGQLISDQVAEIVSKYDPNVYSIKYNNQLATRTAQAIFDDSYLGYSVAVGDFNGDGIDDFVSGVPRAARTLGMVYIYDGKNMSSLYNFTGEQMAAYFGFSVAATDINGDDYADVFIGAPLFMDRGSDGKLQEVGQVSVSLQRASGDFQTTKLNGFEVFARFGSAIAPLGDLDQDGFNDIAIAAPYGGEDKKGIVYIFNGRSTGLNAVPSQILEGQWAARSMPPSFGYSMKGATDIDKNGYPDLIVGAFGVDRAILYRARPVITVNAGLEVYPSILNQDNKTCSLPGTALKVSCFNVRFCLKADGKGVLPRKLNFQVELLLDKLKQKGAIRRALFLYSRSPSHSKNMTISRGGLMQCEELIAYLRDESEFRDKLTPITIFMEYRLDYRTAADTTGLQPILNQFTPANISRQAHILLDCGEDNVCKPKLEVSVDSDQKKIYIGDDNPLTLIVKAQNQGEGAYEAELIVSIPLQADFIGVVRNNEALARLSCAFKTENQTRQVVCDLGNPMKAGTQLLAGLRFSVHQQSEMDTSVKFDLQIQSSNLFDKVSPVVSHKVDLAVLAAVEIRGVSSPDHVFLPIPNWEHKENPETEEDVGPVVQHIYELRNNGPSSFSKAMLHLQWPYKYNNNTLLYILHYDIDGPMNCTSDMEINPLRIKISSLQTTEKNDTVAGQGERDHLITKRDLALSEGDIHTLGCGVAQCLKIVCQVGRLDRGKSAILYVKSLLWTETFMNKENQNHSYSLKSSASFNVIEFPYKNLPIEDITNSTLVTTNVTWGIQPAPMPVPVWVIILAVLAGLLLLAVLVFVMYRMGFFKRVRPPQEEQEREQLQPHENGEGNSET

SEQ ID NO: 15069 - protein, 1282 aa, Homo sapiens
MAADLNLEWISLPRSWTYGITRGGRVFFINEEAKSTTWLHPVTGEAVVTGHRRQSTDLPTGWEEAYTFEGARYYINHNERKVTCKHPVTGQPSQDNCIFVVNEQTVATMTSEEKKERPISMINEASNYNVTSDYAVHPMSPVGRTSRASKKVHNFGKRSNSIKRNPNAPVVRRGWLYKQDSTGMKLWKKRWFVLSDLCLFYYRDEKEEGILGSILLPSFQIALLTSEDHINRKYAFKAAHPNMRTYYFCTDTGKEMELWMKAMLDAALVQTEPVKRITFNFRVDKITSENAPTKETNNIPNHRVLIKPEIQNNQKNKEMSKIEEKKALEAEKYGFQKDGQDRPLTKINSVKLNSLPSEYESGSACPAQTVHYRPINLSSSENKIVNVSLADLRGGNRPNTGPLYTEADRVIQRTNSMQQLEQWIKIQKGRGHEEETRGVISYQTLPRNMPSHRAQIMARYPEGYRTLPRNSKTRPESICSVTPSTHDKTLGPGAEEKRRSMRDDTMWQLYEWQQRQFYNKQSTLPRHSTLSSPKTMVNISDQTMHSIPTSPSHGSIAAYQGYSPQRTYRSEVSSPIQRGDVTIDRRHRAHHPKHVYVPDRRSVPAGLTLQSVSPQSLQGKTPEELTLLLIKLRRQQAELSSIREHTLAQLMQLKLEAHSPKNEILSHHLQRNTIYLDHQMKENEPIITMVHTMIENSALRPQLYQQFLRQKSKISLYCLSQDEGRGTLYKYRPEEVDIDAKLSRLCEQDKVVHALEEKLQQLHKEKYTLEQALLSASQEIEMHADNPAAIQTVVLQRDDLQNGLLSTCRELSRATAELERAWREYDKLEYDVTVTRNQMQEQLDHLGEVQTESAGIQRAQIQKELWRIQDVMEGLSKHKQQRGTTEIGMIGSKPFSTVKYKNEEEEVVPPRPPLPRSYDFTEQPPIIPPLPSDSSSLLCYSRGPVHLPEEKKMYQVQGYPRNGSHCGPDYRLYKSEPELTTVAEVDESNGEEKSEPVSEIETSVVKGSHFPVGVVPPRAKSPTPESSTIASYVTLRKTKKMMDLRTERPRSAVEQLCLAESTRPRMTVEEQMERIRRHQQACLREKKKGLNVIGASDQSPLQSPSNLRDNPFRTTQTRRRDDKELDTAIRENDVKPDHETPATEIVQLKETEPQNVDFSKELKKTENISYEMLFEPEPNGVNSVEMMDKERNKDKMPEDVTFSPQDETQTANHKPEEHPEENTKNSVDEQEETVISYESTPEVSRGNQTMAVKSLSPSPESSASPVPSTQPQLTEGSHFMCV
